United States Patent Application Publication US 2006/0194265 A1 - sequence listing, part 4

SEQ ID NO: 502 - DNA, 27297 bp, Mus musculus
  misc_feature (1)...(27297): n = A,T,C or G
ccagcaccttctgcctgttatgtcccccaccctgcctggcctgggatgagaaagaactgacaaactgaaggagagatgaggctaagggaaggagctatcccaaggcttgaaacggaggtgaacaagtgagcaacttcacttattccaagtggtgcctcgtaagaatgagagaaggccgagtttggggatcaaactaatgggctaagtcaggatcacatcaggatcggtgaccttgttgacttgccttggcctcttggtctcagtttcctgtgtgtaaaatggggataatacctgtccctgccccaagacagattaagcctccaggaggctgcagacgacctctaaggaggttctgacgcattcagctccagtaagtgacccttaccgtgtccattatatggggacagttttacctttccagagcaggacttcccaacctttgttaatccatgacacatctttggacatgacaggctacctgagagagcctccaccctcagcgtgtgaccaatcccagccatccataattgcccacattcctgaggctgtgctcactcgaatttaccctccttcaaaccctccgagagagcttacactccttgaaggcagaccaactccgagtttttattgtgctaatcacggtgtgttgctatatttgttcacacgcctacccctcctaccttgttgtagcttttcccgtctccaggacctattcaagtacctggccctccataaagctcgctgaattagcacaatcctcttctgctgggtgcctggcaccgtctggcttgacggacgttttcaatgtgtggcatagctgagtgcggacgaaatggtatgtgtgtacaaacacccagccctgcccgcctctcttcaccatggtaacagtgcagtttccagacccaaactggcaaagagcattgatgaaacccaaaacttcagaacacagcaaagcccttaaaggtcagagacctgggcaggcgggtagggcagctgagtggtgatcccctgcacaggtcagcaggagacttcggggacagctgacgatggacctcttttccattccactctcctactcttcatcccattcccatggtgcctactccccagcacagcaaatatcccctctgcacaaagatcttatccacctctatagcacctgcaaggccttgacctctcagctctctggcctcacagctccatgaccacttttgtttgctctccggcttgcttgcttttgtgctgctgagtgtagaactcggggccctgtgcacgctaaacccatgcactagcattgagccacccctctctctgcgactgacctgtaaggattaagggtgcacacagtgacggcagggaagaccagcttgtccgaattgaggttgatgttgagactcacggggtagctgaagtattcctcgaacagcaaagcaaactgccagtacatcatgccgaaggtgcagagccacagcaccgcccagaaggccgtcttcatgcggttgtgcttggagcacaccaggcggatggcaccgtggatggtggtattgttgcagaagaactggaagagctcccggtaggagcggtggaactcgatcagtgcctcctcctcctcggtgggctgccggggctctgagggttccgggcccagcgcctgttcttcacgcttgtcccccttgcccagtccttgcatgggcagaggaggacaaaggtcttgctccttgaaattgttgcccttcatggatcccttcggtgagttggagacgtcaaggtctaggtcaaggttgagctcaggggctctggtgtggtccagcatcattagtatggaggcagaatggggccgtccgtgacggtgcccgcatcccacgctgagttccctcttcctcagtcctcccaccctcctccacctctccaggagccagctgaccttctggagttggggccaaccaggcagcacggagcttcactggagtggccacagagcgaagtggtcacagcgaaggccaccttcgtttgcccgctagcgcctccctgggtctccacagcaggcaccctgtctggcttagcgtctctccctcttgcccctttttcctcccggactgtttgactctccggctttcacgccctcttggcccagctgactcccgcttctctttgggtctccctctctgtgccaggctctctgatcctgcctcacttcctttcctgccttccctatctcctcctgggtcctcttctctaggctctctagccctggcctccagctccctgctacctccttctctgcctcggggaccgtgggttgcaggaggccggagctgcctcctgctcccggctccaggtgtggctgggctgtgactggttcctttccagttaaatctggcagccgagcctctccaccctctcacctgacaggtgcagtgcctggctccagagaccgcccgtcggccacgggcaaggatgggagcgacagaagcctcattagcatctcaattaaaggtgagcagggcagagggaggatcggaggaggagtctggtctgggagctctccagggaggagggctcttgggggacaggtgaaccaggtacctgctgaagagtttcggccagggattgatggcgaactgactgaaaaagagactaggggcagaagacaggtgaggctcagagaaccggagaagagaggaaggattctacacgcaaaagccaggaaggcagaagcggaaggaggatcgccgagagtaggtggggaaaccaggagaacagggaaggcagaaaagagagacagactgaggaggactgggcaaagagctgagggaagatgaaggaggaggaagaggagggagccagctccaaagggactctcctgtcaggcaagatggctaggggaaaggaaacctaggtgaaatttcagaaaccagggtcccttctgattgaggtccctcaaggtcatcccaggtcagcctcacacccagggtcctggaggaaaaagagaatgggtccccccaaaactgggagcacctgctggcccccaccatcttcttccccatccccttccctctgaacttctcaccccatctacctggccctgtccaggcctgggagggaggggcccaggtgaagtagggggctgggccaggtcctaggacattctgttctttttgacactattggctgataggccaggaatgtgtaatgtcccctgttgtggtcacagggttgcaggaatgtgggcaccagaggtaacatgtacatgggggccaggcagagctctgtgggcacagaccaagagccctgggacaggcagggatggcagaccctggaagagaacacaagctgtgtctatactggtatctagggcaaggagggtgggcacgctgtcctagaaagaagtggaagctctttcatccaggctgtgtttttctccaaactctccctcaagctaccctagctagaggagacagatgcaagcagggaccacacaggtgtgacagcctcaaaggctcacacccccaaaagaaagagtgaagagtcatgggagagccatccacatagcccaggtcctgcagagcttgctagtgatagtgccacttgagccctggagagggcagccacccagtgctccagtgtgctcactggctcttcctaccctctctccagcagcaggaacaacagacaggggtgttctctgtgctccagacctacagacacagaccaaagcagccacagaggtttatggaaagcaacaggtagttgacatacagggagatgaggggtctggaggcagggataggaaccaagtgctgggggacagtgggggaagcaacaggagggacccatttcaagtgacaccctggagggactcatttcaagcgacaccctgaagactggcattgcggctgaagcttgcagaataaaccagacaaataagagggtcctctgagctagtctcattcttgaaatggtcaacctgggtgccgcctgttagctaggctgtttgacagacgccttgacacacatccacgaaacctttctgtaagaagagggaggcaggctccttctccacttctcacacacggaaaccgaccctccaaaccaataagccagttttctgacatcacaaagcggaccagcagctgttgtagacagaatgcaaacaaaacatcttttcctctgacgttgcctctcgtcatttccctcctgagacagaccagtcataactcctggggaaccagcccagcaggaggggtttggtccctcccacacaaagcctatggattcaccctctccaggtaatgtctccttggctgtgtgcctctgagctgtttctacctctccatttccccagccacccctatgctcccttgaatcaagcaagtccttaaagcagtgtcctacaggcaaggtgcccgcttcccctgactgtttagtctgtgaggttccgagaagagaagctggctcctccctgcctcttctgtttgctagctgggcctgaaacccaagtactggcttaaggcagcatgacaaatagttttcatctcaaggactccgtgagaatgcctggcccaaagagtgtggtgactctggcatgtcctgacagagtatgagagagtggcttggcttggcttggcgtggtgaccacggcactagagatctggaatgggccagtgcaagcatgatgtaagaatagatattggtactttggtcagagtcccatttgaatcacactcacaaatacacatgcatacacatagatattcaaatacagacagacagacagacagacagacattcaaatacatgcacacacacacacacacacatacacacacacacacacaaacacaaacacaccaaaaccaggggatccttctgtagcccaggctagcctggaactcacagtagtcctcctgcctcagctttgcaactggatacatttttgtggtagtatagtttcccagcaatcccgaaacatgaagcaacacaagcttcccattgtccccttttctccttcccctcagcccagaaagagcaccacgatgctgatgacatgttcatcagtgcatctctgccatgacatgttcatcagtgcatctctgccggtgacatgttcatcagtgcatctcttccttggtgtctctctgacttacgtgttttgttgtgctgtatgctgagaaaaggtttcaatgtctaactaaccttaaacttgcttcctaaccaaggctgaccttgaactcgtgatccacctgccttggcctcccaagtattgcgattacagatatgtatggcatgccagcttacattcatttccaaaaagaaataatcctaagtgtgactacttcatacgtatcactctatgacttccattattttcaaaccatttgtcttcaagaaagcacgttcaagccggacatagtggtgcagcctttaccccctacttgacaggcaggcagatcttcatgagttcaaagccagcctggtctacacagtgagtgctacatagagagatcctagagagatctgggggnnnnnnnnnnnnnnnnnnnnnnnnnnnnnnnnnnnnnnnnnnnnnnnnnnnnnnnnnnnnnnnnnnnnnnnnnnnnnnnnnnnnnnnnnnnnnnnnnnnnnnnnnnnnnnnnnnnnnnnnnnnnnnnnnnnnnnnnnnnnnnnnnnnnnnnnnnnnnnnnnnnnnnnnnnnnnnnnnnnnnnnnnnnnnnnnnnnnnnnnnnnnnnnnnnnnnnnnnnnnnnnnnnnnnnnnnnnnnnnnnnnnnnnnnnnnnnnnnnnnnnnnnnnnnnnnnnnnnnnnnnnnnnnnnnnnnnnnnnnnnnnnnnccttgccaggtgcatctagctccctgctcaggcacacaggggaactaaggcttgagaacaaagtgaccttgtcagggtcaccaggagttggggtgagttatatcccaagtctgatgctgttttcttgacttccaagatagtagagtcccgtatgacatttcaagggcatttttttttttttttttttttaccttgtctgagaaaggctccctacccagggcgtcctgttgcctctcccagaaccccaagccatctcttaaataaggggctgccttctctgtcccattccagccacccattgaacctttagtacatccataaaccatgcagtggctctagggaaagaagccaacctttagggttgcagtgggtgcgcattaggactgacaagtcctccggcctcttcattccagagatgagtgacaggaaggatccgtttctgctccacacctccaaggaaagcctgcctcatcacctcctgctgttcactgttaacgatgtggcccacgcatgcacctgtgttcccttccacaggcctacatgtatgcagaccattttatgaaaactctgatgacaagcaccaggcttgtttatcttggcgggtgactcgtggctaccatttctgttttgtttctgagacactcactctgtggcccaagctgttctcaaattcccagtcccccaagtgctgaagttacaaatgtatgccactatgtccaacttaatggtcgttgcccgttggcccactccgcagacaaaagaatctcacatcttggctaggatccaaggtttatcatttttttgacagtggagtgcacacgggaaaaacttcaaacatctcggcttcctccaacagcatactgatttggggggctgttaatttatcaaaatttcttacacctttcccctttcagcttttatgctttctagggtaaaaatgagtcacacaattaatcatacccctttacttttacacttagcactaactatggggcagcctactgtggcaaagagcatccttttatcattctttatgtagtataaatctaatgaggtagaccagaaaatttctctctcccatcctcattctagcgacctgtgaagatgcttaggagtccccattaagacttattcctttgcttagttacagggcttgacaaggtccttgctgctggcaatcccaaccaggcaattccttactgtctgagcctgtcttacactgcgggacacagcaacatccctggcctctgcgctaggtgacagtgggaattccaagcagttgcaacctaaagtgtctttaagatatttccaagtgtcttctggggagcaaggttaccaagatggagagtaactggacaaatctttgctcccactgaaactccaaacactcatctgatctgtccatttctctctgtctaccagcccagctgggctggctaacggaatcagttggctaagggaaatataaggaagaagacaggagtggtttagagtgatccactcacaccaattctctttgggaattactcataggctgtggggaaaagggtgtttccgcaaccccttcggagggaggcctgggagaagagcccttcacaccttctgggagtctgagggcactcagttctggtctggtattgcccagtggacattgatgaaagtttctggaagctggtaaaaagtccaagtaacaaagacaatgctgtgctcactaagaatttgaagatttctcatccggagtctccatcccccagaagaaggttggagaggtattatagtaaccattttgtattgtctgcccgaagtctccgtaggctgccaggaggtgggtcgggtctccccacctttctgagtcctgtcacagaacgtgcccacactcctatactcactgcataaatagacaaataaacaggtgaaaaaagtcaatgagaccccactaatctacatgtgaaaactcacaaactttaaaatccacactaaaggtagccaacacctttaatagcagagcttgggaggcagaggaaggcagatctctgagttcaagcccagcccagactacagagggagttccaggttagccagagctacacagagaaaccttgtcttggggggagaatgatgtgaaaaaaaaagacaggtcacaagtgaaagctaagtaagacaacatggaggctcctaattctctctctctctctctctctctctctctcttctctctctctctgaatagtacatgtgaattttccctaataaaacattaaaaaaaaaaaaaagaaatagtgaaatgtatctagggccgctccccacccacccgttcctttatgctgttaagagatccaagtgagtcaagcccctgccccaactccctgagcccagaaggaagagaaatcagaggtctgctattcagtatctctaccactgccagggaacctgggacaattgagacagacaggtaccagcagagtggagctgctgggccagcacccagggaggggacagcacagagtgactatcaagagcccaggcagcagttaagagcatcaactgctcttctgaaggtcctgagttcaattcccagcaaccacgtggtggctcataaccaccactaaggagatctgactccctcttctggagtgtctgatgatagctacagtgtacttacatataataataaataaatcttttttttaaaaaaagtatacacttaaaaaaaaaaagcccaggcaagttcccccccaccccgccccgctctgttcccccctctccccaggtcttctctaaaactcaatcccttgccagcatttcgaggctccaccgaaagcctgtctggatatctgatccaccatggaaaaggtcagttctcaggtgagctattgcaagagaaggctttccctcattccaaatgagagtccaaccccaccccccacccccgagtcacaagggaggcaggacagatgttgccatgggctgggatctgaaaatcagatctggactgcagttaagttcttccagagtggctaagcggtgtggacagccttcatttacacaacgaatatgtacctggccagtggcataagccagatcatgctagactccgtgagcctagactaaatagccaaaccaggccacgggccagccaatagcctagtaaggagcacagggcagacattagggttccttgggggctccatggctgttttcttaatagaaatttagaggggtgtgtgtgtgaagggggctgggggggggttgggaatcagtagacgtgggaaaaaagggtgtcacatacttccagcagctctgggctattaatggcaggaagaaaaggcccaccaggcttaacgatcttggaaccctgtgcaccgctgcctggcaccctgggcaggtcttctctagaaagtaaggtacctacactggctgggctctcaggtccctcggtttaagagagttataggcctatgtgcacacacgctggaactaggctacccagccccagcccagaagcccccactcaccaggacctgggtttacacacgcccacccttccgtgagagaggtcccagaggagaggacagattcagggccagctgaactctctccagtgtcttgtggtgtgcgccctggtgtgtggcgtgggtgggcttgttactgtggaagcttctttttaaaaagtcacagagtggagcaggccctcagtctctgccaagtgggatgcctggccagacgctggctgcatctgctaaccacctctgggtatcctggctgggtgcactgtcaatccctggcgcctcctctttgcaaatctgacacccagctgtccacagctctctgcctcaacgtccacggcaggtcaaccaagtcagctctgcctcgggctctcggaggtgggcctgactgatggctagccactgtctctgctgcccccctttcggccagcaagcgatcctaatccgcaatcccctctgagagccaggcttccgaagaaaggtggaggccgggttccgggcctgcagctctcacgtgctttcccggccaccccctcccgccctgcgtcgaggcggccaagcctgttcctcttcccccccgtcgcgattgcgacaggccggcctctgctcccagggctccctgcccccgcccccggccggctcgctccactcccacttcctgagcccggcgctggagccctggaggccaggcccggccgctcccggcccccgggggcacgtcggcccagccgccaggcttgggaagtcgtggccaacgctgctcaggacgtccgggcttcccaccttcctcctaggactccacccggtctggtcagccgagccgaaaggccgccatgcgcctgccccgggcctcctctccctgcggcctggcctgggggccactcctgctgggactcagcgggcttctggtggcctctcagccccagctggtgagggaggggctaggtgggatggacctggtttctctctagcccttctgccctccagagctgaccctgcctcattcttctctttctccgcctcccctggaaggtgcccccttatcgcatagaaaaccagacttgctgggaccaggacaaggaatactacgagcccatgcacgacgtctgctgctcccgctgtcccccaggtgagaacagtggctccaagtggcttgggtggtagaggtgagccagaatgagccagcactgctaaaactagccaggaaggagagtctacgaagcattagcattgtcccacggacactgagatttgaagaggtagcggcatgtagccatgaagacaggatggggacaaagagaccaaggagaggctccgaggcatgcagcaagcagaggcagcggacgcagagatggacttcttgtctcctgataaccctctttccccattcgcctcataggcgagtttgtctttgcggtatgcagccgcagccaagacacggtttgcaagacttgcccccataattcctataatgaacactggaaccatctctccacctgccagctgtgccgcccctgtgacattggtaagtggggactcatctggatctgcatgatgggtacgactgggagggccagctcctctctgactcttccctctccctgacagtgctgggctttgaggaggttgccccttgcaccagcgatcggaaagccgagtgccgctgtcagccggggatgtcctgtgtgtatctggacaatgagtgtgtgcactgtgaggaggagcggcttgtactctgccagcctggcacagaagccgaggtcacaggtcagaggtcactgagggcagccagtaaagggaggctgggcatcaagggcaaggaacgtgatactgtgcgcatggtgcttctccccactggtactgtgagtgtggtacctctgcccactgggagaaccataaagaatctatcagtccttgaaaaaggctcacaggagggggtctgccaagacatgaactggtatgaggagcttagaaggtagctccctcctgtcagccctggggaagcttgggcaaaacggcaggctgcaaagccaagcttgggaaaggtagcaactacagagcagaatggttggcaaagaggggacgtaaaggaaggccaccgagtcctcacacttacccactcacccccactggcctgcctttcttttgccagatgaaattatggatactgacgtcaactgtgtcccctgtaagccgggacacttccagaacacttcctcccctcgagcccgctgtcaaccccataccaggtgagagggcccttcccccactcacctccaggaaacccaagggttgtcatctcctccatccttgacttccggccatcccgaccatgtgttcctggagccagtcaccaaggggagcagggagaagctcacagtcttgtttctccacagatgtgagatccagggcctggtggaggcagctccaggtacctcctactcggataccatctgtaaaaatcccccagagccaggtaagacaccgggctgaggaacacaaggcagggtcggtctgggaagatgcctcagcccccctcatccacagaaacagggaacagtgcatctttcttcccagggttagacaaagtcagaaacatttcttctgaagaaatcagaaggaggtagcgtgtagttccatggttagaacgcttgcttgggatacataagaccctgagtttggaccaaaagaaaaaaaacgaaaacttggaaaggcaggtgtggtggtgcacccttgtaatccccagcgcttgaaaggctgcggcagaagaatcaagagtttgaggctagccttggctacagagtgagcctgtctccatagagggcctggagattagaacatccctagactcttttcttacactttcaaaattatacatattatgccaggaaacattcctgtgctgtgacgtaattctaaccggcttcatcactatgcttggatgcgattccgtcatagccttccttcactaattgaatacctcgttgttcacttacacacatctgttggagacatgctcccccactgggctctttctaggttttcttgtttcttggtttctgtcttcgaggaaacccactagtttcccagcctggtggttgactataagttcttctgatgactctaatcgctactaattggcagaatgtagtaacatttttgagtgaccagacttttgtaattatagcttccacatcctgagaacaactctgaacctctcagtgattccacttaagctgcctaatgattctataaactgggattattcattctcactgatggggggagaaagctgagatgttaaatgacttgctggagatcgtgtgtgtgtgtgtgtgtgtgtgtgtgtgtgtgtgtatgtatgtatgtatgtgtgtgtgtatgtgtgtgtatgtatgtgtgtatatgtgtgtgtgtttgtgtatgtgtgtgtgtgtgtgtgtgtgtgtctgtatgtgtgtgtgtaaatcacgttattactgtctatatctaggtcttccttacttggggctcatttataaggtacacaagctataaaatgtcctaagccttcacaccagttgtggaagcacacgcctgtcacccctacatttgggaggtgtagccaggacccaggctgggctgcataagaccctgtctctgagagaaggaggagagaaagagggaatgaatgaaaattcagctaaaattcccccactgaacatagaacatttccactcttactaccttggtctatcccttccaacacattccccgtgcatttctattcatataattttctagactaaaagtggggtgatagaagtgttttatacttgacttttttgataaggagaaattggcagtagatgctgaaccactgggatgatatacaagcttcccttacacacacacacacacacacacacacacacacacacacacacacattcccttatatactagtatattcccttatagactataacatataactagtatatattatataatatattcccttatagactagttaacaatgtgtcataaatattttcccatcctctctcagaaactttcagctatgcatccaaaatcaactatgcatcaaatatcactggagcatcagagctaggatttaaaagtctgttagcctgcttgttttatgtatgacgaactgatgcttggataggtgaactgacttaaagacagggacctagccgggcatggtggcgcacgcctttaatcccagcactcgggaggcagaggcaggcagatttctgagtttgaggccagcctggtctacaaagtgagttccaggacagccaggcctatacagagaaaccctgtctcaaaaaaccaaaacaaacaaacaaaaaaagacagggacctaggagtccagacacctggtccagtttctctccatgccctgcattctgtatttccttaggccacaagtgtggtcgaatcaccaggggcaagcttagggacccaaactcccatctctctgcctctgtctttgccctgttatgagcaagggggtgagcagtttgcaactcctactctccctgagtgccgtaggccaggctcggaactgaatcaagttctcacaggcacagagaggcaatctcaggcccagtggcccctctgtaagatagccaggtcacggacatggggctctccccttaggcccaagtaccacctcccctcccctgccaccccacaccccacccccgcctttcaccaatttccagcattgaaagccagcttcccactcactgctcacccactgacttccagagatctagacaccaacactcaggacagagtctctcgtgtggtcaaaagatctttcccaagaccagctcagccctttgtccccagtccaagggacagggctccaaaagagggacttctgagaggagctcctcccccttgtcctttggtgccatctgtctgtctgctgtcctggcaggagcaatgctactgctggccatcctgctgtcgctggtcctctttctgctcttcaccactgtcctggcctgtgcctggatgaggcacccgtctctctgcagaaagctgggtaagaaggagccgccatccccgccctccaatccccacaaggaggtggtggttgactggagggatgttcaagggcaaaccctccctacctgacaccattctctctgatcctagggttaagggtaactctatcatcctccgctgggacactagggttggcagccccacatggtgtcaggatagaagttagaaggttgggaaccgcaggcctctctcaacccattctgtttttcattttaggtactctgctcaagcggcacccagaggtaaaggaatggaagaagacatccaggaggggcggggctgtgaggtcagggaaggcccacttagcttccattcattcctctgattggttgccgagtgtgccgcggtccagcccccacccccacccccacccccgttctaggcaccagacgtacagcctgagaaagtgcctcctgccctggggtttgcacacgagcgagcagaacaagaaaagaatacagtgccaaggccgggaatcttagagcccttagctagcatgtatctggactccattgccagtgccatgcggggagggggcagggagtgcccagggtggtggctcagtcctgtaatccaagcacttgggaggctgagacagaaggctcaccatgagtttagggctagcccgggctgtttagtgcaattcagtgtagcctgggctaaagtaagaaagcctgcatcaaacaaaacaaaactaccacaacagtaattacacacacacacacacacacacacacacacacacacaccttaaacagcaaccataataaaaatgagatggacagagagtgacagcaaaggatttggggtacattctttttttttttaagattttatttattttatgtatatgagttcactgtagctgtcttcagacacaccaaaagagggcatggtatctcattaaagatggctgtgagtcaccatgtgattgctgagaattgaactcaggacctcaggaagaagagtcagtgctcttaaccgctgagccatctctccaaccccaagggtacattcttttagacaaagtggacagggcttctttgatacactgatgatttgagcagtgagttgaaaaaatgaggaagccaaacagggaactcttgaagaaaatgatctaggaattggaggagcgggaggtgcaaaggccctggggcaggaagcacggtgaggaacaaagacagacaatgagtcaccaaaatacaaggggtaggccatggaaacgaaggtatgatggagtcttggtctctttgatgctggatggttctctctgtacctcttctacagggagaagaatctcccccttgccccgctccaagagccgacccacatttccctgacctggcagagccactcctacccatgtctggagacttgtccccatcccctgctggacccccaacggccccctccttggaggaagtggtgctacaacagcagagtcccctggtccaggccagagagctggaggctgaacctggggaacatggccaggtggcccacggtgagctgggcaggccagagccgggggaggagtagggggaggaaggaagggatggtagctgagttgtcggggaggaagaataaggtccagacggaataaaaagatgtggaggcaagacagaagggaagtctgaaagaagcagaggagtgtgtgcagaaacctatagcagggctgaggctgggactggggctggggctggggctggggctgggctggggctggggctggggctggggctggggctggggctggggctggggctggggctggggctggggctggggctggggctggggcacagctgtaatcccagcactaaaaaaggatttcagagctatcctgcactacccagcctaggccatgtgagactgtgactcaaagaaaggaatgacaaatggcaggagaggctaggaagaaaggagaagagagttctggaagcatcctctctcatcccaccttccctcccacaggtgcgaatggcattcatgtgaccgggggctctgtgactgtcaccggcaacatctacatatacaatgggccagtgctggggggaacacggggccctggagaccctccagctccccctgagcctccataccccactcctgaagagggagctcctggcccttctgagctgtctacaccctaccaggaggatggcaaagcttggcatctggccgagacagagacactaggatgccaagacctctgacagggccaaggaacctattttgccacccgtgcctgagggcacctgggaaaggcaaggagcagagggtccagcaccttctttctgaggctgctctactcaccaggactcacagggtctggggaggctctgagaaatagagccctaagggacttagcctcagacacctcttcagagcagaaccggacactagcaggccacagtgcctgcccaggactctgactaccgcctgagcaagcctgagacctagtttcagacccaccggctcccagaggcttcggccattgagcctcggacacaaggaaggctcgtgacccccgccctgcctctctgtgttctaaacatggcagaggagggagctggtcccagggtcactcgcaaggatatcccagggacctcgcaaagctttgtggtgctcatccctaccttcagaggccttgagagctcatattgcgtggaccaagatagaccctgggggaaggtgaagtcgcgcggaggagcaacccctcccttgctcctgggggagaggatagagagaaggggaggatggggccttgggtagcgttagcatgtgtggaggagagtttgggaacaggagaaaaatgacaagtgtatttatgagttgtaatcacacacgaataaaaacaagatggaggtcctttatttccttgggttttatgtggaaacacactaggccgttaggacaaaaccaaaggcagaggtgaaagcacaaagccctcaaaggcgcttccgggagggtcccggcttccaggttcagacagcaccccacttaagcagcagtggctgggggcttgcctggaagtattctacacacctgcaataacaaccggagtcagtcctcccaccacccatgaggcaggcactctccacaagtgagacagaggcacagacagaggaagtcatttgttcaagccagttagcccagcataaacgactcttcttccacgggtgccatctcagggctttcccagacatcccactgcccctgcgcaatggaaagggttgtctggaaggggtcgtgggtgctcagtagctaccctatgagaggccagcttccgtgctactggtgaagagaaatctaggctggcctcatcctttcagctcagaaggagcagtcaggactctgtgtgtgtgctatcttattttatctttatccaaaaacaaacaaaaagagtctttaatgtctcttgcccccagccgggtgattgtggcatacgcctttaatcccagcacttgagaggcagaggcaggcagatctccccgttcgaggccagcctggtctacagagtgagttccagtgcagccaaggttaatgacacagcacagtcagtgcagagtgagaccctgtctcaggggaaaaaccaaaaacaagaaaccaaacctctcttgtccctttcttagtaaatgcctgctgctcgcacattgatcctccatactgaccagcagagacaaccagagcttgagggattactcagtgcagcttgttcctgccataaaaggcagtcggtatgatccaagtgttaggagctcagtcgctggccttcatcaagccggtatggcaggaaaacacataccccaggagtctgctgggccaacggagtggatgggttatttaaggctgactatgaaaatcacatccaacttccttctgcacacagtgagagcgggctgcatcttcacagacataaatcttctttgtcatgctagagccaaagagcaaggatccttaataattattccaatgtgtttagattttttaaattactacattctgctcaacaaaataaaggaggaggcagagaagatcaaagaaatggccttccagggacatcaggaaggcttggcaggtaagagttggatgccaaacnnnnnnnnnnnnnnnnnnnncctggtctacagagtgagttccagtgcagccaagttaatgacacagcacagtcagtgcagagtgagaccctgtctcaggggaaaaaccaaaaacaagaaaccaaacctctcttgtccctttcttagtaaatgcctgctgctcgcacattgatcctccatactgaccagcagagacaaccagagcttgagggattactcagtgcagcttgttcctgccataaaaggcagtcggtatgatccaagtgttaggagctcagtcgctggccttcatcaagccggtatggcaggaaaacacataccccaggagtctgctgggccaacggagtggatgggttatttaaggctgactatgaaaatcacatccaacttccttctgcacacagtgagagcgggctgcatcttcacagacataaatcttctttgtcatgctagagccaaagagcaaggatccttaataattattccaatgtgtttagatttttttaaattactacattctgctcaacaaaataaaggaggaggcagagaagatcaaagaaatggccttccagggacatcaggaaggcttggcaggtaagagttggatgccaaacctgatgatgaccaggtctgatctgcagagccatttgactcctgaaaggtgcccgctaatcatgagcacacgcacacgcacacgcacacgcacacgcacacacacacacacacacacacagagcaagacagagacagagacagagagaaacagacagagagacagagacagagacagagaacaagaaatgctatccaggcacagccctgtgtgacactgactgttcaaactgaacattaagcctgcctgcctgcctgcctgtctgcctgcctgtctgcctgcctgtctgcctgtctgcctgcctgtctgcctgcctgcctgcctgcctgcctgtctgcctgcctgtctgcctgcctgtctgcctgcctgtctgcctgcctgtctgcctgcctgtctgcctgcctgtctgcctgcctgcctgtctgcccgcccgcccgcccgcctgcctgtctgcctgcctgtctggccgcccgcccgcccgcctgcctgtctgcctgcctgtctgcctgcctgtctgcctgcctgtctgcccgcctgtctgcctgcctgtctgcctgcctgtctgcctgcctgtctgcctgtctgcctgtctgcctgcctgcctgtctgcctgcctgtctgcctgcctgcctgcctgcctgcctgtctgcctgcctgtctgcctgcctgtctgcctgcctgtctgcccgcccgcccgcctgcctgtactgtactagtcccaagcaagctccattctcgtctgcattgagtacacagactagttagaaaaagctggcatcttcctggttagtgcatcatgtgttggcagcacatctgagcgttggaacgttactgtttgtgtccaacaatagcacctcaatgtcttctcaccttttcttgtcaagtcgattcctaggtgtttatcttcactatacaatcagaccactcagcttaattttttgtttcgttttctcttgctttttaaannnnnnnnnnnnnnnnnnnnatcaaagaaatggccttccagggacatcaggaaggcttggcaggtaagagttggatgccaaacctgatgatgaccaggtctgatctgcagagccatttgactcctgaaaggtgcccgctaatcatgagcacacgcacacgcgcacacacacacacacacacacacacacacacacacagagcaagacagagacagagacagagagaaacagacagagagacagagacagagacagagaacaagaaatgctatccaggcacagccctgtgtgacaatgactgttcaaactgaacattaagcctgcctgcctgcctgcctgcctgtctgcctgcctgcctgcctgcctgtctgcctgcctgtctgcctgcctgtctgcctgcctgtctgcccgcctgtctgcccgcctgtctgcccgcctgtctgcccgcctgtctgcccgcctgtctgcccgcctgtctgcccgcctgtctgcccgcctgtctgcctgcctgtctgcctgcctgtctgcctgcctgtctgcccgcccgcccgcctgcctgtactgtactagtcccaagcaagctccattctcgtctgcattgagtacacagactagttagaaaaagctggcgtcttcctggttagtgcatcatgtgttggcagcacatctgagcgttggaacgttactgtttgtgtccaacaagagcacctcaatgtcttctcaccttttcttgtcaagtcgattcctaggtgtttatcttcactatacaatcagaccactcagcttaattttttgtttcgttttctcttgctttttaaaagacaagatctcactatgcagccctggccggcctagaactcctatgtagaccaaactgcccccttgaacttgtggagatctacgtgcccctcttccagagagctggggtaaaagatggccagcaccaggcccagctgaggacagctcatatttttaactcaacaactatttgattcttttatcatttataatgatttccagttagttctctgagattgtcacctctaagtaataagaagtttatctctgctgtttatttattttttgatagggtctcatgtatcctattccaggctggccttgaactcggtatgtagagaaggatggatgaccctgatgccctgattctccaacctctacctcccaactgctaggctgtgcacctgccttccactgttgagtttttagccttctggtagcctcactatcgaaagcattgtccaaaccttccaaaagagtataaaacagcacggcacatttctatttcagtcttaattttgggcaatttttttggacacgttctctttttaaactttttgaacctgttcttttaatttacatacaaagcaatgggttgcattgtgtcatcttagtacaaatggccaggtacaatgacacagggcagtattgccagcactcaggaggcagacagaagaggatcacctcaagttcaaggtcagctaatcagttccaagccatcaaggactacaaaagtcctgtgttaaaaaaaaataataactagagaacccaccacaactacaatgtgctgcttggtcctatcattgtcccaaacctgggcatgcctggggagagggaactgtaatggagaaacgcttccataagattggccagtaggcatgtctgtgagttattctcttaattagtgattgatgtgggagggcccagcctactgtggacagtgccgcccttgggcagatggtcctgtggagcaggctgcatgagccatggaaataagccagaaagcagcactcgcccctggcctctgcttcagatcctgcctctatgttcctgccctggcttccctcagtgatggatttatgagccgtaagctgaaatacagtcataatgttttatcacagcaacagaaaccctaaccaagacaaataacaaggaaacagcaaaaccaacaaacaaaaagtatatattttggggtccagagtggttcgctgctaagaacactagtggctcttacaaaagatggagggttaattcccaacatgtccaccggcagctcacaaatgcctgtgacccttgctctagtggatcggattccttctttggccttcatgcatacacatggtgcacgcacagacaagcaagagctcaggcatgtacataaataaaaataggttgtttttttttttaaatgtaagcacacatgtaacatcatagcaggaccatccctgcccttaagccttttcttgttcaacgggaatttaaatagatgtatctatctgtctatattaaggaaggatccacgcctaagcatttcgtgcaaatcagatggacagagattagatctaatggagagactgggcagagcgcctgcagctggaagacggaagacggggaaagtgggtgatctgggatggactgtgcagagtgccagccgatcagcacaacacaacaaacaggatgtgctgatccgccggcagcccggctctcattctgtggacttggcctgatggtttattaaattaatctgagccacactttcgaagttcacatttggaaaacattaagtacgtattttctatgtagcagtcatgttcagataaaacagcctctaaacaaacttggctgagaacttcctggagtttatgtagtaatcaccgagagatgagcgctgaaaagcacggaactggggtctggtggaggctggaaggaaggtcaggaaatgcttcctcagaggagttctcgagcgagtgacctaagggacgtgaaggttatcccgggtggagagccttgaagatgcgcgagtgctctgcgcagaggccctaagatggacccattggcctggtgctagggagcttggtccccgggagcggaagcaggagaggtaaacaggaagtgggttgttcagtagaacaaacttacaaactctaagtttgcaaaaaccttgtaaagttggaacttcaccgggggatcagtaagaaaccactaaactttttcccagtgcagtaaaatgtgtaaagtcagagaccaaaaggctggtgacagttccagggactctagccagccccagcgtggcaaacggctcaggcaggccttgcccttctcctccattccctctgccttgcttgttacattgcattcctaaagccagcccccaaggtctagtcccttatttggccacctcctcctcctgaggccaaacactgaggtccagctttccaagtattaaggtccagaaatcaaaagccccctttggctcatcaatgaaactgtcaaatcaagattaaacaccttatccataacacgggggaaatacttttggtcttttgttatgttttataaaaagaacgaaagaaccaggaatatgtttggtagagtcatggaatggtgaggcagaagggggtgcctctatgggcccatgctgagacatcccttccccctgagggacaagccacaggacggtatagtatagaatagagtttatttaggccatggagaggggaattgagggagtagagacagagaaaggcggaggtgaaggggagaagtagagactggccaggaacacatggaaagggggtgggggggggatgggaagagaaggggcagagagggaaggaagagaggaagagagtgacagccccttttataatgagtcaggcatacctggctgtcaccaggtaactgtgaggcagagtctacaaggaatgctaacacctttccctttataaactgccattttcctaagggccatgtctgtctcctctctatccagaggagtattttgtccttcccctgccctattctgagacaaagacctctttcccttcttccttgttctctgttttcccctgccaccccatctctctcttacacacacacacacacacacacacacacacacacacacacacacacacacaaacctctgtgtaggctgtcccggaactcactctgtagaccagagatccacctctacctgagtgctaggattaaaggcttatgccaatctcttatttcctgcccttttctcctctggggcaaagaactctcctttgttctgagaacttggtcttggagctcctgatcctacactggtccctttcaacaatggcttagggagtttaaccccttgccacactgtgtactcttaactgctgagccatttgtccagccccttgcaaaataaaaaatttaaatgttaaaaattatgaagtccgttgcacccttatactcttataagtatcctaggatatatgatttcatgggtctttaagatttaaaaaattttattgttttcaattatgtgtagactatgtgtctgcatgtgcctatgagcatgtaagggcaggtgtccacttaggccagaggcaacagattccctggagctggagctacaggtgactgcgagatgcctgaggtgagtgctgagaacagaatggggcccctgagaaagcagccagtgcttttaactgctgagccaactctccagtgccatcgctcagtcattctcgttgctggaatcccaggagacaccaggatgtggaattagggtatactatggagacatccactttttctcttcatctgatactgaggatggaatccaggttgcatgctaaacaaacattctactactgagttacaaccccagaaccatagtgattttcaaaatttctaatattgtcattcatctgcccagactagcttcaaatttgtggtcctcctgcctcagcctcctgaggagctagaattcaaggtgtgccaccacttcgagcgttcacaacttatcttatttatggattattatctctgcacttggtgtctgatgtggttgtcatcagacaactctatggagctggtcctctcctgttcttccttatgtgggtccgaggcgtggaactcaggttggcaggcaccaggcttacacagccagtgccttagcctgctgagccatcctgctggacctttctttttatttttcactacttaaaaaaaaatgtatgaattaagggacaggtagatggcttagtgactaatggcacttgccaccaaggctgacaccatgagtttggtctttccagagagaagcaacttctataggttacattctcaccatacatgcacatacacgtgcacacacatacatcaaacaagcaaacagatatgcactgtgaatcttgagcatgccagaaagcaatctcactagctttgcttacacataaggtacagattattttatttttcagttttagttttagacaggccctaagcctcacatgtatagctattctttttgcctctccctcctgactgctgggactataggtttgtgtgtttcaccatggtgtgtgtgtgtgtgtgtgtgtgtgtgtgtgtgtgttgtgtgtgatgttaagattacacacatgcgaagcaaactatcactgaactacactgcacttctacatattttattttatgaacttttactatctatctatctattcattcagggggtgtttgttgtgtgacaagactcttcctggggagacagaacacacacaggtctactcaccccaaacaggaagcccatcacacacagaagtatagatatcaccaaagtccaacttggcgaaccaatgagttttattggggttacttataggaataaaggtgttattagggttattaagttaatactaggttaattaaaaccctataagttagggttttattgctgagaagagatatgaccatggcaactcttataaaagaaaacatttaattgtggctggcttacagcttcagaggttcagtccattatcatcacggcaggacatggtggcacgtaggcagacatggtgctagagaaggagctgagagttctgcatcttgaaccacaggcagcagcagaagactgtatgtcacactgggcatagcttgatcataggaacatcaaagcctgcccacacagtgacacacgtccttcaacaaggccacacctcctaatagtgtcacttcctatgggccaagcattcaaacccgtgggtctatagcctatcccagcacaggtagcaggtaacgctcacagagccaggaacttggagcacgctgcacatctgcaggcaactcagcagctgggagggttgtgtgagaatggcttccagcaggcttcattgtttactctgggaaggagggacctagtgaatttgctcagcttcagggacatccagaagctgttttgcgttgtttgccttccggtttatggagcttctcggaaggatggaatgtttcagtcgcagagtgtcttgtgcgcacatcacagtgcacacatggaagtcagccaacaactcgtgggactcatctctctccttccgccatgtagatcccagggataaacagatcctcctcaggcatggcaggaagctcctttgtctgctgagccaacacaccgactcagcctttatatttttaagatttgttttatgtgtatgactacttggcttgtatgtatgtctgtgcgctgtgtgcatgcctggtggcctcaggtcagaagagggcactggccggacagtggtggcgcacgcctttaatcccagcacttgggaggcagaggcaggcagatttctgagttcgcggccagcctggtctacagagtgagttccaggacagccagggctacacagagataccctgtctcaaaaaaaaaaaaaaaaaaaaaaaaaaaggcactggattccctgtatctggagttacaggtctgtgtgagctaccatgtgagtactgggcatcaaatctgtgtcataaaaagaacagtgagtgctcttaactgttgggccacccctccaggccctgttattgttattattataattttatgggtgttttttttttgagacagtggtgtttatatttcaggggtactaggacaaaaccaagagatatacatacactaggcaagttctctaccactgggcaacactcccagcatttcttcttacttccctcccttgcatgcacatatatgcacatatatattatatatgtaatacatcatacaaactatatctatatccatattgatatagatatgatcttgctgtgtacctcaaactggtctcagactcttgatgttgcagcctccgtctcctaagtgctgggatgaaagccctgtcccactaagcctaggtttttgttcctc

SEQ ID NO: 503 - DNA, 703 bp, Mus musculus
ccgcagccaagacacggtttgcaagacttgcccccataattcctataatgaacactggaaccatctctccacctgccagctgtgccgcccctgtgacattgtgctgggctttgaggaggttgccccttgcaccagcgatcggaaagccgagtgccgctgtcagccggggatgtcctgtgtgtatctggacaatgagtgtgtgcactgtgaggaggagcggcttgtactctgccagcctggcacagaagccgaggtcacagatgaaattatggatactgacgtcaactgtgtcccctgtaagccgggacacttccagaacacttcctcccctcgagcccgctgtcaaccccataccagatgtgagatccagggcctggtggaggcagctccaggtacctcctactcggataccatctgtaaaaatcccccagagccaggagcaatgctactgctggccatcctgctgtcgctggtcctctttctgctcttcaccactgtcctggcctgtgcctggatgaggcacccgtctctctgcagaaagctggggagaagaatctcccccttgccccgctccaagagccgacccacatttccctgacctggcagagccactcctacccatgtctggagacttgtccccatcccctgctggacccccaacggccccctccttggaggaagtggtgctacaacagcagagtcc

SEQ ID NO: 504 - protein, 198 aa, Mus musculus
RSQDTVCKTCPHNSYNEHWNHLSTCQLCRPCDIVLGFEEVAPCTSDRKAECRCQPGMSCVYLDNECVHCEEERLVLCQPGTEAEVTDEIMDTDVNCVPCKPGHFQNTSSPRARCQPHTRCEIQGLVEAAPGTSYSDTICKNPPEPGAMLLLAILLSLVLFLLFTTVLACAWMRHPSLCRKLGRRISPLPRSKSRPTFP

SEQ ID NO: 505 - DNA, 2077 bp, Mus musculus
ccggcgctggagccctggaggccaggcccggccgctcccggcccccgggggcacgtcggcccagccgccaggcttgggaagtcgtggccaacgctgctcaggacgtccgggcttcccaccttcctcctaggactccacccggtctggtcagccgagccgaaaggccgccatgcgcctgccccgggcctcctctccctgcggcctggcctgggggccactcctgctgggactcagcgggcttctggtggcctctcagccccagctggtgcccccttatcgcatagaaaaccagacttgctgggaccaggacaaggaatactacgagcccatgcacgacgtctgctgctcccgctgtcccccaggcgagtttgtctttgcggtatgcagccgcagccaagacacggtttgcaagacttgcccccataattcctataatgaacactggaaccatctctccacctgccagctgtgccgcccctgtgacattgtgctgggctttgaggaggttgccccttgcaccagcgatcggaaagccgagtgccgctgtcagccggggatgtcctgtgtgtatctggacaatgagtgtgtgcactgtgaggaggagcggcttgtactctgccagcctggcacagaagccgaggtcacagatgaaattatggatactgacgtcaactgtgtcccctgtaagccgggacacttccagaacacttcctcccctcgagcccgctgtcaaccccataccagatgtgagatccagggcctggtggaggcagctccaggtacctcctactcggataccatctgtaaaaatcccccagagccaggagcaatgctactgctggccatcctgctgtcgctggtcctctttctgctcttcaccactgtcctggcctgtgcctggatgaggcacccgtctctctgcagaaagctgggtactctgctcaagcggcacccagagggagaagaatctcccccttgccccgctccaagagccgacccacatttccctgacctggcagagccactcctacccatgtctggagacttgtccccatcccctgctggacccccaacggccccctccttggaggaagtggtgctacaacagcagagtcccctggtccaggccagagagctggaggctgaacctggggaacatggccaggtggcccacggtgcgaatggcattcatgtgaccgggggctctgtgactgtcaccggcaacatctacatatacaatgggccagtgctggggggaacacggggccctggagaccctccagctccccctgagcctccataccccactcctgaagagggagctcctggcccttctgagctgtctacaccctaccaggaggatggcaaagcttggcatctggccgagacagagacactaggatgccaagacctctgacagggccaaggaacctattttgccacccgtgcctgagggcacctgggaaaggcaaggagcagagggtccagcaccttctttctgaggctgctctactcaccaggactcacagggtctggggaggctctgagaaatagagccctaagggacttagcctcagacacctcttcagagcagaaccggacactagcaggccacagtgcctgcccaggactctgactaccgcctgagcaagcctgagacctagtttcagacccaccggctcccagaggcttcggccattgagcctcggacacaaggaaggctcgtgacccccgccctgcctctctgtgttctaaacatggcagaggagggagctggtcccagggtcactcgcaaggatatcccagggacctcgcaaagctttgtggtgctcatccctaccttcagaggccttgagagctcatattgcgtggaccaagatagaccctgggggaaggtgaagtcgcgcggaggagcaacccctcccttgctcctgggggagaggatagagagaaggggaggatggggccttgggtagcgttagcatgtgtggaggagagtttgggaacaggagaaaaatgacaagtgtatttatgagttgtaatcacacacgaataaaaacaagatggaggtccttta

SEQ ID NO: 506 - protein, 415 aa, Mus musculus
MRLPRASSPCGLAWGPLLLGLSGLLVASQPQLVPPYRIENQTCWDQDKEYYEPMHDVCCSRCPPGEFVFAVCSRSQDTVCKTCPHNSYNEHWNHLSTCQLCRPCDIVLGFEEVAPCTSDRKAECRCQPGMSCVYLDNECVHCEEERLVLCQPGTEAEVTDEIMDTDVNCVPCKPGHFQNTSSPRARCQPHTRCEIQGLVEAAPGTSYSDTICKNPPEPGAMLLLAILLSLVLFLLFTTVLACAWMRHPSLCRKLGTLLKRHPEGEESPPCPAPRADPHFPDLAEPLLPMSGDLSPSPAGPPTAPSLEEVVLQQQSPLVQARELEAEPGEHGQVAHGANGIHVTGGSVTVTGNIYIYNGPVLGGTRGPGDPPAPPEPPYPTPEEGAPGPSELSTPYQEDGKAWHLAETETLGCQDL

SEQ ID NO: 507 - DNA, 27411 bp, Homo sapiens
gggtgctaggatggctccactgggcagggacgccagtccagtaagctggaggctcctcattttgccagcagtgagctctacctgggacaggggtgtcagttcccaccctcaggtctgaggctctgcctgcccagcgagcacctcagcaccctggaccacccttccaggcgcaggcaccagggaaggggcagagggactaaccgacctgtagggattgagggtgcagatggtcactgcggggaagacgagcttgtccgagttgaggttgatgttgaggctgacggggtagctgaagtactctccgaaaagcaggccgaattgccagtacatcatgccaaaggtgcagagccacagcactgcccagaaggccgtcttcatgcggttgtgctgggagcacaccaggcggatggcgccgtggatggtggtgttgttgcagaagaactcgaagagctctcggtaggagcggtggaactcgatcagggcctcctcctccgccgtgggctgctggggcgccgcaggttcggggcccagcccctgctcctcacgcttgttccccttcatgagccctggagtggactgtggagggctagagtcctgctcctccagcttgttcccctccatgagacctggtatgggctgcagaggtctagggtcctgctcctccagcttgttccccttcatgagccccggagtggattggggagagcaagggtcagggtcaaggctgagctctgggccctgagtgccctctcccatcacccctggaacccgagtgaggctgcccctggccatgcccatgtcccaccctgcgcccacattctcccactcctccctccctcctccacctttcctggagccagcagacctgcgggagttggggccaaaagtgccggagctgggcttccctagaacggcctctcctctgcttccctgatagggccacctttcgagttttgtcctagcacctccctttctgtctctgcccccttcctttggtcttcttcctccaggatctgtgtctcagctcctgcctctcactccctctctatctgccttctgtttctctttgggtctctcctgctctcctctttctggcctgcctcctctctctaatcctgcctctcttcctctcccccccttgccttgccccctctcactctaggccctcagctccagcctctggccctgacctcgagctgtgtcctgattctgtctctgccccaggactgcagggctccaggaggtctgggctgcctccagcttcccactcccaggttgcggctggactgggactggttcctttccagttgaatctggcagccaaacctctcctccccctcacctgacaggtgcagcggcctggctggggagcccgcccgctggccggccagggatggaagcgacaggaatctcattagcatctcaattaaaggtgagcagggcggggggaggggctgaggaggagtcagagccgggagttttccgaaggaaggagggctcccgagggcaggtgaactgggagtactggacctgagaaggcggactctgggcaggggctttagacgcagacaggcaaggaggctgggggacaggatggcaggtgaggggcaaagatctgaacaagtagaaggatcctgagcccacagctaggagggcaacacaaggagaaggggccagccaggctgagagggcctgggtggggaaccgggaggacaggagggcagaaagagggagacaatagagagggacagcgaaggacagagagatagggatggaggaggggcactgagtgagtagaggcaggtggggggcagtggtgggggcaaatagaaggagccagcaccaaagggagtctgtctccaggaaggagagcaaggggggagtcccaagtgtgcttccaggagctagaggctcagcaagtgggcagccctccaagggcacccacaggtcagcctcaccctcaggccctgcagagaagagagaagaggtctctgcaggtctcctccccgctcactaagtgggagcagcgcactcaggtgggatgcgtctgcctcctcctggtccctcctctttcctgctgattcctcgccaccccctccaaccttgtccagacccgggaggggcccaggtgaagctgggggctaggcggggccctaggacattctgttcttttttacactgttggctgccaggccaggaatgtgtaatcgcccctgctgtggtcacagagttgcaggaatgtgggcaaccagaggcagcgcgagggccacgcaggacactgtggacacagacccggagcccaggaagaggcagggaaagcaggcactgaaggtgcagggaggatgtggccagcgctggaaaggaagagggtgggcatggcacacgcctagacaggccctgggaggaggagaaattcgttgatgggctatattttctccaaaatctctttccaaacttaatgcagcaaaaggataaggagtggagtgccaagtggtgagcaaggagagagaggagggtcagagaatcagacccaaaaagggctggaggagactcgggagagccacccacacaacccaggccctgcacgcggcagggaaggctgccgcttcctcacgggccccacaggaggcagcccagagtgcaggaatgtggtcactggcttgtcctgcctccctccacaagccagcagacaaaggcccagcctgagcattgatacacaccgggggaggagataggcctgcaatacaataagataaggtttctatttgtacactttaaaagattgtctttaaaacggacttctaacaaaagtgcagatctcagatttctcagagataagacataagagccaagggctaggggagcctaggggctcactgcaggagactcaggaagccttcccagagaaggtgtcatctctgctgaatcttgacaagcaaggagtttagcaggcaaagaagagaaaaggcagtactccaggctcagggtccaacctggtctgtggcttcctctcttgcggcagtctcttgcgacttcttaaagtgaaagccggtgtcaaccaggattccaaaccaggttcccttgcttaccttgatactgctcatgatacctccccttggaagggacagctggatttttcttcattgtcctaatgaagaaactgacccttcccaaggataaatcagttttctgaggttagaaaacaaaataggagcagagctataaacagaattcagaattctcctcctcctctggggctatctacttagcgcttttgccatttacttcctgagacagactcatgggggatcggggctcaggtgcacctggatgtgaaagccgggaaggcctccctcactcccacacagagcccgtggattcgtctgctctctgggtgctgggttatctccttggctctgtgaaaaggtctctgcactgtccccactgccccacatatcccagagacccctagaaactccagtctcccttgagccaggtccttacattgggcatggtcctccctgcaataaggtgctcagcaccctggctgtttgatctcaaaggttctgaaaagcacctccctgccttttctatttgccagctcatgcctgaaatccaaccactagcttaaggcagcatggcaaatagttttcatatcaagggctctgtgagaagaattgcaatgcctggtctgggctgagccaaagggtggtgaccctgccacgtcctgccgggtatgggagtggcaatgcgagcctagtgctgcagcattctagacctggagcgggctagaacaggcttggtgttgtgaggaaaatagaaatctgagacctggactttggtcagaagtccattttaaagatgatcttttaaagtgtacaaataatacacaaatatgtttttgtcacagtacaatttttcagcaatacagaagtatatagagcttcccttagtccccttcctttccctccccaaaggggagccaccataatttgtatatctgtctatatctttttgtgtgcctttataaacttacatgtatttttaaaaaacaaaatatatagttctttttttatgacagagaccatgctataggtatgtttctacaacttccatttttgcttttattttcttatttatcttagagacaggatcatgcactatcctctaggctggagtacagcagcatgatcatggctcactgcagcctccaactcctaggctcaagcagtcctcctgcctcagcctcccaaagtgctgggattacaagtgtgagccaccatactcagcccctatttttgcttttaaactatgtgactttgagaaaggcacttgacctctatgggccccggtgatcttacctgagaaaatgaaagggcaagaaggggtgggtaaggcaacccagatgggcacaaagactttttccagctgaccttgcatctagccccctgcttcatgcatgaggggactgaggcccacagaagcaaagtgacttggccacagtcacccaggagttaggggtggggtcagactgaaaaccaggccactcctttccaagcccagttctccttctctgactttgagagaagtacagttttgttctataagaagtcaagagctttgtagactctgtcttggaaggaccccctgccttcccaggactacccccagactcccccagagccccagcccttcccgccaacccagggctgccttcccctcccaacaccagctatcctctaaccctgtggtgtggccataaaatatgcacggctgcagggagagaagtgaaaccagaggggctgccatgggatgagggttatgagtgcaaagggtcttcctgcctcttgttctccgcggacaggagatgacggaagtaatcactccaccctcctagggagagcctatctctgcacttaccactgtttactattatttattattattatttactattatcctgatgtatgtgtgtttgtacgtatacatccgtttggggtccctgacttcccgcaacacaaggacagagaccaggcgtattcatcttggtgacctcagtgtctagcggtcactgtttgctgacccagtctgcagaagacagcagaactggcgtctttcctagtttatctttgacagagcgggatatgctacgaaaaagcatctgcaaaacttcaaacatcctaacttcctctgacaacccatttatttgtggtctattaatttatctaaattttcttcacttttccctgttcacttctatcctttccaggataagaatcagttacttagttaaatgcaactctttattcttactacttggagctaattagccacttcacactgggggctgcccactgtggaagacaacagtcctttcagctgcccttatgtggtacagatttctctttcatttaaaatgatggaccagaaaaatgccactcttcatctagtcccctggcagtttacttagaagttcactactagaagttggccgggcatggtggctcacgcctgtaatcccagcactttgggaggccgaggcgggtggatcatgaggtcaggggatcgaggccatcctggctaacatggtgaaaccccgtctctactaaaattacaaaaaaaattagctgggcataagtggtgcacgcctgtagtcccagctactcgggaggctgaggcaggagaatggcataaaaccggggaggtggagcttggagtgagccaagatcgtgccactgcactccagcctgggagacaaagcaagactctgtctcaaaaaaaaaaaaaacaaaaaaaaaaacaaaaaaagaagttcactactagaagtttatcactttgattgaagacagggtttatcaaccttggcactattgacattttcggctgtatcattctttgtggtgggacaggatgattctgtcctatctacaatcctgtgcaggatgttcagcagcatccctggcttccatctattagatgctagtagcacctcctgagtcattgtgaccaaaacatctccaaatattgccaaatgacttctggggggcaaagtcacccccgttgaaaagactgggttaaggcattgtcaccactgaaaatgcaaatactctggaaaaggacaaccctcatctgttatgcacttctgggtgtttgccagaccatttccaagagcactagtcagctaagagcagagtggagaagaagagagaaagaaaaagtatttagaagaatccattcctggccgggtacagtggctcgtgcctgtaatcccagtactttgggaggctaaggtgggcgaaatgacttgagaccaggaattcaaaaccagcctgtggccaacatggcaaaacaccatctctactaaaaatacaaaaattagccgggcctgttggcgcatgcctgtagtcccagctactcaacttgggaggctgaggccaggaaaatcacttgaacctgggaggcggaggttgcagtgagctgagattgcaccattgcactccagcctgggcgacagactgagactctgtctcaaaaaaaaaaaaaaaagaagaagaagaagaagaagaatccatttccatcagccccctttctggatgcctaatgggcctgtggaaagaaggctctctcagcagctccttcggaagaaggcctgggagaagagtcccaccctcacacaccttctaggcgtcctggggtgctcggtctgggtctggtgttgcccagtggaaatcagtctcaggaggctctggtgaaaaacacaaaaggacaggagtaaagacaatgccctgcccgcggtgaacctgtggatttctcacccctggagtctccctttatcctcctggggatggctgggcattatagtagccatttattggtaagatttgtctttcgtgatccagctgggaaacaagaaacactctaagtctttcaaacagaagaagtttaacacagagaactaactggtacatgggtgatggaggagctgagaagacaatgggaggcagctcagaaaacagcagagcgggaagcagctaccatctctaggcctggaaagatggcagggtgatgtagcatcaaagaccaagaagcctccagagccatttggcaggaactaaatagtgtggactactggtaggagatgggattatggaagtggggaaggaaggaagacaaccaactgcaggtgaagccagaaagcagagaggagagaaatagcctggctgcttcactcctcccatcccacctccatcccacagacctgcaagcaaaccagtagctgactgacacaataaagaggcacacagagataaagtgatggggccaggatcaaaacccagatctcagggctcgttccttagggtgtagagagtccatgagggctgaagcgccagcttacggctggcagcagaaagaaacatacagtccagccagctggggttaaaaggggtctggacatagtggttacctgtgaagcaggaagctttgactgggaagggcatgtagcaaacatttgtagtgcaaggaacattctggggccgggtgccgtggctcacgcctgtaatcccagcactttgggaggccaaggcgggtggatcacaacatcaggagttcaagaccagcctggtcaacatggcgaaaccccatctctactaaaaatacaaaaatcagccaggcatggtggcaggcgcccgtaatcccagctactcgggaggttgaggcagagaattgtttgaacctgggaggcagaggttgtagtgagccgagattgcaccactgcactccagcctgggcgacaaagcgagactctgtatggaaaggaaaagagaaaagaagagaagagaagaggtgttctggaccagttgggggatatgcaagaatacacaaaagtgaagactctctgagctgtatctgtaagatcagtgtaccttacggtttcattgtattatatgttacacctctattaaaagaaagggtctcagcagcataagacagggtggggaaaaaaagaaaaatagaatagagaaagagtccctgtcttttagggtaaaatcctgaaatattttcaaatgaaatgatatgatgtctgggatttacttcaaaataataatgagggatttgaagagtgtgtgcgttggtgggggagggggtatacagaataaatgaaactgacagtgagttgaagctgggtaaggagtatatgggagactcccaatattactttttctcttttggtatattatcttgcatgtggaatttccacagtaaaaagtaaaaagaagagagagaaaaaaggacctagggtcgctacacacacattcctttacgcgtttaagagctcagcagggactctcatcccagcccccagcgctagggccctggaaggctcagcagccccgcgcagtgcatgctgttctgatacttctgccctttccagccatctttggcccatctgtacggtgagctgcctgcaccaggtgaggggagagagcctcacagagtgaaatgcctacagcctaggcaggtcctttcccccttttgtgacctctcctccccatgcacacttcccatcacctgcacctgtccagacatcagacctgaagttagacagaccagtgtaaggatgagtgctgaacagagtccttcagggagggggatagtgcccaagtgacctatctcaagagaagttagcccctcatcccaagggagacatccctgagccacaaggagttggcaggactgctggaatgagttgggacctagacatcaggagacccagattgtagctggctctgcggtggactggctctgtgatgtggccatcactcatttattccataaatacctattgggcacatggtatgtgccagactctgctaagcatggggaacacagacttgaagattcagcctgggccatggtggcactcacagcctggtgggaagcaaacaagacagccaggtacagagggcagtcttcacggggactgtgcaacctagggcagaggttgccttccagagcctcagtgaagcctcaaggacaggtgggagttaggaagacggaaacttggggaccagagaaccacgtgtaaaagggggcagctgcaagtaactccacgggtgggtggggtgttgggttgagggagatgggaggatgaaacagggcaggaacgagaccaggccaccctggaatcccggttcccttatgtatcacccttagcctccctctccatgcttaaggtgagggggctggactgcgtgggctctcagctttctccagttctaaggggtttgaaggttcatgggcaaagaagccagagcagagggcctgagtgcccaggtccagcctgctggccccaggactcccctccgcatatcctccccctctctttgggagggaggttccctgaggacagggagcagggcaagctgcacagctctcaagggtctcctaggtgacctgtgcccactcctgtgcggattgggctgggttggtagcgtggggggctggctgatttgctagtcccttgtaatttgtctgaaaaactcccacagtagggcaggacaacgggggaggaacccgggcatctgccagccggttctcctcggtctcagagctgcttctgcggccttgcagtccccgcgccctgccctctccatgactgcccgtcctgggcccctcgctttccagatcccgcacccagctgtcccttgcgctctctggaactccctctgctctccctgcgaggcttgtccaagggctgaccccgggcccgccgcccttccctcggctgggccagggctgtccgcagtccgctctcccgatcgggcttccgaagaagggaggaggccggttccggccccgcggccctcacgtgctttcccggccgcccctcccgccccgcatcgaggcagacaagcctgttcctcttccctgggctgcgattgcgacaggccggcctggctcccagcgctccctgtccccgccccgcggccagctcgctccactcccacttcctgagctccgccatgggagccctggaggcccggcctggccgctcccggccctggggtgcacatcggccctgagtcccgtcccaggctctgggctcgggcagccgccgccaccgctgcccaggacgtcgggcctcctgccttcctcccaggcccccacgttgctggccgcctggccgagtggccgccatgctcctgccttgggccacctctgcccccggcctggcctgggggcctctggtgctgggcctcttcgggctcctggcagcatcgcagccccaggcggtgaggaaggggcctggtaggagtgggcgagggtgggcaagagggatctgggcagccgtcgctccattccctctgccctcccaagctgacccctgactaattcttctctcctcttctccatctccctttgaaggtgcctccatatgcgtcggagaaccagacctgcagggaccaggaaaaggaatactatgagccccagcaccgcatctgctgctcccgctgcccgccaggtgagaggcaatggcaggacgaacctgggcctcggaagtgggtcacgggggctccagccccctcgcggcctcagagggaaggtgggcactgtcccccaggaaaactggctgctggagacgagcgtgggaaaccctggacatcacgtggaggagatgggactggccctccccactgggcctcctctttccttacctcactgagagggagccggagggccactggcaggatgatggggggccagagagaccgagggaaaggccagggtcacactacaggcagcggaggtgagggtggagcctcgtctcctgaggctctactgctccactcacgttctaggcacctatgtctcagctaaatgtagccgcatccgggacacagtttgtgccacatgtgccgagaattcctacaacgagcactggaactacctgaccatctgccagctgtgccgcccctgtgacccaggtgagtggggatgtgcctgcgggggggctggatcccctggagcttggcccctccctgagccctcccgtctccccgccagtgatgggcctcgaggagattgccccctgcacaagcaaacggaagacccagtgccgctgccagccgggaatgttctgtgctgcctgggccctcgagtgtacacactgcgagctactttctgactgcccgcctggcactgaagccgagctcaaaggtcagaggtccctgaggggctggatgtgaaaaggaggctgggtgccagggatctcaagtgggagcagggaatatggtactgtgtccacggcgaccccccagatccttggcttaaaattcctcttctcattccatgcagaggctcacagaagggttctggagggacatggaactgggacaggtgcaggggacacaggaggtggttcttctcagtactgggaagcttgggcaaaatggtaggcagtaggccgggtgtggtggcccacgcctgtaatcccagcactttgggaggccgaggtgggcggatcacgaggtcaggagatcgagaccatcctggctaacacagtgaaaccccgtctctactaaaaatacaaaaaattagccgggcgtggtggtgggcgcctgtagtcccagctactcgggaggctgaggcaggagaatggcgtgaacttgggaggcggagcttgcagtgagccgagatcgcgccactgcactccagcctgggcgacagagcaagactccgtctcaaaaaaaaaaaaaaaaaaaaggcagcaaagcagagcttgggaaaggtgagagctacgcaatggggtggatgggcatcctgaggcttaaaggaaactcacaggccggcaaagggcccctcccttttgcccattcaccctggctggcctgcctttctcttgccagatgaagttgggaagggtaacaaccactgcgtcccctgcaaggcagggcacttccagaatacctcctcccccagcgcccgctgccagccccacaccaggtgagtgcagccccacccaagctccttccaccctctgagaagcctcagctgctaacaacccccagcgcctatccttgacaccacggactcgactcaccactttcagcctccccgcctgcccagtggagtcgggacactggtgggccagggcgtgaaaaggtcatcatctttttttcctctgcaggtgtgagaaccaaggtctggtggaggcagctccaggcactgcccagtccgacacaacctgcaaaaatccattagagccactgcccccagagatgtcaggtgagggaccagggctgagggacacaggggggggcgcctctgaaaatgccttaatgctccacatcttaaaaaaaatggggaaaagatgaacacttccctcccagaattgggcaagaagaaagttccttacagaaaaaattggagtatctctaggctagtttacacacacacacacacacacacacacacacacttttaaaattatatatactgtaatactatgtcaaggaacacatcccacactgagatgtaatgataactactattgtcatcattttgggcttaccaacattacacaatccgtttttttttttcacacaatccattaactagaccaaacacctctttattagactatatacttttattattagacagaagattcccatttgactctttcttgactgtttcctgtggactgattggcttgctagcctagtagatgactattgtttctaatgactgtaacatcactaattggcagaaggttcactgtgtgtgttgggcactctgtaaccactttacatttactaactcatttaatcttcttaatgatgctatgaagtagattctattatcatcctcatggactgaaggaagaaaccgaggctcaaagaggttaagtgatatactcaagatcacccacacaggtggtcactggtgttattagaacctgtactcaggttttcttactccagagcccatgtcataatgcatgcactatagaaaattagagacttcagataagcaaaactaaaaactcacccacagagccactacctagaatatccactcgttacattgtggtatatatcctcccggacattttctatgcatgtttatacatactgggttttgttgttgtttactaaaagtgaagtaattttaatatttcgtaacctgattttttcattccacaatctaagtatttttctgtgccctgttaatttttaactatgtatcaaatacaactggcattttagagctggaattttagagagtatgtaagctaacctcatcctatatatgaaaaactgatgcccaaagaagtgaaatgacttaaaagtcacacagccgggcaggaaaccgtggcccagactcccagtccagtttctccccaggcctcccatcccatattcccttaggctacagatttacatgaatgagaagaggcaaaatgcccagcatagaaatgcgggagtcctcccgcccttccccaggcgtagctgacggacactggaggctccatgctattgctggcagcactggtacccagagaaagagaaattacccactgctacagatcacagctggagaagccgaactccagcctctctttctcttcccctcctagaacctgccctgagcaagggggtggagaacttgcaagccctgctctaccaggcggccacaggcagttccgaagcaagtttccctactctctcacccctgtaaacacccccacaggtacaggtacagcagggcaaccctagctcctctacagcagcccctctgtacaatggctgaggccacagaaatgtggctctagcctgtgtctgtttacaactccaagtcccacccttccctactgtctcccaatcccacttccagaccttgaaaatcaactgcctaagctcccatcctgcacacgcaagcctgcccaatcctggtctctgagcaggagggcacccacaccacccccaaacatgcccatccatgatacagtctctcctggctgccaagaggtcctcaagtccaacttagttccccttctctataacccaagggaagtttctctcattctgcctttaggagctgcattgtgtctagaaggaaaaaagctgctcccttttctctgtctgggttgcccagggatctggaaagctcttccttctcctcctcccctctgcccttcttggggctgtgatcaccctcctgtctgctgtcctggcaggaaccatgctgatgctggccgttctgctgccactggccttctttctgctccttgccaccgtcttctcctgcatctggaagagccacccttctctctgcaggaaactgggtaggaaagggttggatgcagtggatggttggcaatgggagccggagggaggaatattcaacttccccggtgcaaccctccacaccctcaagactcccaatgcctacccccaacatagacatccttatcttcatccagctgcttattctgaggctggagatgagagtgacagtggcttgttcctctgggcccccgggtggtcaagttgctacacattgtgctgggatgtggaggctgaaaggctaggtctgaggcctgccggggagcctacacccatttcattctccattgcaggatcgctgctcaagaggcgtccgcaggtaatggcgggggctgagaaggcagcaagaaggggaagaggtgatgagggtacaaggtggagcagacaggaagagagtatgcaggctgactccacactcattcattcattcaactgatgatttactgaacatgccacgtaccaggcactgtcctaggcactgggcgtacagcagtgagcaaaacacagtacctcatttcctggagttcacatgcccatggagcaagaataagttaaactatatatcaggtggtataattgctaaacaaagcagggaaggggtcaatgagtgacagtggcaaaggatgggggtattttagacagagtggagagtgaaggcctctctgagaacctgatatttgagcggagagctgaagaagcaaggagccagccatggggttatctggggagaaagtgctccaggaagagggagcaaccagtgcaaagaccctgaggcagggggcatggggaggagcagaggcaagtggtgagttgccaaagcatgcggtggggtgtgggaactaaagaaagatgagccagcctgggcaacacagccagaccccatctctacccaaaatgttgttccaagttagccaggcagggccaggtgcagtggctcacgcccaagctcccatcctgcacgcacaagcctgcccaatcctggtctctgagcaggagggcacccgcaccacccccaaacatgccgatccatgatacatgtaatcccagtactttgggaggccgaggcgggtggatcacctgaggtcaggggtttgagaccagcccggccaacatggcaaaaccccatctctactaaaaatacaaaaattagctgggcgtggtggcaggcacctgtaatcccagctactcaggaggctgaggcaggagaattgcttgaaccgtggaggcggaagttgcagttgaactgagattatgccactgcactccagcctgggtgacagagtgagactctgtctcaaaaaaaaaaaaaaaaaaagttagccagacagtcccagctactcaggaggctgaggctagaggatcacttgagtccaagagttcatgagcctgcagtgagctatgattgcaccactgcactgtagcctgggtgacagaccctgaccctgtctggaaagaaagaaagagagagagagaaagagagagagagagagaaaggaaggaaggaaagaaagaaagagaaagagagaaagaagagggagggagggagagagaaaaaagggtctggggccctcatcattgtttgggtctccatctctttcctgcagggagagggacccaatcctgtagctggaagctgggagcctccgaaggcccatccatacttccctgacttggtacagccactgctacccatttctggagatgtttccccagtatccactgggctccccgcagccccagttttggaggcaggggtgccgcaacagcagagtcctctggacctgaccagggagccgcagttggaacccggggagcagagccaggtggcccacggtgagcctggggcagggagaagagaggaaggatggggagggagggatggctggcagggagagactgtgggccagatgaaataaaaagaccaaaacagaggcagacagagactccgctgccagtcagtgtcacaactagagaagagggaagagactggaaaacccagaagcagagaaatgaacacagaagctcaataaaccagcagcaagcaggagaggggcggggccaggggaaaggcgagaagaaggcaagaattcaagaagcagcgggcctgaactgggggccttccttcctcaacactctgcctcccttcctacaggtaccaatggcattcatgtcaccggcgggtctatgactatcactggcaacatctacatctacaatggaccagtactggggggaccaccgggtcctggagacctcccagctacccccgaacctccataccccattcccgaagagggggaccctggccctcccgggctctctacaccccaccaggaagatggcaaggcttggcacctagcggagacagagcactgtggtgccacaccctctaacaggggcccaaggaaccaatttatcacccatgactgacggagtctgagaaaaggcagaagaaggggggcacaagggcaccttctcccttgaggctgccctgcccacgtgggattcacaggggcctgagtagggcccggggaagcagagccctaagggattaaggctcagacacctctgagagcaggtgggcactggctgggtacggtgccctccacaggactctccctactgcctgagcaaacctgaggcctcccggcagacccacccaccccctggggctgctcagcctcaggcacggacagggcacatgataccaactgctgcccactacggcacgccgcaccggagcacggcaccgagggagccgccacacggtcacctgcaaggacgtcacgggcccctctaaaggattcgtggtgctcatccccaagcttcagagaccctttggggttccacacttcacgtggactgaggtagaccctgcatgaagatgaaattatagggaggacgctccttccctcccctcctagaggagaggaaagggagtcattaacaactagggggttgggtaggattcctaggtatggggaagagttttggaaggggaggaaaatggcaagtgtatttatattgtaaccacatgcaaataaaaagaatgggacctagataatttattttcttgggatttatacagaaacactattccatggagacaatctcaaagacaaagtcaagacactaaaatataatcccataaagatatttcagtgaggaactggtgagtatagtccaggtaataacagtctcgtcagtgatggctgacaacgtgccaggcagtgttctcaatgctttacagtactaacttacttaatcttcacaataactccctaaggtagatatgattcccatttaacaaatgaggaaactgaggcacagagcggtaactttcccaattcagctgcaaatgacaaagctgggatttgcacctagttcgtctggcttttagaggcctcttggggaaaaaaaagccttcatataccacgcccttccagaatttctttgaacgggtagaatggtctggccttctcaaataatcagatctcttgcatgttccgcaggtgttacttttcagtcaactctcaaacatctagccacacgcgaagtgaaaaatgttctccaaggttgattgaagggaaatgtgtgcaattttttttttttttttgagacaggatctaattctgtcactcaggctgttgtgcagtggcactattatggctcatggcaaccttgaactcctggctcaagggatccgcccacctcagcctcccaagtagctggggctataggtgtgtgccacgacgcccagctaattttttgtatttttagtagagatcaggtctccctgtgttgcccaggctggtctcgaactcctgggctcaagcaatcctcctgccttggcctctgaacatgcagtgattacaggcgtgagagccaccgtgcctgacctgaggtgtgcactttagacataaaatgagagaggccaagttcacattttgttggtgaacagaaatctaggctggcctccttttggttcagaaagagtatttatgatttttacttttttggtttctttttgtcttcttttatttttacccccaaaaaggactttaaatcttctcaagccctcttattagtaaatgtttgcccctccctgcccctgaattctctcctgtgctcggtcgagaggatcttagcttgcaggattgttagggagctgctgccagccggctgctccttccataaaaggccactctcatgggtctgatatgaggaactctgtcgctggagctcatcagggtggggcggctgcaaaacacacacctcagaaggcgtctgatccaatggagtggatgggtcatttaaggttgactgtgaaaatatcacatccaacttccttttttgaaaagtaaataatggtgagctgtatctttaaataaagttaaatcctcctgcccctgcaatatgctggggccagacctcatgaattcttaataattgttctaatgtgtttagataaaaaacaaattttatacatttttttcaacaaaataaaaggaggaaaatattttgaaagaaatgatgctgaagcacagccctttgtgacaccattcaaatttataattatacctgcctgtatttttttagagacagggtcttactgtgtcgccctggcttgagtgcagtggtataatcgtggctcatatagcctcagctcctagactcaaatgatcctcctacctcagcctcccacgtagctagagctacagatgcgtgccaccacacctggctaatttttttttaatttcttttttaagaagtggggtcttgctatgttgtccaggctggtctcaaactcctgggatcaagtgatcctcccacctcagcctcccaaagagctgagattgcaggcatgagccactgcacctgggctgcctaaattaattttctagggccgccataacaaagtactgcagactcgatagcttaagctgcagagatttatcttctcacagctctggaggctggaagtcagaggtcaacgtgttggcaaggttggtgtcctctgaggcctctgtccttggcctgctaatggtggccttcctgccacctatgtcttcacatggtcttgcctttgtgcatgagtgtgtcctaatcttctcttagtggattagggcccatcctgatgacctcattttaacttagtcacctctttaaagcccctgtctccaaataaggccccattctgaggtcctgggagttagggcttcagcacgtggattttggagggagacacagttccacccacagcattacccatgtctattttgccagtgtggagtcagtacaggctccaggacacatccacagagcacaggccacgtagaggggagctcctgtctacaaggaaaagctggcagaaaaccaacaaagacagcctcttgatggtggtcttcaaaagatgcaacaggatgcaatggcagttgacaatggggtaactgttggttgtgagaaccctaatcctctaccacagggaggagaaagctaacaccaagtccaacccacatcaacacgggggtgggacacccgtgagggggccaaggctgtagtccagaagaaaggtggatggaactggggacagagcagtagcacagggagatgggggaggatggggtaattcagaatttccctttttgagagtggcatcaacacaatgtcaaagtaggagttctccggcttctctcctccccaacagaatttcaactagcaacaatcctgtggcaagtttaccaccctgaatatcccagaacttggagtgaagctttgcatcccctgggatggcagagccaagaaaaaccatgaggacggtaaggggatggctgctttctgaccacgccactcctccccaagcccgcacagtgccacacgcagaggagtccctggatgctcggtttctccagtggacacagtggatgggaggtgggcgttcggcttccccaccagtctgagacttcacaggagactcactctagtcttttcccgcaggaagcactgtgagtaccggcagggtcagcccaacaagggtcagtaagaacttcccttttcaaaagataaagcggttcacatagacagctgtggtggactctttctgctgcctgcccaacagacttctgcacatttcctaaggacagaaccgcatttttgtactagagcagagattccgtgacatcaggagaagaggcccttcccccaatcccaggagccaataaactcattcttctttgcaattgtacaatgacatgcacagggaagtcttcctttccagggtataaagcaccattaggagaaagtttttggtttgccttggcccttattttttgttttggggattttgcgtgtgacaacatcactcctgagctgtggcagccatcttaccatcatgaggaaaccgccacggggataaaaagccaatcctctgaggacctggaagaaaggacagaacctggctcccaaggcatcactgagacccaaatcaacagtaagtaagcacagcacctactcctgggcttctttttatgagagaaaaaaaaagttcccatttgtgtaaatcatagtgtttggtgttccttttcttttttagttttaattgtatttatttcctctctttcggatggttgatttattcacatgggtcaaaattcaaaaagtatcaaagagtaaacagtgaaatgtctctctttcactcctatcccccaaccaccaaggtccctgctctggaagcaaccaatgttactgtttctgatgcttttccagaggtaatttatgcatattcaaacaaatatatataaatagattcctttgcttttttatttctacagatggtactacagtagtccccccttgtttgttattttttttttcttgtttgtgattttgctttccatggtttcagttatctgctgtcaactgtggtccaaaaatattaaatggaaaattccggaaagaaacaattcatctgttttaaattgtgcactgttctgaacagcatgatgaaacctcaagctgtcctactgagacagagtagggatgggactcgggccccactcgtgccctaccaagaacctctattgtaagctggggtgggggggtgtggccagtgaggaccccaaccagactgtccagaccttgcaccatgaatcttgctcaaggtactatacccactcatcgcagacccttagagagactaagatgaacaacgtcccaccataaatcttactccaggtgccaaacccactagttgtagaaattaaaataagcagctcccaccttgaatcttactcaaaggagttaaccctatctcccgtatgtataccacaggaccagaagaatgagcgctcctttgccttatcttcattataatactaaaaatcacaccggggtggagacttaacatgctaatgagacacacgatgcataaagaagcatgttatcaaactgaacaggtgccaaaatttcctcatctctacctgctcaaactcactcccttcccactttagttcctttaattctcctttagttcctttagttctcttgagtctcttccaggagccagccagagaattctctctctcgtgctgcctcccttatgccctgcataagctctaataaagccttgtctgggaaaactcttttggcctcatgttaacttctattgcattaacaacccccaaggccctgtggttggtaacactactcctgtcccttcaagacatgaattctccctttgtccagcatctcctccctgcagacgctccctaccccttagtcacttacaagccttcccagtgatcagaccaactgttgagatattgcatgcttgtgttcaagtcacccttattttacttcataatggcctcaaagtgcaagagtggtgatactggtcattcagatatgccaaagagaagccataatatgcttcctttgatgactttgctaagatctgcataacaatgcaccttctattcatgaagttgtgaagcagaaaaaaagaaattcaaactagttttgctgtcacaccttaaactgcaaaagtcatggtgcatgataagtgcttagttaagttggaaaaggcatcaaatttctgggtggaagacatgaacagaaacgtgttttgactgacagcaatcgggttcagtgctatccacggtttcaggcatccactgggggccttggaatgtatcccccttggaggagggtggactactgtacacgatgttctgtaagttcttccccttgcctttttcatttattaaaagagcttggccataataccatattagtaccaaaaaaagttctcattcatttttctatctgtgtggtattctatcacctggctgtaccatttaactggatcccttttgagaatttttaattcatctccaacctttactattacagacaacactacagtaataacctatgtcattttgcacatgtggaagtactgctacaaaaaaaattgctggaaataaaatttcctggttaaaaggtacatacatttcgttttgataaatgttgctaatttgtcttccatagagatggaatatcggaatttttttttttttgagatggagtctcactctgtcacccaggctggagtgcagtggcgcaatctgggctcactgcaagctccgcctcccgggttcacgccattctcctgcctcagtctcctgagtagctgggactacaggcgcctgccaccacgcccggctaatttttttgtatttttagtagagatagggtttcaccgtgttagccaggatggtgttgatctcctgaccttgtgatccgcccgtctcggcctcccaaagtgctgggattacaggcatgagccaccgtgcccggccgaacatcggaaatttttaagtgtccatttccttacataaacaccaactttgatgtgttatcaaatattttgatctttgccaaactgaaagatagaaaaaaaaaagttatctcagtgtaatttttatttggatttcttattgcgagtgaagtttttcacttcactgtgaatgagtatttcatttcatatgagtgaacatttcatatgttaaagagccagttgtaatttattttctactgactgttcatatctctatttttctttttttttttttttttgacagggtcttgctctgtcacccaggctggagtgcagtggcccaatcacaactctctgcagcctccacctcccaggctcaagtgattctcccacctcagcctctctccagtagctgggactacagacacacaccaccacgccaggttactttttaaattttttgtagagatgaggtttcaccatgttgcccaggctggtctcaaactcctgagctccttctgcctcagtcttcaaagtgctgggattacaggtgtgagccatcacacttggcctcctatatttctattagttttcaaatgttatctttttatctccagtcatctattgaacaataattttttcttcactaatttaaaactactgttatgataagccaagtttttgtgcaagtttgaatttacttctggattttcaattctctctcattgatccgtcttttcaatttgccaacattacagtctttcaattgttttagctttatattttaatatctattagggccagtagctccttttattctctgtttttaagaatttttctaactatattttcttccttttccacatgaattttaggacctgtttatttagttcactccccctccaaaagaaaggctcctttgaggatgtgttttgagattgtattgaatttacaaatcaattagtgtgttgggtttgtttgtttgtttttaatttgagacagagtttcgctctgtcacccaggctggagtgcagtggtgcgatctcggctcactgcaacctccgcctcccgggttcaagcgattctcctgcctcagcctcctgagtagctgggattacaggtgcatgctaccatgcccgactaatttttgtatttttagtagagatggggtttcaccatattggccaagctggtctcgaactcctgacctcaagtgatccacctgcctcagccttccaaagtgctgggattacaggcatgagctaccgtgccgggccgggtcttcttttcaagaacatgatatacccttctatttgttgataccctcctctttgtgtcctcagtagcattttaatgtttccttaatatgggcatttctcattatagtcattccttggtgttttacctttataagtgctataaaaatgggattttttagttttgttttctttctttttccccagccacctactgaattccctcatgatctataatagtttttttgttttgttttgtttttgtttcttttctgagacagagtctcactctgtcacccaggctggagtgcagtggtgtgatctcagctcactgcaagctccgcctcccgggttcacgccattctcctgcctcaccctccctagtagctgagactacaggcgcccgccaccacgcccgcctaattttttgtatttttagtacagacggggtttcaccgtgttagccaggatagtctcgatctcctgaccttatgatctgcccacctcgacctcccaaagtgctgggattacaggcgtgagccaccgcgcctggcctataacagtttttcaattaattttcttaggttatcacctacaaataatgctaattttgtaataatttttctagaaacaagttattgccatgttgcccaggctggtaccgaactcctaggctcaagcaatctgcccaccttggcctcccaaagtgctgggattacaggtgtgagccaccacacctggcctataacagtttttcaattaattttcttaggttatcacctacaaataatgctaatttcatagtaatttttctagaaacaagttattgccatgttgcccaggctggtaccgaactcctaggctcaagcaatctgcccaccttggcctcccaaagtgctgggattacaggtgtgagccaccgcacctggcctataacagtttttcaattaattttcttaggttatcacctacaaataatgctaatttcataataatttttctagaaacaagttattgccatgttgcccaggctggtattgaactcctaggctcaagcaatctgcccaccttggcctcccaaagtgctgggattacaggcgtgagccaccgcgcctggccctaatatttttaaatctcatctaaatgcatctcatagtacctccagaacaatagtaaatagtaatggacagctctgtctcaatcctgattttaagggcaatacttccagtattttctcattaagcagcagttgaaatacgtatatttattttattatgctaaggaagtatccatatcttattatttcataataatccaatggataatgaataaataatagaaacggaaagaccagatcaaaggctactgcaatagggagatggagaaaggtggaaggttggagatatgccttagagatagagtcaacaggatttattggtgggcgtgggtcccagctcatattttatggccttgggtattagtttgtttaatctgagcctcacattcaaattaacatttggtaaacattaagtgagaatttactatgtactagtcatcttaagatacaacagccaacgagacagacctgatacataaacttctggagcttgtaaaataatcacaattattgcttttgtagacaagtgctacaaaagagaagcacaacatataaccagtgaccgattctaggtctggagatgaggaaattcctccctgaggaaatttaagatacaacctgaagaataaataagggctagccaaattgaaggggtgttggagaggagagctctgctggtgggttaaatggtacgtgcaaaggccctgtgataggaagaatagtttggctggaacttgggaatagagagatgaagctagagaagtaggcgggtaacacgtcattcagacttacagactacagcaattttgaactttaccctaagagcaataggaaaccagtaaaatttttttccagtgtagtaaagtatatatatataaatatatatgttatatgtgtgtgtgtgtgtatatatacacacatacatataaaatatgtgtgtatagtgtatatatacacacatatatataaaatatgtgtgtgtgtgtgtgtgtgtgtgtgtgtgtgtgtgtgtatattttttttttcactctgttgcccaggctgaagtgcagtggcataatctcggctcactgcaacctctgcctcccaggttcaagagattctcctgtctcagcttccctagtagctgggactacaggcgtgcaccaccacacctggctaatttttgtattattagtagtgatggggtttcaccatgttggccaggctggtctcaaactcctgacctcaagtgatccacctgccttggcctcccaaagtacttggattacagtcatgagccacttcacccggcctgtaaagtatataaagtatattaatcttaagtgtatagcctgaagaagtgttacataggtatatacccatgttaccatcacagaagatatgcaacattttacttccttagaagataacttcatgccactttccactcagtcatgcttactgcttgagttccagtttatattctggcagacatatgacatcccagagatatccactttcctattttgacttatatccccatcagttagtatttgtttgtttgtttgtttttaagatggagtctccctcttgtcgctcaggctggagtgcagcggtgctatcctggctcactgcaacctctgcctcccaggttcaagcgattctcctgcctcagcctcccgagtagctgggattacaggcgcccactcacctggctaatttttgtatttttagtagcgacggggtttcgccatgttggccaagctggccttgaactcctggcctcaagccatctgcccatttcggcctcccgaagtgctgggattacagacatgaaccatcacgcctggctcatttgggttttttttc

SEQ ID NO: 508 - DNA, 1805 bp, Homo sapiens
ccactcccacttcctgagctccgccatgggagccctggaggcccggcctggccgctcccggccctggggtgcacatcggccctgagtcccgtcccaggctctgggctcgggcagccgccgccaccgctgcccaggacgtcgggcctcctgccttcctcccaggcccccacgttgctggccgcctggccgagtggccgccatgctcctgccttgggccacctctgcccccggcctggcctgggggcctctggtgctgggcctcttcgggctcctggcagcatcgcagccccaggcggtgcctccatatgcgtcggagaaccagacctgcagggaccaggaaaaggaatactatgagccccagcaccgcatctgctgctcccgctgcccgccaggcacctatgtctcagctaaatgtagccgcatccgggacacagtttgtgccacatgtgccgagaattcctacaacgagcactggaactacctgaccatctgccagctgtgccgcccctgtgacccagtgatgggcctcgaggagattgccccctgcacaagcaaacggaagacccagtgccgctgccagccgggaatgttctgtgctgcctgggccctcgagtgtacacactgcgagctactttctgactgcccgcctggcactgaagccgagctcaaagatgaagttgggaagggtaacaaccactgcgtcccctgcaaggcagggcacttccagaatacctcctcccccagcgcccgctgccagccccacaccaggtgtgagaaccaaggtctggtggaggcagctccaggcactgcccagtccgacacaacctgcaaaaatccattagagccactgcccccagagatgtcaggaaccatgctgatgctggccgttctgctgccactggccttctttctgctccttgccaccgtcttctcctgcatctggaagagccacccttctctctgcaggaaactgggatcgctgctcaagaggcgtccgcagggagagggacccaatcctgtagctggaagctgggagcctccgaaggcccatccatacttccctgacttggtacagccactgctacccatttctggagatgtttccccagtatccactgggctccccgcagccccagttttggaggcaggggtgccgcaacagcagagtcctctggacctgaccagggagccgcagttggaacccggggagcagagccaggtggcccacggtaccaatggcattcatgtcaccggcgggtctatgactatcactggcaacatctacatctacaatggaccagtactggggggaccaccgggtcctggagacctcccagctacccccgaacctccataccccattcccgaagagggggaccctggccctcccgggctctctacaccccaccaggaagatggcaaggcttggcacctagcggagacagagcactgtggtgccacaccctctaacaggggcccaaggaaccaatttatcacccatgactgacggagtctgagaaaaggcagaagaaggggggcacaagggcaccttctcccttgaggctgccctgcccacgtgggattcacaggggcctgagtagggcccggggaagcagagccctaagggattaaggctcagacacctctgagagcaggtgggcactggctgggtacggtgccctccacaggactctccctactgcctctgctgcccactacggcacgccgcaccggagcacggcaccgagggagccgccacacggtcacctgcaaggacgtcacgggcccctctaaaggattcgtgg

SEQ ID NO: 509 - protein, 435 aa, Homo sapiens
MLLPWATSAPGLAWGPLVLGLFGLLAASQPQAVPPYASENQTCRDQEKEYYEPQHRICCSRCPPGTYVSAKCSRIRDTVCATCAENSYNEHWNYLTICQLCRPCDPVMGLEEIAPCTSKRKTQCRCQPGMFCAAWALECTHCELLSDCPPGTEAELKDEVGKGNNHCVPCKAGHFQNTSSPSARCQPHTRCENQGLVEAAPGTAQSDTTCKNPLEPLPPEMSGTMLMLAVLLPLAFFLLLATVFSCIWKSHPSLCRKLGSLLKRRPQGEGPNPVAGSWEPPKAHPYFPDLVQPLLPISGDVSPVSTGLPAAPVLEAGVPQQQSPLDLTREPQLEPGEQSQVAHGTNGIHVTGGSMTITGNIYIYNGPVLGGPPGPGDLPATPEPPYPIPEEGDPGPPGLSTPHQEDGKAWHLAETEHCGATPSNRGPRNQFITHD

SEQ ID NO: 510 - DNA, 2137 bp, Homo sapiens
ccactcccacttcctgagctccgccatgggagccctggaggcccggcctggccgctcccggccctggggtgcacatcggccctgagtcccgtcccaggctctgggctcgggcagccgccgccaccgctgcccaggacgtcgggcctcctgccttcctcccaggcccccacgttgctggccgcctggccgagtggccgccatgctcctgccttgggccacctctgcccccggcctggcctgggggcctctggtgctgggcctcttcgggctcctggcagcatcgcagccccaggcggtgcctccatatgcgtcggagaaccagacctgcagggaccaggaaaaggaatactatgagccccagcaccgcatctgctgctcccgctgcccgccaggcacctatgtctcagctaaatgtagccgcatccgggacacagtttgtgccacatgtgccgagaattcctacaacgagcactggaactacctgaccatctgccagctgtgccgcccctgtgacccagtgatgggcctcgaggagattgccccctgcacaagcaaacggaagacccagtgccgctgccagccgggaatgttctgtgctgcctgggccctcgagtgtacacactgcgagctactttctgactgcccgcctggcactgaagccgagctcaaagatgaagttgggaagggtaacaaccactgcgtcccctgcaaggcagggcacttccagaatacctcctcccccagcgcccgctgccagccccacaccaggtgtgagaaccaaggtctggtggaggcagctccaggcactgcccagtccgacacaacctgcaaaaatccattagagccactgcccccagagatgtcaggaaccatgctgatgctggccgttctgctgccactggccttctttctgctccttgccaccgtcttctcctgcatctggaagagccacccttctctctgcaggaaactgggatcgctgctcaagaggcgtccgcagggagagggacccaatcctgtagctggaagctgggagcctccgaaggcccatccatacttccctgacttggtacagccactgctacccatttctggagatgtttccccagtatccactgggctccccgcagccccagttttggaggcaggggtgccgcaacagcagagtcctctggacctgaccagggagccgcagttggaacccggggagcagagccaggtggcccacggtaccaatggcattcatgtcaccggcgggtctatgactatcactggcaacatctacatctacaatggaccagtactggggggaccaccgggtcctggagacctcccagctacccccgaacctccataccccattcccgaagagggggaccctggccctcccgggctctctacaccccaccaggaagatggcaaggcttggcacctagcggagacagagcactgtggtgccacaccctctaacaggggcccaaggaaccaatttatcacccatgactgacggagtctgagaaaaggcagaagaaggggggcacaagggcaccttctcccttgaggctgccctgcccacgtgggattcacaggggcctgagtagggcccggggaagcagagccctaagggattaaggctcagacacctctgagagcaggtgggcactggctgggtacggtgccctccacaggactctccctactgcctgagcaaacctgaggcctcccggcagacccacccaccccctggggctgctcagcctcaggcacggacagggcacatgataccaactgctgcccactacggcacgccgcaccggagcacggcaccgagggagccgccacacggtcacctgcaaggacgtcacgggcccctctaaaggattcgtggtgctcatccccaagcttcagagaccctttggggttccacacttcacgtggactgaggtagaccctgcatgaagatgaaattatagggaggacgctccttccctcccctcctagaggagaggaaagggagtcattaacaactagggggttgggtaggattcctaggtatggggaagagttttggaaggggaggaaaatggcaagtgtatttatattgtaaccacatgcaaataaaaagaatgggacctag

SEQ ID NO: 511 - protein, 435 aa, Homo sapiens; identical to SEQ ID NO: 509

SEQ ID NO: 512 - DNA, 22613 bp, Mus musculus
  misc_feature (1)...(22613): n = A,T,C or G
tggtgcctgtttttcctcgtgtaagtggagctggttctactcacattgagagggctgaaggaaatggcaggtggcttgctgcccaagaccacattgctccctacaacttgttggtctctcttgtagatcacacacagtgtcatgcctcacactgtaacagcaagctaccaatcacattaaaaaaaaaaaaaaaaaaagcaatccaggcagtggtggcgcacgcctttaatcccagcactcgggaggcagaggcaggcggatttctgagttcgaggccagcctggtctacagagagttctcaggacagccagggctacacagagagannnnnnnnnnnnnnnnnnnnnnnnnnnnnnnnnnnnnattgggtttctctgtgtagccctggctgtcctggaactcaggctgtagactaagctggcctcgaactcagagatccaccgaccattgcctctcgagtgctgggatcacaggcatgtgccacccctgccccgcagtgactgagctgatttgtaaagccactctcacatcaggaatgacagctgcaaggtcggagtgtgagaagtgacaagctgactgtggcattgcacactggatccaaagagaaggttgtaaaagagctgggttggtcctgtcagccccgtcaaagtccccaattcttcagaaggtggcttaacacacgggacctgggggtgctgttgagggagcaggggagccaagtcctgagctcaccgcactcggatgacgcaaagaccatagctccttccagaacatcccaaggccctgccctactgtgaagttagggtcagtcttacctctctgggtttgggtttggttttggttttttcttcaagacaggatttctccatgtagccctgactctcctggaccaggctgtccttgaactcaagagatccacctgcctctacctcttgagtgctaggactaaaggcatgcgctaccacacctagcctgaagtacctttctgtcttgaaggtagccccccctgcatcccagttttgtaggttcccttgaggccacacacgtcacctgacacttgcagagtgcttcacgcttcacagggctgtgctctcgcagtggcagctcctgtcaccctcccagcaggcctacaggcttcatgagagccaaaggtgtgccctttggggcacagcctgcattgccctgagctctgtgtggtccaagagatggaaacacaggggtttatgcctgaggaagcagcagtcctgtgagctgaaaaacctccctcactgcagactgccaaggtgctctgtcagtaccacaggtctgactcaggcgaccctgacaagacattcagtcattggggagtgggaggggggacagcacaggtggatccagaaatagggggaaggctgcaagcaaatgagaacatgtgcactgtccctagagatggactggaaggccagccttctcttagggactaacattgttcccagaccacagtaccctgggtcctaaagtggggtcgggagaggcggtgctgctggagcaacatctgagctaaagaaagcatggggacactgttatgtcacctgctgacaacaggaagctgctctcctcttaacccgctctgctagtgtgatgtgcacatctccgcctcaggtccctgtgccacattttctttgccacctggtgccatttaacaagagaaatggcatcacattctccagcgagggcctgggagccttccaggcgctggggagcttcaggctgtcgctgctgccagctccctgccaagcttggcagggaccgtggaactagaggcacctctctggggtttgggctggcctgctgctgatgcacagcagagctgagtgacacttaaatggcaggcaggtgccctcagaccttaccaaagacatcggggagcagttgctcctggcagtatgtctgactaaggacttgacactagtgtacccaggactggggcctgctgctgaagtggagttgttgggtgactccgacccaactgaccctagaagctaccaggtgcctgctacctgtgttaggactaagattctcccgagagagcttgatttacatcacaggttccccgggctaggctacctgctatgagcagttcttagacccctacaggaagcccagctctctgcaggaggatgcagagacccaagagttctggcagctgtccagtgggacttcttgtccctgccttagtgatggctagccattcctatagagacaagggatctgcaggatggcatatccagtaagctccacctggctgggtgcggtagccagcagatgtgagagggactagtttttcaggccagcctgggctacagcatagaaccagttcataagacggggaaggctgatgggacggtttgtaggctagaagcatttgctgtgtgagtctgtcttccacataaaggtaggaaataatgcattgaaacttgtcctctagcctcacatcattcaatatgaatacattttgcaaggggtggggccgtagctcagttggtaaatgcctgccgtgtgtgtgtgtgtgtgtgtgtgtgtgtgtgtgtgtgtgtgtgtgtgtgtgtgtgtgtgtgagtgagagagaggttcagggtcatcgacaatgtagttcatttgaggccagtctgggctgtatgagaccctatctgatgtgtgtgtgtgtgtgtgtgtgtgtgtgtgagagagagagagaggttcagggtcatcgacaatgtagttcatttgaggccagtctgggctgcatgagaccctatctgatgtgtgtgtgtgtgtgtgtgtgtgtgtgtgtgtgtgtgtgtgtgtgtgtgtgtgtgtgtgtgtggttcagggtcattgacgatgtagttcattttgacgatgtagttcatttgaggccagtcagggctgcatgagaccctatctgattgtgtgtgtgtgtgtgtgtgtgtgtgtgtgtgtgtgtgtgtgtgtgtgagtgtgtgtgagagaggttcagggtcatcgatgatgtagttcatttgaggccagtcagggctgcatgagaccctatctgatgtgtgtgtgtgtgtgtgtgtgtgtgtgtgagagagagagagagagagagagagagaggttcagggtcattgacgatgtagttcatttgaggccagtcagggctgtatgagaccctatctgatacaaaccagggctgtcaaggcaggatggctcagctggtaagagtgtttgctgccaggcctgacgccctgaatttcatttccagaactcactcctgcaaattgtcctttgacctccctgtgcgtgcacatgcccaccaccccaccaatgccatttataaaaatacaattcagagcaaaacacttaacagcccgcatacacacacttcagcagaggccggagctgcgtagtgaagagagagaggaccgggtctgaggggctggctcaccagcaggctcccgcgtgcttgtgagtacggaggtcagcttcagtgtcttcctctgctgccttatttttgagtcagcctctctcacagaactcgaagtaattatccgagatagcatcacacccctgtcttcttcttgtccctgccttagtgatggtggtcacaccccttgtaccctccttgagttttcctccacagcccttcttaccctccacctactagaatggttccttgctggaatttggcgctatgggctgcctgatgctgcttgctgctccaggacttactgggtgtctggtgcatagttggtactttccagatggtgaagtagccatccatggggtctccagaaggcccagggcccaaccccaggtcattctgcaagctggggaagctcccactcctcctccacagcctcactgcgggtacacagctgcctattggggcccctgggtgggacttgacgctgcagccaagaggctgaaggtctgtggtctcttgtctagtactgaaggccctgtgtccccacaccaaggccaggcttacagaatgacagaactggaacccagtgcacagtgggtgtgtagggagagggggctgggcgtgagtaggccaggctgtggagagtgaatgggacattgcttcctggaagggcatggcctgccattgactggcctgggctcaaaagagaagagacaggggcctccctgaccactgttgtgcccggggctcctgctgcagactctgtcccgatcccccaccattcccatccctcttcagtgaacggaaagcctgacattgtccttccctctgtctccactgacggggactttccaacatcatccccatttctcagaactagatacaagacggggagggcaagggagcgtctactctgagaactggacactgataaacagggtggggctggaaggatgcacgtgaagatcctgggcactgggaaggccccagggcagtccgtgttatgactcatgtctcaaatgaacaaaaagccatcgagtgtgtccccggggctgtgcagggagcacgggcactgggggactgccaccacttcaaatccagaaactctggtgttgatgggctcttaatgagcggcaggtattaaagctaaaaccggccttgccgcttgagaacaccccaggcaggtctcagcagtttcatatgcggatctgggaggctgggcctctctgtccccaggggactgcctcccccacccccaccacactgggcttgtcccacagacacagagtagccttacttccctgaccctgtctctgaagcatgaaggacatgtaacaggctctgcagtcaggtgggtgcagacccccatcaaggcctttgttcctgctggtgcatcctgtaagagctctctgcccctgaaagcctgtgtcttcctcagaaactgggtaggttttcagggcaagaattccaaaccctacccccaccccgaaatgaattacccttggggaaggaaaagcctggtgtcagggactttaatcccaacactgagacacgggagaggcaggtggatctctgagaggcctcgaatctgggcctagaatgcccttagctctagcacttggtggaaaggtcgggagttcaagaagatcacccttggctaaattgtgagttcaaagccagcgcttagcaaatgaaaaggtggagaccagcaagacaaaaatttgattaggaagcggtttcagcgacaaagtccctttttttttttttttctttaatttttcaagacagggtttctctgtatagccctggctgtcctggaactcactttgtaaaccaggctggcctcgaactcagaaatccacctgcctctgcctcccgagtgctgggattaagaggtgtgcaccaccatgcccggcgtttttttaaatttttatttttggtttgtcaagatggcttctctgtagccctgactttggtggagctcactctgtagaccaggctggccccctaagtgctgggatgggaggtgtgtgccagcaccaccaggcttaaaaatccgtcattttatattcaagaatatgacatgaacaggctgttaagaggtgctcacttcacgagccagccacctgagcgtgcctccgacaattctcgagagctgccctctgacatggtatgcaccgggacacacgtgtgcttcgctcacacatgtcatacacacaaataataataaaataaaattttggtgttttgtgtaacccaacctggccttggactcctgatcctcctgccccacccccccccaccccccaagggctggctctctggataccatccttagcagcatgggaaggaaagagaagaatacgctgaagttctatcaaaagtttgaagtaaaaattgcactttttggtttttcttaatgggtgaaagttgggctggtgggatgtccctgtaggcccagctacaaaagaggtagaggtaggaagcttgcttgagccctgaagtctgaggccagcctcggcaccaaggcaagatcctgtcctaaacagatatataaataacattaaaaaaaaaaaagccaggggctggagagatggctcagtggttaagagcactgactgttcttccagaggtcctgggttcaattcccagcaaccacatggtggctcacaaccatctgtaatgggatgcaatgccctcttctggtgtgtctgaagacagccacagtgtactcacatacattaaataaataaataaatcttttttttttttttttttttttggcttttttcaagacagggtttctctgtatagccctggctgtcctggaactcactttgtagaccaggctggccttgagctcagaaatccgcctgcctctgcctcccgagtgctgggattaaaggcctctgctaccatgcccagcaaataaataaatctttaaaaaagaaaaaaaagaaaagaaaagaaaaaagagcaagacaaaatcctgttaaaaggaaaatgtgtaagccctacagcgaatttgaaactaatttcttgaggctggtgagatggcttagagggcaagagcactgactgcacttccgaaggtactgagttcaaatcccagcaaccacatggtggctcacaaccatctgtaatgagatctgatgcatctgaagacagctacagtgtacttatgtataataataaataaatcattgggctggagcgagcagaggttctaaattcaattcccaacaaccacatgaaggctcacaaccatatctgtacagctaccgtgtgttcacatacataaaacaagaaagaaactaatttcctgattatctcatactcaaaagtggcacagaagggcttctggcttgagaaggtggctagaggggacacagaagccacgccacccccagactaagccctgtgctgttgtctgtcacttgtctgagtcaactccttttcaagaagctggtagtaaatccatgtgatgcagaggatgagtttaaaagtgactgagcctgctgggcgtggtggcgcacgcctttgatcccagcactcgggaggcagaggcagaggcagaggcagaggcaggcggatttctgagttcaaggccagcctggtctacagagtgagttccaggacagccagggctacacagagaaactctgtttcgagaaaaaaaagaaaaaaggaaaagaagaaagaaagaaagaaagaaagaaagaaagaaagaaagaaagaaagaaaggaagaaagaaaggaagaaagaaaatacattgaaggtttagcctaacatttcctgcatccgtgagctctttctccccatccccttctcttcccctcctggtcttgttctctcttgatctctgggtcttatgtaggtcaggatggactcctcaagccccttatgccgccaaaggatagccttgaacttctgccccccccccccccccacctccctaggttcctagcgcatgcagtgctggggccagaacccagagctttgtgcatgctagacaaatgttctaccaactgatagcattagtccccaaatctctcttcttcctttgggggggggggtttcaagacagggtttaacccaggctggcctcgcaaatctctcttcttaaccatgagaggaaaccatccaagcagagattcaaggaccaccacaacctctgccccacccccactgcagacagaggttcaagtgaaaatacctagctgaggtcaggcacctggacacaccacagacatgaatcccacaggccttttgctgtcctgtccccacacacacacacacacacacacacacacacacacacgcacacaccccaccccacccccacccccggcttagtctggcacctgtctcaatgggacccctaggaaatgcctgacagacaaatatttgtgtcaagtgactaattttgcttctgtccttccagatgtcaaaactccctctctggctgaggtgaagggctttgtaattgtgactgggagttccagccctcttgcttgatgccccgagatgagccctgtctgctgcaggagctggagcagccaatgatcttcatcctgtaggaaagtaagtcctgcttgcaggctggcttctttggtgtggtccatgtgcattatcctagccctgaattcctgtaagcctcagtctgctcagctccagtgtcggacaccaaagctaggatgcctggcacataagcaaggctccatggccctaacagtgataagtaacagcggcccagtagtgatagaggtgggtgagggcagaaggttgctgcaaagtgtctggtctttaccttcatgcctctgtcctatgagaagggctgtccctgccctggctcctctccataccctttccctccccccacatccccatacacccacactcacacccacacccaccctcccagacccacttctcctttgcagctacgctgacgcctacaccttcctgctgtggagttgctggtccataggcaagggggtggacaggcaatgggccagaacccctagaagcccatttctgtggtggtcctcactcagcgtctccatctcctcttaacaactttgatcccctcactccgtggtcagtcctgcatcatccccagaactggactaaagcaccagcctccttgcctctccatccagtctccatctgacatcccactaaagcacaaggcagagagagacacacactcaaaacacaagaggtctcctcaccaccaggcctccactccagctggaccccatccatctatccctagcaacgccgctctcacctttctctcagcactcctcaagcagtggccacgttggttggtttccagtatgtgtggcctggagggcatgtttccctgccccttgcagctgctaaagatatctctaagcccctagccctgagggctcagaggtctatatggcccaccttgaggcccaccagggaactccaggccccagctcctagctggcagctccctctggcatttcccaggccatgacccctggggagggggctgcacatatcccaagacccccagagagcttgtttgtgtgactgtgactggggctgggtctgagagacgctgatgagagagacaagtgggagagaacatggaggtttgggggggggggggcagagcctgatacaacaggcacagatgtgaacaagcttatgatctaagaaaggacctgcagggacagggaggtcccttgctaatcctcaggtcttcccagggctctgcttgctgaaagctagtgtggctctccagcaccctgcgaccagagtccaagttttctgctggtccagcctgccccacaggtctgagcacaacttagcctccccatttaaggcaccgggcttttgctcacgttctaccctacactggccactagtctttacctctctaccaacaccatgtcattttctcaatcgaaccttcctgttatggttggtgctgactggcactggtggacctcaggccagaccccgtgcctacccactcccgtggagtccaggatgactggcaatctgtccccattactctcaaaggggactctgcccaggaggtagggcagggcagagggcatggatatggaagattagagagggcagtgagattaggaagtcttttatttatcggtgtccctccagcacccctgtgggcattcccatgggccactcaagatgatctgatgtctcaaccctgggaagggcagagcaggaagcaggagggacttggaggcagatggttagtggaaacaattggtcttggtgaggcacagcagcagggggctggaaaaggtaggcggctacagggtccctctgctgtccaagagcaggctccagtgtgacccccagcgcagatgatgctcagctgtctgtcgtctgcggtgacagttgagtggtttaatgcaggaaccacaggtgaaagaggtctggggttccaggcgaggtcgcagctccaccccagtggtcccaccccagcaggcaagggcggggcggaggatgctgcgtcgcggtttcattctagactacagggcacacagcccagactcggaactgtcccagctgcatgaggcggcgacatgggcgccaggagactccgggtccgaagccagaggagccgggacagctcggtgcccacccagtgcaatcagaccgagtgcttcgaccctctggtgagaaactgcgtgtcctgtgagctcttccacacgccggacactggacatagtaagcaaaggcatggggataggcgcgacctgcctgaggtatccagcctaccagcgccgcatgctcctctgctgaccctggagccaatggtctcccacatnnnnnnnnnnnnnnnnnnnnnnnnnnnnnnnnnnnnnnnnnnnnnnnnnnnnnnnnnnnnnnnnnnnnnnnnnnnnnnnnnnnnnnnnnnnnnnnnnnnnnnnnnnnnnnnnnnnnnnnnnnnnnnnnnnnnnnnnnnnnnnnnnnnnnnnnnnnnnnnnnnnnnnnnnnnnnnnnnnnnnnnnnnnnnnnnnnnnnnnnnnnnnnnnnnnnnnnnnnnnnnnnnnnnnnnnnnnnnnnnnnnnnnnnnnnnnnnnnnnnnnnnnnnnnnnnnnnnnnnnnnnnnnnnnnnnnnnnnnnnnnnnnnnnnnnnnnnnnnnnnnnnnnnnnnnnnnnnnnnnnnnnnnnnnnnnnnnnnnnnnnnnnnnnnnnnnnnnnnnnnnnnnnnnnnnnnnnnnnnnnnnnnnnnnnnnnnnnnnnnnnnnnnnnnnnnnnngactgagggagacctggagttgactctgatgctgtcataaagcagggaggacagtacagcccaagccttaatccaagcaagaagacccagaggccaaaaagagatgtttgggacggaggtgtctgccctgacatttgggagcccaagggcctgatgctaggttatgccctgtgggctgaccagacacccctctccctcacctcatcttatcaagtctctgaactcagcacttcctgtgttgaagacctgtcacgtgctgttccccgtcctcctcctagggccgtcccagaggaggcttctagaacgggcgtggggggggggggggctgtgattccgtccttcctgccttatcttacctgctccctctcccaccccagagtccctggaaaatgtctttgtaccctcctcagaaacccctcatgcctcagctcctacctggcctccgctcaaagaagatgcagacagcgccctgccacgccacagcgtcccggtgcccgccacagaactgggctccaccgagctggtgaccaccaagacagctggcccagagcaatagcagcagtggaggctggaacccagggatctctactgggcttgtggacttcacccaacagcttgggaaagaacttggcccttcagtgacggagtcctttgcctggggggcgaacccggcagaaccagacactacaggccacatgagattgcttttgtgttagctcttgacttgagaacgttccatttctgagatggtttttaagcctgtgtgccttcagatggttggatagacttgagggttgcatatttaatctctgtagtgagtcggagactggaaacttaatctcgttctaaaaattttggattactgggctggaggtatggctcagcagttcggtttgtgtgctgttctagccgaggactccagttgttcagcttcccggaactcagatctggcagcttaagaccacctgtcactccagcccctggaacatccttgcctccaaaggcaccagcactcatttgctctagagcacacacacacacacacacacacacacacacacacacacacatatgcatgcatgcacacttaaaaatgtcaaaattagcggctggagaaattcatggtcaacagcgcttactgtgattccagaggatgagagtttgattcccagaatgcactgcgggtggctcattactgagcataacttttgcttcaggggacctgatgcctctggacttcatgggcatctgtattcacgtgcacatcctacacacacacacacacacacacacagacatacacacacacacactcttttacaaatgataaaatataagataggcatggtggtacacacctttaatcccaacattggggaagcaaaggcaggcaggtaactgagttggaggccatcctggtctacatagcaagttccaggctaaccagagctaaatggtgagaccaagtctcaaaataatactccccccccaaaaaaaaaaaacttttaaattttgatttttttcttttattattattttttatattaatttcatggtgtttagaagtggtatacttagatggtgactaagaggaggtaaagccatcaggactgagcccctaacatacaaggagaaagcagagacaatgaacacgcccctctcctgctgtgtgccagctctggaccaccagccagagggcaatcatcagatgtgggccctagaaccttcagagccgaaagctaaatcaatctcatttctttgtaaagctatttagccttaggtgttttgttacggtgatataaaatggactaacacaggcactatgagtaagaagcttttctttgagctgggaaaggtactgttaaaccaaaattaatctgaataaaaaaaggctaaggggaagacacttactctgtgcctgggtgctgtgtttctttaactcctgctgggggcgctgttctgctttgaagatgactcaagtggcagcaacagctgatggtctggctgtggtatctggtacaagcttcactgtaattttatatttcaccatattggggaccggacccgcactaaacggcactctacagtgagcgttgccctaactgtaagatcagtttttagaataagcagggactaggggagaggcctcggtagggtagtgatgagtctcggttgtctgtaacccaggaagaaccatggatttctttgacccagtctgctaggacgtaagatgccatcttcaccgtgatggctgtttctagagacctgtgattcataggcagacgtctgtagtctcaggttggagtctaaatttaagcagatggaacatcctggtggtaatctccctccgagacccgctggaggccgcactcagcagtgtggtgtgctgagcagtgacctgtacagcactccttcacagagaggccaaggcaggcctgtggctctgcagcaagccgagctaagatggtcctttgtgttccctctgtggactgctctccccttgagctgggctttctcagccaagctggccccaggctcaacaccacccttgtggaagctgtcccctgacagtggggctctttgttctgaagccactgatcctctctacccagtacctggggtacattgcacactcagagggagccatcatgtctcctgcctgccctcctgctcccggggaagctgcactctagcatgtatgggaaggagcactgacctgcgagtcataggtggagtccttctgcagagtcttgtctgagttctgaccctgccttccagtctctttgaacccacagctgcctggcagcacttggctctcctgtgcagtcccttcctagtttagaaaatggtacccagtggcagtttagagcgtccagaacctggacatttatttccaagatgttcttctctccaggggttgtgtgagtagggtgagatccgatgacaacagcaggtgacaggcatcagccaggccattgctgtccactagtgctagcctggggctggaggagtctgaactgaccctggctacctgtattagctatagccagggtctaggctctgacggcgaaaaaaaactagtgaaacccccatggggtcatggcatacaaacctttggcacctctccatcccagctaagcggctggctggtacacagtttccctcagtctcagtttcttttgagaaatgggggatgggtacaaagttctttttcgggtctcccggctggaagggacctgagagaagtctcacacgcgtccccgtctcacaatgaggaaaccgaagcctaggcagccagagaacctggcattatcatttttgtgaagaagaagggagcagggcagtggtggcgcacgcctttaatcttagcacttgggaagcagaggcaggtggatttctgagtttgaggccagcctgctggtctattgagtgagttccaggacagccaggactatacagagaaaccctgtctcaaaaaaaaaaaaaaaaaaaaaaaacaaacaccaaaacaaaactgaaagagaagaagagggagctctttgggaaaggcaggaaaagcaagtggaggggggacaaggagcaggaacactacactcccccccacacacacacacacacaagggctgcaccaccaggcaggcagtgaagtcggcaccccctccctgtttgtcatagatgttactttctgaggatctttgtccacctttcttcacttcatctccatgacaatggctggaaggtggggagggggggactcatgtttggttaaaacaattattaaatctaaatcaagacagtcattttgcatatgagtgggaaggtgcattgtggcagtccttactggaggctgaggagagctgaccatggcccagaggaccagcctctgcgtgtgtagtgtgtgctgtcatctataatgtcagctataaccgtcacatactcaaaagccctgtctccagtcaaagatggctcatggacggaggaaaggtgcttgctgctgagcctggaaacccaaatgtgatcctagaccctatgtggtggaaggggaggactgaatcccgtaaggtgacccttgacctccactagtgtgccctgtcccccacccccaactttttcctttaagtcctatcttgaacgtcacatacagtaggtttctgtcttgaaacactcccaattgggcttttcgatgcttgtcaagttttccatctgagcatctggtcccttgcaggctctgctggtgtcacaggcatagagcaagcgcctcctttctgcaaaaaacctgtgtggtctctcttgccagaaggaccaaagtgacaacggccttgacctttctaacgacctctgagagtccggatggtctcacatctatctgtaagagtggatcagagacacaaatcacaatgagtgatgggcggagcttaatggaggtttctgcccctacctggtatgcctacccaacccaacggggtcggggtggcggggaggtcacctacgcaagctgtgtcctttcctttggatggtctggtttccccaaggtccccagggactaacaggtgggggcagagggctgaagtctcagttccttttggtgcttcctgcaggccgttttcacttcctgcctggcagctccaagactgggggcgcaaggaggaggtggggggcccactagagaagccagaggggaagccctgctgactccccccacacgcatacacgcccgcacgcacgcacgcacgcacgcgcaccagacggtactgtccttagaagctgatagcatgtctcaaggcctgcctctatatcaagagctagggctcgtggctggggatgtggctcggttggtggagtccttgcttagatgcttgaggttcttagttctgcctccagcacagtataaaactggcacagtggctcacacctgtaatcccagcatttggaagatggatgcaggaagacgaggacttcaagaccatactcagctaagtatccagttcagagatcgtgtcttacaaaaaaacaaaaacaaaaacagctcctaaagcctacccagctgggctggagagatggctcagtggttaagagcactgactgctctcccagaggacctgagttcaattcccagcaaccacatggtggctcacagccatctgtaatcggatctgatgccctcttctggtgtgtctgaagacagctacagtgttctcatataaataaaataaataaatctttgtgtgccctctgtggactgttctccccttgagctgggctttctcagccaagctcgtttttggccccaggactctgctgcaggggcgggacaggatggatccctcagttttagagaacctgggaaaagctccagattcaggtccgccaagcatctctgcagcgggagaaagtctgtctgtgcagggcaggaggtcagagcccgactactagctgttaggtcggaaagatggggcggggtgggcgtggggcagaggcatggagaggcggggctgagggctggccaggttgccaaagggagagagtggccagaggtccaaggatgcagacttacaaaaggctggtccggtaggagaaatctgttctttgttgttgttgttttggtttgagttttgttgttgttgttgtttttgttgttggtggttttttgtttgtttgtttgtttgtttttttgagacacgatctcatgtagtccaggctaggctcgaactctctgtgtagcccaaaatgacctgaactcctgatctggtcttccccttacaagtgatggtgttcgctgccacaccagactttttcttttctttcttcctttcttcctttctttctttctttctttctttctttctttctttctttctttctttctttctttttttttttccgagacagggtttctctgtatagccctggctgtcctggaactcagactttttcttttcgtggtgttgaggatagaatcccttgtgcacactaggcgagctctctactgttgaagctacaaacaccagctcctcctcgagctcttttcgcagtcttccagtgccttcaggtaactgcagctggagcaagaggggcctggatgtgtgaaatcacacacttcagcatgttgtacaaaagagaagggtcaggccaccccaacagcccacgttctgagctgactgggagttaccccccagacatgagctgataaaacttccctgacctcctggctgccctgtctaacctccaccagccctgctgtcctagctctggcctctgggggaatcctgaagggggactaacacggtgggtgcaaactaggaggggagttacctgaacgggaagggcgaaggccaggatacagaatgactggggctagcaggttgagtcgcagcgcccagccccccaatcctgctgctcccttgagacctcaggagcctggtcgccccctccctcccacaggcagctggagcctgagtcacgagctgcctctcaggagacaaaggcagcctagggccctccctccagaccccctcctggtgccagcatctgcactagcagggagtctaacatccccccaatctctggaggaaatggaagacagtgagtttaggagtcaccttctcccttgagtggcacccaatgtcactatcttctcccaggtggttgcctatactggctgtttccagtcgggcctttcagcttctctttgtagctctgtgaaagaactgctagtcgtccatcttgctgatgagaaaataaggtctagaaagatgaatcggccctcatagagtagggattgtaacaggtctacagtgacacagggcatcatcgagagggcaggaaacaggagaaaggagaagcaacagtggctgaagggaggccttctgcacaggttgcctgtgtgcaggtcatgggggaagaagcgcctccctgggatcctgggggcttctagcgctgcaaaggcgggctcagggctcatagcgtggctccaggccagaccctggtcctgtctggctgtgtgccagccttaacaagccactttcttaggtttctgtctagtaaattccaaaccttcctgtccacaaccgtacagaataacagactggtcacctaacattgaagacacagatgtggagacccagcacctgcttttgctaatgtccatagagtttcgggggggcccccaggctcccacagccagagttaggcagggaaatgcccatgcaaaccccgtagtgcagtgatggcccctgagagcgtcacccttgcccccccacatgcactccctcactcacaaccaggagcacactccgacaccgcctgcacacttgcacgcgcacacacactcggctgccagccctgggagctgggggcggggcgggtgcccttcaggcagacactcggctcctcttgcccgccccgtggggctcattgcagatgccaggggttattttaagcctggatcaatggacgattttttggtgacacaggcttgggagggaaagagacagggggcggatgccctagagctttgctgcgctcagaggccctggagtccaggataatggggtctcaccttcactgggctgcattatctctagatgcccctagcccagctcacggccatgtacccgaagtgggagtatcagctgcgtggagagtcagaccccagaacaaagacaagcagtgtcttttaagttactcttcctctgctgcccatcaccccaagaccatgtgtccacacagacaggcatctagagtttggcacagaccctatagtttttggcacctgtggtagttggctcaccgtagaacccacagaatcaggctaagctggggagagacctggggatggggtgaggtttggaatcagtccctggaccaatggaaacaccacatagatttgcaggtcaacaagaggtcacccgtggagcaaatgccaagacaatagggggaagagaagaccccagaagagacgcagccacgggagactctgtacattgggagatgacacagttccaaagtacgnnnnnnnnnnnnnnnnnnnnccccccccccaacaaacaccaacgtagcttggcagagcgacaggaacctactgcacacacagcacagtggtggcagttgtcccatccttaggaaagccagggaaggaagcagagaaggatgcgtcagaaagcacagctatgaagttctgattggagcaacaacaccccaactgaaaacaagtcatgacatagtctgtaatgtgatgccctgcaatgcgttgtcctggtgggtgatgggattaaagcgcttccttcgtgtctctgtccatcttgtccatcacctccctttctgaatgacaatgtagaaagtctttttatggggatagggtctccaggactggattgggaatcacatgggtgtgtgtgcgtgtgtccagggaggggaagaggtcctctttcgccagggtgaacggagacagcctgggtgggggtagttaccctcctcccagccttaacccactaatacctgacattcctgtcagctcctcatctcacacaacaggacttgatcctccttaagatgcagatcctttctctccctctctcataccctccccgttcctaagctgattccaggctccagaggaggagaggtgggaaggagaagaaagggccctagaacagctaaattccccatcaaacaggagttagaagtatcatttcacggttccattcagcaggtattgacaggcacctgagctgagctggggacagagggctcgactggaaccctagcccttgccctcctggtgtccccatctggatagtgagaggtaatctctacctcctggaaggaatggattatgaatctgtccttcagagaaaggtcttgatttatttcactggtttttggggggtgggttgtctttgttttgttttttgagagaacatctcatgtggttcgagctggtcttgaactcctaatcctcaagtctacaggtatgcacgaccagaaccaaattgccagctttccttcccttcttcttcttccttcccttcccttcccttcccttcccttcccttcccttcccttcccttcccttcccttcccttcccttccctttccttcattcctttctttttctttttttctttttctttttcttctttttttgttttttggtttttttttcaagacagggtttctctgtgtagccctggctgtcctggaactcacactgtagaccaggctggcctcgaactcagaaatctgcctgcctctgcctcccaagtgctgggattaaaggtgttctttcttttcttgaaacagaattttccaataaagactgggctagcctggaactcaccgtgtagacctgtggttctcaacctaggggttgggtgtcgaatatcctacatatcagatatttacactacgattcatgacagtagcaagattacagttataaaggagcaattaaacaattttatggtgggggtcaccatgaggaactatgtcacagggttgcagcatcaggaaggttgaggacctctgatttagattaattttgcctcaaggaatccccctgctttgtccttagtgtgtgaaaggacactattttgttctgtttgctttttgagacagggtctcagcacattgccctggctggtcaaagttgtgagcccaagtggtcctccttcttcaacctctccgcaagccttcagtactgctatgccattgctggcaccaagaagacctttttgttgttgttggttttttttttttttttgtttttttgttttttttttttttctcgagacagggtttctctgtatagccttggctgtcctggaactcactttgtagaccaggctggcctcgaactcagaaatccatctgcctctgcctcccaagtgctgggattaaaggtgagtgccaccactgcctggctccaagaagaccttttgaccttaaccatagcaactgaggcagggagaggcaatgactggcatcagggtcatattctccttagcagctcagcgggggagtggtggaatggggcattgagccatgcctcctcattctttccctaagcttgtgaaaggacctgggagtcccagggagtgagagttgaggacagacaggggagtacaactggcctggtccccaggacctgctcagccttctatagcagaggccgcggaggggagccgaccacttgagggctctggccagactgtttccagaactgggacatcctaggaccccagccaaatgtccaggttttagaatcagggcacatgctctggggcagaccagagaggggttgatcaaagcttgattctgccatttttgtgttgggggtccttattgtgccttcctcattcatgtcaggaccagacacaggaatggaacattggggcgtgtgtgtgtgtgtgtgtgtgtgtgtgtgtgtgtgtgtgtgtgtttgtgagtcccttcccagtgaattccaggctgctttgatctctatgcctctgtccccttacttaaaaaagcagggaatcgctcatccaaggttgccaagatccgaatccccagatcttaagctgagccccctcgagggcccaattccgacaacagtttgagggaggtcttggagagggtccctggtcgggcgcgcttgctgcactgaccttacagaacccctccctcccggcgcagcggccgcgctcctcccccggttctgcctccctcccgccctcctcccctcgctccctcccgcccgcccgagcccgcgccgagcccgcgccggagccggagccggagccagagcgcgggcaccgcggagcgggcggcgggaagacagaggtgtccggcgacccgccgcccggcgcagtctccaaaagacccaggccccgcacgccctcccgggtcagagggagctggggactgtgcaggcgagcactcgccgcccgcctccaccgtgcgcagtccgaggtgagccccggaggaaaacgcgcccaccggagatccagccccgcgtactctacaccgagctcacttgtgtctggaaccgcagacgcaccaggaggcgtcggcggggagactgcgcgggcagctgggcgaccgagcgaccggtcccggagggctgggggagcctggcagagcggccacgcgccgagccatgcgccgggcgcaatagcagaaggagcgggctgcatggagcgcgctggggcgcggggacagcgctgtggccggcgctcgcatgggctcccgctcgcactccgactggcgctgctgctggcagggtcgccgtcgggccgcgcgggggctcccgaggagcaggagatcgcagggtccggtaccgtggcaccggcgggaggcgaccgctgccgcggctattacgacgtgatgggccagtgggacccgcccttcaactgcagctcgggcgtctacagcttctgctgcggcacgtgcggctaccgcttctgttgccacgacggcccgcgccgcctggaccagagccgctgctccaactacgacacaccggcctgggtgcagactggccggccgcccgcccgcgcccgtgacaccgccgccccgcgcgacccggcccgggagcgcagccacactgcggtctacgcggtgtgcggtgtcgccgctctactcgtgctggtcggcatcggggcgcgcctgggcctggagagagcgcacagcccccgcgctcggcgcacggtgaccaggtgagtgcgcccgcttgcctgcccgcccgtcctgtcttcactgtccctagctggctccaaatttcactgcaactgcatccttctggaccctctaaatctttggcctctccgcagtccctttctctttttgttttgttttgttcttttggacctctctcccccgtctctgcttcacagagggagatagatacctgatagctctctctccccttg

SEQ ID NO: 513 - DNA, 1784 bp, Mus musculus
gtcccagctgcatgaggcggcgacatgggcgccaggagactccgggtccgaagccagaggagccgggacagctcggtgcccacccagtgcaatcagaccgagtgcttcgaccctctggtgagaaactgcgtgtcctgtgagctcttccacacgccggacactggacatagtaagcaaaggcatggggataggcgcgacctgcctgaggtatccagcctaccagcgccgcatgctcctctgctgaccctggagagtccctggaaaatgtctttgtaccctcctcagaaacccctcatgcctcagctcctacctggcctccgctcaaagaagatgcagacagcgccctgccacgccacagcgtcccggtgcccgccacagaactgggctccaccgagctggtgaccaccaagacagctggcccagagcaatagcagcagtggaggctggaacccagggatctctactgggcttgtggacttcacccaacagcttgggaaagaacttggcccttcagtgacggagtcctttgcctggggggcgaacccggcagaaccagacactacaggccacatgagattgcttttgtgttagctcttgacttgagaacgttccatttctgagatggtttttaagcctgtgtgccttcagatggttggatagacttgagggttgcatatttaatctctgtagtgagtcggagactggaaacttaatctcgttctaaaaattttggattactgggctggaggtatggctcagcagttcggtttgtgtgctgttctagccgaggactccagttgttcagcttcccggaactcagatctggcagcttaagaccacctgtcactccagcccctggaacatccttgcctccaaaggcaccagcactcatttgctctagagcacacacacacacacacacacacacacacacacacacacacatatgcatgcatgcacacttaaaaatgtcaaaattagcggctggagaaattcatggtcaacagcgcttactgtgattccagaggatgagagtttgattcccagaatgcactgcgggtggctcattactgagcataacttttgcttcaggggacctgatgcctctggacttcatgggcatctgtattcacgtgcacatcctacacacacacacacacacacacacagacatacacacacacacactcttttacaaatgataaaatataagataggcatggtggtacacacctttaatcccaacattggggaagcaaaggcaggcaggtaactgagttggaggccatcctggtctacatagcaagttccaggctaaccagagctaaatggtgagaccaagtctcaaaataatactccccccccaaaaaaaaaaaacttttaaattttgatttttttcttttattattattttttatattaatttcatggtgtttagaagtggtatacttagatggtgactaagaggaggtaaagccatcaggactgagcccctaacatacaaggagaaagcagagacaatgaacacgcccctctcctgctgtgtgccagctctggaccaccagccagagggcaatcatcagatgtgggccctagaaccttcagagccgaaagctaaatcaatctcatttctttgtaaagctatttagccttaggtgttttgttacggtgatataaaatggactaacacaggcactatgagtaagaagcttttctttgagctgggaaaggtactgttaaaccaaaattaatctgaataaaaaaaggctaaggggaagacactt

SEQ ID NO: 514 - protein, 128 aa, Mus musculus
GGDMGARRLRVRSQRSRDSSVPTQCNQTECFDPLVRNCVSCELFHTPDTGHSKQRHGDRRDLPEVSSLPAPHAPLLTLESPWKMSLYPPQKPLMPQLLPGLRSKKMQTAPCHATASRCPPQNWAPPSW

SEQ ID NO: 515 - DNA, 21772 bp, Homo sapiens
gcacgccaccatgcccagctaatttttgtatttttagtagacacaggtttcgccatgttggccaggctggtctcaaactcctgacctcacgtgatctgccacccttggcctcccaaagtgctgggattacaggtgtgagagtcaccgcggccggcctaaggcctctctgctttgatgtcaccatcgcagctgggcccatgcccttcactgaggggtgggccgccttctaactccttgtaggtgtcggggatgcggccctatctgcccctttctgtaggttccttctggaacttagctcaggccccacccctagtgctcagtaagggtttgtagacacctggctgacttcctggcagtcccttgggctccgctgaggacttcagccacgtagattccggtcgaggccccacatgtcacccgacatttgcaggcacgtcatgcttcacagagctcttctcacacagcagacctgtgaggtagatgatgtttccccaattcacagttcatgaaacagaccgttgtcatgggaggtgtgtcacagtcacacagctaactggcagcagagccagccccactctgcttctctccagtttttctgtgtgcctgcctaatccttgaagaaaggtttggaggccaggcgcagtggctcacgcctgtaatcccaacactttgggaggccacggtgggcagatcacttgaggtcaggagttcgagaccagcctgagtaacacggtgaaaccccgcctttactaaaaatacaaaattagccgagcatggtgccatgcgcctgtaatcccagctacttgggaggctgaggcaggagaatcacttgaaaccaggaggcagaggttgcagtgagctgagattgcaccactgcactccagcctgggtgacagagagactccatctcaaaaaaaaaaaaaaaagatttgggcatctccactggccaggccctgagctggaatacagaaggtggagacagcccgtgtgctccagaaagcagcagtctgcaagccatggttcctgcctcaggatgggaccactagaacacagcatcgcgagagggcagggggtggcaggataggcccgagggcagaggcccttagcgtgggagcagagtggtgcaggctctgggcctgagcaggccttcgcccgcagcaaaaagcccctcgggcacttggtcggggaagccagcctctgcttgaggaggggaggctccagggcagaaggaagaggctggaggtgaaccttcactttggtccctgaagggatgggcagtagcagcagagcccggaaggccagccttcccagagagtgaccttgtctttggcccttctgtccttggccagaatgcgtgtctttgcagggtaactggagggtagagtaggtctttggcggggctgatggaatgggtgtccaagcaggggaggaaggcggtgtggatgcagcctgcctgatctgggatgtcactttttgctggcgaccaggaggagaggccttcccccacaccccctcccccccatgcccgcatggggcacctctctcaggtccctgtgccacattttccttgccacctggtaccatttaacaagagaagtggcatcgcattctccagccaagagtctgggaaccttccaagcactggggaacacagtgctgtcactgccgccagctcccagctgagcttggcaggggccctggaaccaggaggcctcccctctagagttgggggctggcctgcccctgcctcacagcagagctgagccacacttaaatggcaggcaggtgccctcagacctgctgtccctggaaggcgggggatgggtggccagagagtggggttgcttcacgccatctggagacccagtgacattgtccaggagacagtttggctgagggaagtaatggaagatcagtgtgtgccggaattggggcttggtactgaggtaaggtggagggagatgggagaggctgggcttggctgcttgcttggtggcgtgacctcaggcaggtcactcaccctcggcaagcctcagttcctcagctgtagcgtggcgccaggctaaccgatgcctttcttcctagctagttgaggactggcaatgaagaagccactattttatgtatttatttagagatggggtcttgctatgctgcccaggctggtctcaaattgctggcctcaagcccattattttgaacataaagctttaaacaaatgtcagatgcctcagggtggccatggtcatgacgtggtcattgcaggatgttgaaggcgggcaagaaccccctaggcctacaggctgggaatgggggggcgaaggctactggaagcggcgcctcttcagctgggcctggaagctgccccgtccgtgctcttataagctggaaggaaggtggtgtttgggccccactcttagaggagtagagcttactcggagtcacacactcatttgtccccctcattccacctggctgtgagcagtccttgggaccccagggagttcacgttctccatggccagtggtccaggcccgagtgtcctggcctcaatctgatggtgtttcccatccctaccaaggaggcaggaccttcctagcaaggaggggctctgcagcctgggccccgtgtctcctgcacccccggtgagcagaggcaggagcagcccagctgcagaggggaagtggtgcagtgggaacaggagcagcctccgagtcccaccgacttggggtctgtggctgatctgcagtgtgacttggggcagcccacttccctctccaagccccactgcctgccccccttttcaggtcttgtgaggctcggagagaaactgaagagcctgactccatgccagcccttccaccctctacagacagtggctcggtacgggctggcaggctggtgggcgaggagagccgtggggttcttgagacaaggccctgttacagttgcccccaacccacacgcatcaggggtgctgggccaggcctgctggcagggctcgagcacaaagggacgttttctggaaggttctgttggcttagcccctcccctccagtgtaccctggggtcagaaggacacaggcagagagtctctgtgaaagaatgtctcacacttgggggctgagggagacagtggggtgggctgccaggctgtgtaccctaagtctgcgggtcccacctgagtatgggatgctgtggactgggggctgctgagggcagctccctggggagagtgggtaggtacttcccagagccccggacctgcacaggaggcagccttccctggaccgccctcttccatcaaagggtatgccagccgaacttggggcccctgcgagctggccaggcccaaggggtcccccagccctcctcctccaatatgcttggccagcctccctgtgaggacacagacccctgggcctcacccccacccccaccccctctccctgccgctgtccgcacacgggaagaggaccccactgatgtgtgtagtgtggcaggctcaggggctgcctggcgggcccctttactctagcctgctttccctctttgtaaagtgggaccagtcgtgctagccccacacagggctgagggaggagacggccgggtagggagatgctttgcgcacagcccttttcctggtcactgggccttctctgcttcccccagacatccttggggatcgctccaccctgtcctctgttccgaggtcaccatccaccaggccttctctgactcccctgtttgaaattgcacccataaccctcgagcaccctgcccttctgactttttctccccagcactccttacctccccacccactacgttgtgtcccatttgggtttcctctctgcttccctgctatttccccagaacccaaaacagctcctggtgcctggtaggtgctaagtgagtgagtggcgagtgacggggaggcatccgcgcaggggtcggcctctgcgttcacaagggccttcctgcgtggtaccctgaataaggcctgggaggttggccctgggggcccccgttcctctcccccttgcctaccctggccttacagcctccctctacttcacacacctggcccccaagaggtgggggctttgctccctgtggctaaagggctgtggtctgccctctagtctcacatggagggcccatgtcctctatcccggggccatgctgagagtggctggggtgccctggccagaccctgtggagtgcaggagcgcgcgtgtgtgcgcacgtgtgcatggagtggcgggctggatgacaggcagctccagcccatgaagacccaggcaaggatttgtgactgcttcatggaagggcgtgacctgccctcccctggtgtgggttcggggaggaacgggatctggggactcccaggcctctgcctctgggtcacactgctctggactcgccaggactttgtgctgattccgtggccactctgccctctcccaatgaaccgaggcccacggcactgcatcctttcccctggccccagcaagaggtactctgtagcattgtacttgtttgtgggggcttttaaatacaggagaagggaaaggaaataaccacaaggggtggtcctggcgctgtcatgagacaaaatggagccaagagagctgactcgaagccctgcaggcccaacccagccagcagagccatctccactgctgaccccattcctggaacacgggaaaagctgtttgtgtgtacacctacacgagggggcaaaggcacagaaccaggcagtgaagaaaggctcccaagggaaaacagagactccctctggggaccgtggggaaacgccctttgtcactcatagacttctgtattgtttgcaggtttttcctgagcacgtgttcaggtactactgcataattacaacgaaaactgattttgaagtacagagtgcatcccaggccccagagcagtttcacatccagatctgggggactgggcctctctgtccccaaggactgctccccatgacactgtgcttgtcccatccccagagtgctctcactttccccaaccccgtccctgaagcatgtagggcccaggccacgcttcacagtcaggtggacacagaccccctgcaggcccctcccatctgctggctcatcttgagagggcccttgccccttaaagcctctgttttctcatctggaaaatgtcctaatagtacctgcatcagatccttgtgagggtgtcttcaggagaattggggcacaaaaatcgacagaaacccccttctctctgaagaccccaaactatcttgttattttattattattttttttttttctgagatggggtctcgctctgtcagccaggctggagtgcagtggcacgacctcagctcactgtaacctctggcttccgggttcaaacaattcttcctgcctcagcctcccaagtagctgggattacaggcgccagctacgacacccggctaatttttttttttttttaaatttcttatagagagagggtttcaccatgttggccaggctggtctcaaactcctgacttctggtgatccacccgcctcggtctcccaaagtgttgggattacaggcatgagccaccacaccaggcccaaattatctttttaaaaagagtattcagtgaattaaaagtagagcatggtggccgggtgcagtggctcacgcctgtaatcccagcactttgggaggccgaggcgcgcaggtcgcttgagaccaggagttcgagaccagcctggccaacatggtgaagccccgtctctactaaaatgcaaaagttagctgggcatggtggcacgtgcctgttatccgagctactggggtggctgaggcacgagaatcgcttgaacccaggaggtggaggttgcagtgagccaagatcgtgccattgcattccagcctgggcaacagagcgagactccatctcaaaaaaaaaaaaaaaagacttgaataaagaaattaggccaggagtggtggctcatgcctgtaatcccagcactttgggaggccaaagtgggcagatcacctgaggtcaggagtttgagactagcctccccaacatggcgaaaccccacctctcctaaaaatacaaaaaattagccgggcctggtggcaggtgcctgtaatcccacgtactcaggaggctgaggcaggagaatcgcttgaacctgggagttgggtgttgcagtgagctgagttgggtgttgcttatcgcactgctgtattccagcctgggcgataagagtgaaactccatctcaaaaaaaaagaaaagaaattaggccaggcgtgttggccaaggtgggtggatcacttgaggtcaggagttcaagaccagcctggctagcatggtgaaaccccatttctactaaaaatacaaaaaaatttagccaggcatggtggcccgtgcctgtagtcccagctacgtgggaggctgaggcaggagaatggcttgaacccaggaggcagaggctgcagtgagccgagatcacgccactgcactccagcctgggtgacagagccagactccgtctcaaaaaaaaaagggacgcggtggctcacgtctgtaatcccatcactttgggagggcgaggcgggcagatctcgaggtgaggagatcaagaccatcctggctaacggtgaaaccccgtctctactaaaaatacaaaaaatttgccgggcatggtggcgggcgcctgtagtcccagctactcgggaggctgaggcaggagaatggcgtgaacctgggaggcggagcttgcagtgagcggagattgcgccactgcactccagcctgggcgacagagagagactccgtctcaaaaaaaaaaaaaaaaaaaaaaaaaagccacggggaaataagaatacattgaggagtaaactaacattccccacattggtctgattgtgaattcttcttaactgttttgtcatccaagtagcgacacagggcctgctgcagccccccacccccaccccatttaggaggcccaagtggaaaggttcatgtgaggccaggcacctgcacacaacacagacacgaatcccgcaggccttttgtcccggcacctggcccagcacatagggagcgcccagcaaacatttgtgtcacatgagtgggtgtctcatttgtgtctgctgctcttagcagctggcctccctctctggccaaggtaagggaccctggaactctgacagtgggctccagccctcccactctctctggccttgagagcagtctcctcgagtctctgctgggggtcagagcagccagtgcttctgctgtgaaacgcagacctggggcaggcggaccccctcctcctaactcctgtaaattctcccgactctggcctcactgggccaccctctccagggacaggttccccgttcctgggttcccacaagcctcagtctgcccacatggctggcacaagggctaaatgagctgcctggtactcagtcaggcctctgcagccctcactaatgggtaataccagcaccaacatggatggacgtgtatgtgggtggcagggttatggctcagtcttctggctttgtccccacctctctgcctcacagagaggccttccctgccctggctcccctccagggtcctgtcccccatccctgtaccgtacacccacgctcacccacacctgcccccacccccacatcaccatacacccacgctcacccacacctgcccccagccccacttctcctttgcagctcccctccgcccacaccttcctgcctgggagctgctggcccatgtacaggggatggagagggtgggccagcgcccaccagtcagggctggctgactggggttctttgtgaaccttcagggtctcccaagctggaaacctgggggtcggccttgctcccctcactccatggccagccgctgcatcatcccctgccctgggccacctgccctggacgtgggccacagtgccagagagagggacccttgcaggtacagctcagaatctccctcctacccagacacccccaggttctgtactgccccgggactggtgccctgcccatccgcagcccggatgctccctcctccctcccagcatcccctgtggcagtggccatgcctgcccccagagcagctcaggctcccctttcatctctccaagccttagcccctgcagccctccgcctggagtgtttgcctccccctcgctgctgctcagggtctccctctgcccccaggctccctccccagcccctgagtttctcctctcactgtgcttccccagccctgagtgcttaggggtctgggtggcatgtgtggcatttaaccccatgctctctgctgagccctgagctcccagagttccctccagccctggccctggggagggggtagcatgtgaccaggagggcggaggggcttgtgtgtgtttctgagacgcagtctgagagagacacgggtgacagacagttggggaccccaaacactggggagcagagatagacaggaggggcccgcagtgagacacagaggtgagcaggagaggacacatagccctggagaaaaggagcaggtgtgggcgggcttccctccactgcagtcacagttccctcactcataggcagatcttcctgggtcctccctgcacaaagccccagtggctccctcgtgtcccccagccacagtccaagctccctaatgtgctagataaggccccagtccagcctttcggtcccagcactccctggacttcctgtttgggcctccaagcctttgctcccctttggccttcacccccatctgctccctagacctcagtccatctggcaaacacttcaccatcgccctctccatgaagccttccggcccaccttccaggatgacgtgagctggtgcccttgctgcgaggctgtcttcccccatcagcacaagtgtgagattccctcagggcagacccacatgctacttgggcctggtacaagtgtctgatgtcaggctgggcactgtggcttcacacctataatcccagcactttgggaggccgaggagggcggatcacctgaggtcaggagttcgagaccagcctggccaaatggtgaaaccccacctctactaaaaatacaaaaattagccgggcatggtggtgcatgcctgtaatcccagttactcgggaggctgaggcaggagaatcgcttgaatctgggaggcagaggttgcagtgagccgagattgcaccactgcacagagccagactctttttcaaaaaaaaaaaaaaaaaaagcaggtgtctgatatccccaaccagctctgtccaggaagggcaggaagagaggaggagacaggtgggttgggggagatggcaggggagcactcggggtcatggagaggctttggctagacggagcagaggaaccactcagggtctgtgtcctggctgcggggtccatccccctccctacccaagaggaggctctggtctgcccccagacacctcccagcacccagcagagggcccacccaggcggtgctggttgaggggctgaattggggaaccacaggtagaaagagaggccaggccgggtgcggtggctcacgcctgtaatcctagcactttgggaggccgaggcaggtggatcacgaggtcaggagttcaaaaccagtctgaccaagatggtgaaaccccgtctctactaaaaatacaaaaattagccgggcgtggcagtgggcgcctacaatctcagctactcgggaggctgaggcagagaattgtttgaacccgggaggcagagcttgcagtgagccgagatagcgccattgcactccagcctgggcgacagagcgagactccgtctcaaaaaaaaaaaaagaaaagaaaggggggccccaggcgagctcggtcccacccagcaggcgggggcggggcagggcagagtgctccccccgccccccgcttcctccccgagggccccggagcccagctcagcctcagtccccgcagcttgtgcggcggcgtcggcaccatgaggcgagggccccggagcctgcggggcagggacgcgccagcccccacgccctgcgtcccggccgagtgcttcgacctgctggtccgccactgcgtggcctgcgggctcctgcgcacgccgcggccgaaaccgggtaagggggacccacggggcgcgcggcgccggcagctgcggggagaacggggccccgatcgccagggcgcaggcagagccccgacccccgggggcgccgagggctgaaaggaccctgtgggcagggcctggaggggcccgcgatcaccgcgtggccctcaccgccgcctctctccctccccttgtccaccgccccccggctgtccctcccctccccggccagcctcgcccccctccgcccctccccgtccccgctcctccctcccctcggccccctggcctccctccctgtcccctcccgaagcagccggggccagcagccctgcgcccaggacggcgctgcagccgcaggagtcggtgggcgcgggggccggcgaggcggcgctgcccctgcccgggctgctctttggcgcccccgcgctgctgggcctggcactggtcctggcgctggtcctggtgggtctggtgagctggaggcggcgacagcggcggcttcgcggcgcgtcctccgcagaggcccccgacggagacaaggacggtgagttccgtgtgtaggggaaccagtctgagcggggcgcaggggctggggtgtcgggacggtctagggggagatgcatggcccctgagggggagagaagggctttaaggggaaacggagacagagtggaaaagagtttgcgctgaggagctcaggctggggagggagacatagtcctgcccctgagaccctggtcggagccaggaacagctctgccctgacagaccccagtgtgaggaagagacaggttgcaggaagggggccccgtctgagggaggagtctgtcctgccctttgggagtctaacggagcttggttcccccataaatccctgaagagtttgccagactgagccccagctccccaactccctgccctgccagctccccactggccaggcctctggactcagggtcagccaggtgccacccctccccaccctgcattgggcttcatttgacggaggactgcccctccagaggagtcttctaggggagggagggaaggctgtgactgagtacggagcctctaccccctctgcctgcagccccagagcccctggacaaggtcatcattctgtctccgggaatctctgatgccacagctcctgcctggcctcctcctggggaagacccaggaaccaccccacctggccacagtgtccctgtgccagccacagagctgggctccactgaactggtgaccaccaagacggccggccctgagcaacaatagcagggagccggcaggaggtggcccctgccctccctctggacccccagccaggggcttggaaatcaaattcagctcttcactccagcatgcacatgccctctttctgggaccaggctaaccctgcagaagcacagacactacagaccacagcattcagcccccatggagtttggtgtgcttgcctttggcttcagacctcaccatctttgacagcccttgaaggtggtagcccagctcctgttcctgtgccttcaaaaggctggggcactatgagtaaaagaccgcttttaaaatggggaaggcaccattaagccaaaatgaatctgaaaaaagaccaagtgggaggatgcctaatttgtagttgggtggttttttgtgtttgtttgattttttttttttttttttttttttttttttgagacgagtcttgctctgtcgccaggctggagtacagtggcgcgatctcgcctcactgtaacctccgactccttggttcaagtgattctcctgcctcagcctcccgaatagctgggattacaggcacgcaccaccacagccagctaatttttgtatttttagtagagacgggatttcaccatgttggccaggatggtctcgatctcctgacctcgtgatccgccctgctcggcctcccaaagtgctgggattacaggcatgagccaccatgcccggccttgttttgtgttttggttttttttgagacagggtcttgctgtatcacgcaggctggagtgcaacgatgggtccccagctaattgcagcctgggctcaagcaatctttctgcttcagcctcctgagtaggtgggactacaggtgctccaccttgcccagctaattttttttttttttttttttttgagacagagtctcgctctgtcgcctaggctggagtgcagtgacgcaatttcggctcacttcaagctccgcctcctgggttcacaccattctcctgcctgagcctcctgagtagctgggactataggcgcccgccatcacgcccggctaattttttttgtatttttagtagagacggggtgtcaccgtattagccaggatggtctcgatctcctgacctcgtgatccgcccgcctcagcctcccaaagtgctaggattacaggcgtgagccaccgtggctggccttttttttttttttaaagacagggtctcggtatgttgcccaggccagtctcaaactcctggcctcaggcagtcctccccgaagggctgggattataggcaggaggcgccgggcctggcctctatttctttaatacctgccctcagagccgtcctgcttttaaactgatgcaaatggcagcagtgaataatcaattcatgggttcgcttgctttgggatttagtacaagattattttaagaaataacaaaggagaaaagattgagctggattttgctgattctcaggtatctgtaccccagggtcaaccctgagattggcccaatctgccagaacctaagatgccattttgaccccagtggcagcttccagagccacaagcctgcatttgggaggaggtgcgcagcctccagggctggactccaaactcgagctgaaggaacatgctggcaggtagctctctcagggtccacctggggttccagctgctccaagacacagcacatttagccataaacatggaagggctgggacctacaggaggctcctttgtgtagaggccagggcaggcgtgtgaccttgaaccaggtggacatgaggtcccttgaactcccttctctctctggcttgttcccctgaagcactggccccccagtgctgggcttatttggccatcctgtgccagccccctggtcacccaccgtcacagtggaagctgctccctcctcttacaatggtgttccttgctctggggtctggggacaagaccatctctttccactcctggacgacactgtgcactcagtcagccgcctcctacctgccctcctgcacagggtcagaacctcctgacctggacttcgccctgggcagcttccttggaacttgttgcagcttagcatctttggaagggagcactggactaggagtcagaaggtggagttctgggtgctgttttcccactcttgggccctgggcatgttctgttctgtgcatcagatgttttctgcctgcctccccctgagctgccaccagagccacctgtagacccctgcttctcctgcccctcctgtcccttgccaggcctctggactcagtgcttcctgtcccaaggacctgttgtgtgcccagcttggaagacagtggccactcacatccaggtctctgcctggctatttgctccatgaacccatctcagatgcccctgcccccagggagccaggtgacagggtgaggtcaagtgacaagcagtaggtgtgggagaggtttggtggggtcaggcccacatgggcccagccatccactccccttccatctggagttgggggagtctgagctgctcctggccaccccatctgccccaccccatcttttcctggccaccccagctcccaccccatcttctcctggccaccccatctcccaccccatcttctcttgacaccccatctcccaccccatcttctcctggccaccccatctcccaccccatcttctcctggccaccccatcttctcctggccaccccatctcccccaccccatcttctcctggacacccccatctcccaccccatcttttgctacagccagggttagctcagcaggtgaaaaccccgagggtgggtgaaacccctctggggctcagacatgcaaaccttgggcatctctctgtcccagctggccccgccagccggtaggaagtttcccctgagttctcagttttttcttctgaaaaatgaggggttgtatgcaaggttctcctcctggcctgtggtccccagagaagggcaggaaggaaccttagataattctcatatgcatttaacagacgaggaaactgagacccagagccgtcacatcaatacctcatttgatcttcataagagcacctggaggaggggggtggggtgtttgtgtttgtttaaatttttttttgtgaaaaaaatgaagataggcattttgtagacaatctggaagttctggaccggaatccatgatgtagtcagggaagaaatgacccgtgtccagtaaccccaggcctcgagtgtgtggtgtatttttctacataattgtaatcattctatacatacaaattcatgtcttgaccatcatattaatatttggtaagtttctctctctttagagactccacaataaagttttcaacatggtaaggttttccacctgggcatttggatactttggtttttgctgttgtggccaagacggcacaggccacatgcgcctgtgcaggagtctctgtttcccagcacagttgttgcgccaaaggccttgactttttttttttttttttgagatggagtttcactcttgttgcccaggctggagtgcaatggtgcaatctcggctcaccgtaggctcctcctcccaggttcaagcgattctcctgcctcagcctcccgagtagctgggattacaggcatgcactaccacactcagctaattttgtacttttagtagagatgaggtttctccatgttggccaggctggtctcaaactcccgacctcaggtgatctgcccgccttggcctcccaaagtgctgggattacaggcatgagccaccgcgcccagccagccttgacctttttgttttgtttttttttttgagacggagtctcgctctgtcgcccaggttggggtgcagtggtgcaatctcggctcactgcaaactctgcctcccgggttcacgccattctcctgcctcagcctcctgagtagctgggactacaggcgcccgccaccacgcctggctaatttttttgtatttttagtagagacagggtttcaccatattagccaggatggtctcgatctcctgacctcatgatccgtccacctcggcctcccaaagtgctgggattacaggcgtgagccatcgtgcccggcccagccttgacctttttaaaggtccctgttggtccaaattttctcctgaaaatctagaccatttcacatccatgaggagggattatatggtccagtttgcagataggaaaagagaggccctgtgaggtaatgggatccggcccaagatacaacaggtgggtggtggagctgggcgaaccctgggctcctgcgcttggcggccatgcctgcccagcagaatgtcattggcccggaccccctccttgggagcggagaactcggggactgatgccaggccccactccctggtttcatcactactcagattttctccccaactgttctctcattttgataagagggatcccagacagactctggaagcgccgttttgcgggtgggaactgaagggaaaaggcctctctctgagcctgtgtttcgggccagcttttcctgaaggagggtctgattcccaccaggtccccagggccctggccggtgggggcaggcctggctgaagtctcgcttcctcctggggcttcctgcaggcccctttcacttcctgcctggtagccagaggctgggggctccaggaggggttgtggaggcccagctggtgaggccagggaggaaggcctgaccccccactttcgtttcagcagggatggctcaacacagcactatccctgcaagctggtagcatctcactgggcctcaactctctgggcccctcttcccatctgcaaaatggggctcttgaggcccacctagctgtccttggagattgaagaggtcctgtggcatgtagggacagagggacccctgctagagccagggaacgcccccagcagggaggtgtgagcaggcctggtcctgccctcatgacccgagggtggggagagaatgggggtgcggtagaaacgactgccccaaatagcggaatagcggggcagagtcggggagcaaccgggaggagagagatgccagagttccccgcccctacgctttcctcccgggactccgaagggcgctcagtggttggcgtgggggacggggggagggacgctactggggtcccgggacccagaggaaccttgggcatctctccactcccctaggctgcggataatctgggatccaggcccgaatccagcgacttcggggcaagcgagtctctgcgcggcttccgccgtcagccccggccaccaccggccccgggagatttggacgtggggcgggggtagggggtgctgccaaggggcggggtcaagaagagaggcggggctgagggacccccaagcctcaaggtggccggaaaggggcggggccagcggcatgcctaaggggtggagtcaaggccaaggggcgaggaaaaagcttgggaccggataaggggcgggaccaaggccaagggcgcctgcttcgggctcccgacctctgcgccctcgggagtccgggtcctcacgcgcatcccgagccctgggggcctggatgcggcccacggccccgactcaagggcgaggctcaggggggagggcgcaagacgcctccgcacagaactgtgaccgaggagcaggggggctgccggggagggcgcacctgtccccgtgcacgcgctgtggcctccgtggagctctgtcctctcttggttcccgcgctaaggtctcggtgtccgctccggattcgcacgtacactgagggctttggagcctcccagtcccgccgctccctggcgacctcaggagcccgggcgccccctccctcccacgggcagctggagcctgagtcagagttgcctcgcgggagacaaagacagccgtgggccctccctccagaacccctcctggtatcggcatttgcaccagcagggagcccagagtccccaagagcctctgcttcttgggtaactgcatcattgaggaaatggaagtgaaattagcttaggaatgaggccttggaggcttgtgggtggcatccgcggtcacggtcttctcagcctggcttcagtgtctctggggcccactgcttctccctgtaaccctgccgaaatgctggtagcccatcttgcagatgacaaaactgaggcctagaaaggttgaatggccctgaagagcaggaattccaacccggtcagcctggctccaaaataaaggataaaggctgggcgcagtggctcgcacctgtaatcccagcactttgggaagccaaagcgggccgataacttgaagtcaggagttcgagaccagccctgccaacatggtgaaacccccgtctctactaaaaatacaaaaattaggccgggccccgtggctcacgcctgtaatcccagaattttgggaggccgaggcgggcggatcacctgaggtcaggagttcgcgacccgcctgatcaatacggtgaaaccctgtctctactaaaaattacaaaaattagccaggcgtggtggcgtgcacctgtaatctcagcaactccggaggctgaggcaggagaatcgcttgaacctgggaggcggaggttggagtgagccaagatcgcgccactggactccagctgggcgacagtgtgagactccgtctcaaaacaaaacaaaacaaaaattagccaggcatggtggcgggtccttataaatcccagctactcgggaggctgaggcaggagaattggttgaatccaggaggcagaggttgcagtgagccgagatcacaccactgcactccagcctgggcaacacagagagactccgtttcataaataaataaataaaacctagaaactctgggcatgtggggctggaaaggggttccaggaagagagggcagcctgcgtgaccagacagggggcaaatgagcctgggtcaggtgttggcaagggccctgtcgtggggtaggagtgcctcccgggtgtgctgaactggccagaatgtggattcgggactcatagtgcaggttccaggccagaccctgcccttcctggctgtgtgccagtcacagcaagtcacttcctctctctgagtcttgagtttctctctaggaaatcccaaacctttcccagggctcagcagagctggcagactggtcacccaccacctaaaatggggacactgaggcccagcacaggctgtttgtcatgtccacacctctcagggcccccagccttccccagccagaactgagcaccaggtgagggctggacatggaggaaggccgttcgtgcacaggagcatgtatgctgacaaacacgtgtgcacacacatgcccaccgtgcagggaaggccctcatagtcatgctagccccagacatgcacactcttgctgtcacccaaacacgcgcagacacccgcacactcgagctgccagcattgggagctgggggcggggcgggtgcccttcaggagcagggactcggctcctctgcccgccccgcggggcttgctgcagatgccaggggttattttaagcctggatcaatggatgagttttggtgacacaggcttagtggtagtggaggggggcaggcagaagagataaggggtggctgccctggagccttgatggggtgagagaccccggggtccagggcaaaggggtcactcctcggccgggctgctctatctccagatcccctcacccggcacatggccaggcacctggggcagtgtcagctgaatgggcgatcagatcccaggactcagccagtcagggtcagctgggctctgtgttcacagctgccctctcctgctccactcactccccgcggccaggtgttcccatggagagaagagggtatccagtgcctggcacagacccagtagttatggttacctatggctgctggctgaccactgaatcagattgagacggggaggaaggtgtgtgtgtggtggggggtggggggtggtgttgggggttggacatcagtccctgggaggggctggaatccacttccttcattggacaaatggctgtcactatgtatatgtatgtgaaggcctgatggggtcaacatgaggaaagcacccagtgccaggacggtgggggcaggagggtgtccaggaagggggagcactgggagacttgctctgacccctcactctaacttggaagaggccccagttccaagggggcagagacaagcctctttcaacccagtgcccggcaacgggtgggaaaggtgggagaagaggcccccctcagagctcctgcagcctccagggcagtgggcagagggcggtggggacttcaataccagtgatacgggttgtgccacggattccatttctaggaatggccctaaggaaaggaagcaggaaaggacgctccagaaagtagagctcagaagctctgagaagaatcacaaatgagaaggtttttttttgtttttttttttttgtttgtttgtttgtttttttaagacggagtctcaatctgtttcccaggctggagggcaatggtgtgatctcagctcactgcaaactctgcctcccaggttcaagcgattctctggcctcagccttccgagtagctgggattacaggcatatgccaccatgcccagctaatttttgtatttttagtagaggtggggtttcaccatgttggtcagcctagtctccaactcctgaccttgtgatccacctgcctcagcctcccaaagtgttgggattacaggcgtgagccactgcccccagccaaacgaaaagtttaaggatggcaaaaagtaaaccacaaactagttacaatccagcatgtaaatgtggcatattttagtgtggttgtctctggacatgggattaaagcaatttcatttaattcctttgttcatctgtgttttttcttctaaactggtaataaggggtcctttaatgagggtgggttttcggggctggatgggaagtgtgtgtacatgtgtgtgcacatgtgtgtgtgtaggtggagggagcaggctgtctttggccagggcacaaggagaagctctgagtggggaggtcacctcctcttcctgtctgaacccattaatacctgaaattagtctgtcagcccctcatgtcaggcaacagacttgatcctccttaaaatgtaaatccttcctcttcttctcccccaccttctccactttcataagctggtcccagttgctgagagaaggacggatggaaaggggaccaggagggaccctagggagccccaaatgtttcatctcacagaaactaggcgctggagtcctttcattcatttattcattcagcaaatgccgacagaggcctgagctgcacactgggtgaattgcacgcccagtccttgccctcctgctgtttccgtctggacagagggaggttccatatcgacccctatctcctggaaggggcagattatgagtctgccctccaggaagagtctttgatgttaagatgagatactgaggcagggagaagccaagcaccaggaccttctccagttcaactcaaccccgaaaacaccactgggccgtgctgggaccgggtccgggctccttagggcccccacaccctacccctcggtttgtgaaaggacctgcgggtgggcgcagggcggaggtcttccttttccaggctttccttttccagggcaggggcgagcccagtccccctctcctcacacctggggagggagcagatcgcggaagtgcgtcagccaagccgtgcccatcgacgcagggatggggacatccctggaccccagcccagcgttcgaggggttctggaactgggctcgcgccgtggggtaaatccttggccctctgaagcggcgctgccaggggaagtccttcccatttgacaggtgggaaaatcgaggcgccgagaggggaaggggccctccttatgttatgatcagaacggacagaggggacgggaaggaggtgagagggtggccctgcccgtcccggggcaattccgggctgctttgacctccgcgcctgtaaggtacaggtccccgcacctgtaagacagggacgctctagtcgcgggccctagaactgatccccttcgagcgcccagttccgatgaatgtttcggggcagtctttgtggaggggggttccctgtggggcctcccggctccgcggggcctgctgcctcctctcgcccctcgcggcagccgcgctcctcccccggctctgcctcccttccgccctccctcctctctccctcccccgcccgcccgagcccgcgccgagcccgagcgggagccggagccggagccggagccagagcgcgggctgtactgagagcgcggcgggaaggtagcgcagtc

SEQ ID NO: 516 - DNA, 920 bp, Homo sapiens
cgcagcttgtgcggcggcgtcggcaccatgaggcgagggccccggagcctgcggggcagggacgcgccagcccccacgccctgcgtcccggccgagtgcttcgacctgctggtccgccactgcgtggcctgcgggctcctgcgcacgccgcggccgaaaccggccggggccagcagccctgcgcccaggacggcgctgcagccgcaggagtcggtgggcgcgggggccggcgaggcggcgctgcccctgcccgggctgctctttggcgcccccgcgctgctgggcctggcactggtcctggcgctggtcctggtgggtctggtgagctggaggcggcgacagcggcggcttcgcggcgcgtcctccgcagaggcccccgacggagacaaggacgccccagagcccctggacaaggtcatcattctgtctccgggaatctctgatgccacagctcctgcctggcctcctcctggggaagacccaggaaccaccccacctggccacagtgtccctgtgccagccacagagctgggctccactgaactggtgaccaccaagacggccggccctgagcaacaatagcagggagccggcaggaggtggcccctgccctccctctggacccccagccaggggcttggaaatcaaattcagctcttcactccagcatgcacatgccctctttctgggaccaggctaaccctgcagaagcacagacactacagaccacagcattcagcccccatggagtttggtgtgcttgcctttggcttcagacctcaccatctttgacagcccttgaaggtggtagcccagctcctgttcctgtgccttcaaaaggctggggcactatgagtaaaagaccgcttttaaaatggggaaggcaccattaagccaaaatgaatctgaaaaaagaccaa

SEQ ID NO: 517 - protein, 184 aa, Homo sapiens
MRRGPRSLRGRDAPAPTPCVPAECFDLLVRHCVACGLLRTPRPKPAGASSPAPRTALQPQESVGAGAGEAALPLPGLLFGAPALLGLALVLALVLVGLVSWRRRQRRLRGASSAEAPDGDKDAPEPLDKVIILSPGISDATAPAWPPPGEDPGTTPPGHSVPVPATELGSTELVTTKTAGPEQQ

SEQ ID NO: 518 - DNA, 45665 bp, Mus musculus
  misc_feature (1)...(45665): n = A,T,C or G
ctcatatgacactggcttatttcattctgtgggttagtttttcctaaccctatgaggaatatccaagagaaacagctctcaagctgtgggtggcaccattccctgggccaggagcctggactgcataaagagaaaaggaggaataatccatttagctcgctgtctaaggaggaataatccatttagctcgctgtctaagagagctcagttcgtcacagtgggggatggggtgaggtgggggaggaggtatgaagaagcagagcggttctcatcagggcattcaggaagcagagagtaactgctagcgcatgggtcctcgcagctcacaggcagggctggtgtccctttagttagtcctttgtgaagacccctcacagacgcgcccagacatgtgcgttcctaatctgacaggcagctcttgatccaatcaaaccaataatcaagaagcagagcagcctgcatgctgccttccaggcaaggaagccagaagtggggcctctggacagaaatcccaaagaggaagtgtggccaggtggttctggcacactgtggggggaggggtgtgggggctgaactctgtattgcaggttctggccagaagaatgtggacactgggccccatggcaatccactgaggctctgaggaaagtaactggattccagcgagcagtttgaatatatgatgatggacatgtaagaaggttccaagaactgagagtgacagggctgagaatacgctggaacattcctgagaagaatgtctatatactccaagacaaggagaagggagaagacacagcatgagagaagagactgaagacacgcatgccactgaagggacagtgaagggcatcatcaaagatgaccaagacagatgctggttataggctgtgtggaaccaggcagcccttccatgtgggagatccaccatgtatgtcccttttcagaaaacctggtaccaccttcccatcttctcaaaagattgcaagacagaaggtggggtggggagctgccctgctcacagctcagctttagggtcttcatacatccttccctggggaccaacccatctcagctccgtgacagtcaagacggaaaatccaaccaagtggcctagggaaataacccaaaagtccaagtgaaggtgtggactgcagacctggctgcatccccagaagaagtgtatttatcatttactccatgtggagctgcagtccggcagggctcagctgggacagctgtctcttctctgctaggtgttgggttaaacaacagccacattcactttgctgatggttcagcaactaggtcggacctcagtgggctcagttatctccttttcacttgatgtcagcaggggtgactcagggctgccagtgggagtcatttgaagacttgcccaagtctcagtgctctctgggcagttccatacttcagtccctactgtacataggctctctaatgtgctcctccctgtgtagtggctctagagtggactgacagctcacatgtcactcaaggatctcaaaacataaggaaggagcgctaggtatggtgacacaacctgggactcaggaagaagaggcaggaagtctgcaaatctaagaccagacctgactgtagagtgaggggcagccacaaagcgtgtgtgtgtgtgtgtgtgtgtgtgtgtgtgtgtgtgtgtgtgtgcgtgcgtgtgtgtgtgtgtgtgcgtgtgcgtgcatgtgtgtgtgtgtgtgtgtgtgcgtgtgtgtgtgtgtgtgtgttgggggagatgctggagaagctaattcttatgttcagctcaggtttagaaggcacagcatcttttctagcatattttatccattgaagagagtcaatggctctagccatggtgaagaagggggggaaataagactctttctgagagaagccatgaaggatggggaatgtttgaacagtgaaatgtgtggaccgtggctctctctgaccgttgacaacatgaatggacagtagagcattagattagagggagagtgatgaggagagtgagtgtgctgtaagcacctccttctgaaaggaggaatgcagttcagtagacggagtgcttgtctaatatgcacagtaccttggatttggttcctaggactccataaattataggtggtactgcatagctgtaatcccagaatgtctgtaaccccagcactcagtggctggggcagaagggccggaaggaagaccatccttgtctactgcactggtcacttttctttcttttggggggagaggggagagggcacgtttaagacagggcttctctgtgtatccttgactgtcctagaattcactctgtagatcaggctgccctcaaactcagagatccctctgcctcttcctcttgagccctgggattaaaggcgtgcaccaccattgtctggccagttacttttcttgatgctgccacagaatatctgacaatcaacttatggaaggaatagtttatttttacataaagctccaggggacttgtgcccgtcaggtggcttggcaggtaaagacacttgccatcaaacctggaatctgagttcagtccctagcactcccgtggtagaaggagagaaccctctgttgaaagctgttctctgaccttcacccaagtgctgtgatacatacacacgcatgcatatataccaaacaaaccaaaccgcaagcaaacaaacaaatacacagtaataaagaggtcttgggtacaatgcagcagtaggaccttgagggagccagtccacagtcaggaagcagagagcatcaaggcctggctgtcaccttgcttcctgctttttatgaagcttggaacttcacgccagagaatgctgtccacattgaggatggacaccatcaagagaacccttcacagacacagaggtttgtccctatccagttgacaaccagtatcaatgacctcagttacgcactgaactcctgcccagcctgatctctatgaggcctcttgccaaacaacaacaaaccagggagacaggtctcccagcacaaagggggcgtggaacccacctctgttgtagttcaagtgtgaaatgttcccacagtctcttgtgtggaaggtaagcacagcccagttgcaccaacagttagttatttctggatgctcggtattatcccggttataatactgtataaaacagtcacctttttggttgacactagccctgtgatgccagcagtcactttacgggcagttggtattagcacagtggcagcggcagatggctttggaagggtatacaagcctacttacaccgggagttcccatggacatgtctccatccctagttaccccactataagcatagttcacacacacttcctttctggacagttaagacgattctaactactccagaggtcaccttttgaatggactatatcaatcattcactgtggcatttgcctgatcagtgactgatactaactcaaccacacatgcattattgttgttgtgtcggaagtggtggtgtgcaccttaaatcccagcatttaaggaggcagaggcaggaggatctctgtgagtttgaggccagtctagtctacggagtgagatctataccagtcaggactacatagcaaaattctgtcttaaacaaacaaacaaacaaacaacaacccaagttgttgtttataggcaaaaaatatatataagaacaaatttaaaagaaaccaggagtacctacatttatttcaaataaagtagacttcagataggaatattaacacagatttaaaaaagaatataagtacatattttaaaggaacacaagaatgagagtcaattctatacaaaaatataagtgaaaatccttgcatttacttgcattaaaaaaattccactgtgacaatcttttttagctgattatttatactagtcacattttaaattatcattgaaaaaatgtcatggtgttcatgtctataatctcaccagtagaaaagctaaggcaggaggattgccatgattcaagcccagtataaagtacaccagcccaggctgactacagtgagagatcctgagtagaagcaaccgaaacaaaaccgaaacaaaacaaaacaaaacaaaacaaaacaaaacaaaacaaaccaaaccaaaccaaaccaaaccaaacaaaccaaaacaaaaacaaaaacaacaacaataacaaacatgtatgcaatcgagttagtgttggtactccctccaacagagtcaacatgtgagaggcacaaaccaatgggagttcaaggagaaggagaaatcttcagtgattcattggaggctgacaccgccaacagtgactgacagcacagcaggaagaaaatctgcaagactccattacattgtaacattgtattcaacagcactgtcaatcactgtcttagggtttactgctgtaaacagacaccatgaccaaggtaattcttataaaggacaacatttaattggggctggcttacaggatcagaggttcagtccattatcatcaaggcagggccatgtcagcgtccatgggactggaggagctgaaaaatctacacgtagatccaaaggcagacaggaaaagactggctcccacatgtctacgaggagggtctcaaagtccacactcacagagacacacattctccaacaaagccacacctactctaacaaggccacacctcctaatagtgccacttcctgggtcacacatatttaaaccaccgtaatcacccacatccaatggccttataaatgttctataaagaacaccttagccccttcctcccctcctgactcttctcttccggttgaggtggtggcgggccttgcctcctactcagctctgtttttcctctcctcgattttccccccacccgcacccccacctccccgggcctagagccgctggacttctttctcccttctctatggcggcctccgagcccccgcgtgcgctcctttccctgccatgaaagaggaatacaacgtgatggtgctgggcaccggcctgacagaatgtatcctgtcggggataatgtcaataaatggaaagaaggttctttatatgggtcagaattcatactatggaggagaaagtgcatctataacaccgctggaagatttatataaaagatgtaaattaccagaacaacggccagcatcaatggggagaggaagagactggaatgttaacctaattcccaagttccttatggccaatggtcagttggtgaagatgctgcttttcacagaggtcactcgttatatggacttcagagtgattgaaggaagctttgtctacaagggaggaaaaatctacaaggttccttccactgaagcagaagccctggcgtgtagcttaatgggactgttggagaaacgctgcttcgggaagttcctggtttatgttgtcaactttgatgaaaaagatcctagaactttcgaaggtgttgatcctaagaagacctccatgagagatgtgtataagaagtttgatttgggccaagatgttatagactttactggccattctcttgcgctgtacagaacaggtggctacttagatcagccgtgttgtgaaaccattaacagaattaaacgttgcagcgagtctttggcaagatatggtaaaagcccatacctctatccgcttaatggtcttggagaattgctgcaaggatttgcaaggttaagtgcgatatatggaggtacctacatgttgaataaaccagttgaagaaatcattgtgcaaaatggaaaagtggttagtgtaaaatctgaaggagagattgctcgctgtaaatagctcatctgtgatcccagctatgtaaaagatcgggttgaaaaagtgggccaggtagtcagagtgatctgtatccttagccaccctatcaagaacaccaatgatgctaaatcctgccagatcgtcattccacagaagcaagtcaaccgcaagtcagatatctatgtcttcatgatctcctttgcacataatgtgacagcaaagggcaagtatattgccattgtaagtacaaccttggagaccaaggaaccagagaaagaaatcagactggctttggagctcttggaaccaattgaacaggaatttgtcagcatcagtgacctctttgtgcctaaagatttggggacagatagatcttcatttcccatgcctatgatgctacctcacactttgagacaacctgtgatgacattaaagatatctacaagaggatgacaggatctgagtttgactttgaagaaatgaagcacaagaagaatgacatttatggagaagactaacagcagtacagattatgtaataactaggacaaacttaaaatttagcaaataatgtatattgtatgaaatcaatattgtaagccctgcttttatgatcgaaatggagatagaagagtgctataccagtgaatgctccttcacttttctaatatcacgtattaacttgttttcgtggaattcagaattggttggttctattccgtttaaccagactgcatttttttttctagtgaaggagctattctaaaaaaatattgatatcaatacagagaacttggtacagtacttgtatcttttaatcagtgtggcctttgcgattgtgtgaccttgcccaagagctgaatctatacaatttgtgccatcctgaaattgggagtctaaattgagtgtcctttggtttctgaagaggttcaatgttttctctgttttgttatgtcaagtattacagcaaggccaatagaagagccacatgttttatttctgagggtatataaccttttagccaaacttcagacttagggagttggaggaagccagtatgtggtattttaacctacaacaattgctgagaagggggaaggaaccttaagtaaagcaggtaaaaatatagaagcatcctttatcccagatatggcttcttcaatggaccaactgcaatgcagtattgatttgacagagccttaatttcagtgatgtctactccaaaaagctccaaatgatttctgtactgcagaaataaagccaaactctggaaaccaaaaacacgcatgtggtggacatacttcatacatgcaggcaaaacatttacacatgtaaaaataaatttttttcaaattctaaaaactcaacgacagcaaactccgagaagtggtggctgtttgaggcagaggtgcaagatacaagaacagcacggcaagaccttgtcccgaagaattaagtgggggaggtgctactgcaggctgcaagtaagataaaccaacagcaatttagaaagaaggagcatcgagtataggaaaaaagtggataaaatccaaaactcaacagtggcaaatgccagagcagatgaagtacaatcaaacagatgtgttgtctaactgcttaataaataaatgcataaataactatataagtaaatacataaatgaatacatcaacccatgtttgtagccacctcccagggctgctctcagcctaggtcagcaaagcttcttcctgcagcaggcagcagctaacacagactcataactgctccaagtgtgagcataaatgactgtccagggctcagccctaagcaggtcatctctgtccccacccccaagcctggcagaacactggggaagaggatctggaaagaccttaagagccggaggttgggtgctgtgaaacgctgtgttctggacaggacatggccgctgcactcagggattacagcaggcatggttgagctttacagggatggacccttcatacattccacagcagagggaagcagaggcctgggagacctgaggggccatcggcagttaaaggccaccagaggacacttgttgtggatgaccttgaacttcatctgcctccgttttccctccatcttcgatcctgtaccggtattacatgaatgtgtcaccccactgagatcatgtagtgctggagattggactccgggtctcacacacactagtcaggaattctggtagtagtctgaactacttcccctccctcatcttggttaagacagggacataggcctcactgattagttggagttggctagctggcaggtcccaggggtctctgcttgctcactactggagttacaagtatatgctactatgcctggcttgtgtgggggatgtgtgtgtgtgtgtgtgtgtgtgtgtgtatgtgtgtgtggtatatgagcatgtccgtgtatgcactgggtgtcctggtgtaccactctccaccttattcccttgggaaagagtatctcactgagcttgggctagactggcaacgagaaagcccctgcagtcctcctgtgtccttttcccagagtgcagaattacaggcaaacccaactttttcctcagatgttggggtccaggttggtgtaacaagggctcttatctactgtgtagtcttccaagctccactctcagctttttaacatggggactggggttcaaactcgggtctactgaggggacccaacagagctttccccacagcactaattattctatcacactacatctgtttcaaaaatagtctactcttaaacactgaggtaagctcaaaggcagctccatccgctgtgctggaatgcgctccaagcttggaaggaggcaagctcgggaagcccttaaactggaagaagagcctggattatctggggctcccagcccactcttgggccaaacagagtggtcacttaggaagtctgggactgtggagggaatataagcttcctgctattgtctgtcttcttggccagtatccttggctctgtcctgacatcaacttagatacatagaaaggttttttgaaagaggagtgctaagaattcccatcattgtgcccctgaacattttcaaatgccttccctgaccacatgtgtgctggccttcctgctgctttccggtctgtcagcactgtctagattctgatttcacaaccaggcacgcaggctccagcccagctgctttctcggcctagttctgctgagcttctctgagcacctgagccaagcagggctggtcccaagcaccatcacaggccagcctgtttctgtcacatatcgatgtatctcacatagtcccctctcccctgggcaagggtcatacaatccagtcacatgaagacaagtggccagccaggagggatcaaaagatggcttgcagactcagaagacagcaagatgtggtggcttgtatctgcaatcctacttgggaggctgagacaggattactgtgacttcaagttcagactgtgctacaatatgacagccaaagctgtatagcaagatcctgtcacaagaagcaaaaaactaagccaacccaatccataatgctcaaaacaggatggcaagcccatgggatggcttagctagcaaaggcaaggctggtcacagttgcgctgctgtgggcgagagaacaacttcgtgatgtcagttctttcttttcacttttgcgtggtttctagggatagatcttgcactctcaggcttgcgggccatctcatcaacccttaagcaagtttcctaacagatccatgcctcagcttcttcatctgaaaagggatagttgcgcatgactccctcttggtagtagcagcaaggttcctgcctgaacctagcaggagacactcgctcttaattgatgagttgttttgctttctggcacagacgctgagtaaacattgggaaaatgagcaacagccgcaaacacaagccaagctggtctgtagggaaagggcaaagattcgagtcccgcagtcgtgggacttaaaagctggagctctggacagctgcggacgcgtggggtggggcatgcaaataagccagcgatcaggcaaagtccggaggactgcgggtgaaaatgagctgggtgaggggcggggcatgtaaatgaccgtgcacggggtggggcgtcgcatgtaaataagggacaccaggcggcgtaggaagcggggcgaggtccttctcgcaggaaagccccgcgcggcgcgtggagcctgaactcgcaggtaggaacgggcggtggggaagcctggggaccgggcagtggtggctacagaaccgatctggcctgaaaccagagcccgcggaacctggggtgggcatggggctgctgggctcctcgctcagccagggtcggctgccttcgggcgcgggtcaagcaagtagacaactcacgcgctagaactcagggagcctcggcggtccggtccccacaaagacgtcctagggatctttgtgtagaagcccggactaccaggctcctcccaggttccggttcagtaacccagaaacctgactattgtggcaaactggacgttgtataagccagctagtctgtgattccgtctgcccccaagccagcactcctgggtcctgcccttctccagccctttgggaggtgtgaggctcaatgtggccttccttctacaggtggtcttttgagagtctgggggcatttgctgggacatttgtcccatcctaaagtcttatggggaaactgagacttgagaatatgtttggccagaagagagtaatgggattccacagtcctggtaaggcctctaggaatcagccagggaagtcatgaccgcttaaggggacattgaggcagagaggggaggtgaccactgtgtgtgtgttccccagctcgtctgtgctctgcttgctgttttaggctgtgctctctgactgagggatagacacacaagacagggagtgtattgggcaagcagggcacctcttccttgggcagtacagctcctgagtcagtttggggtgtgggagaacactttggcaggtcgagaatcagagacaagagaaggcatgctgaactgtgggtacagcatgggcaaaaactagaaggtgggacggctccgtgtgccacctcgctgacataagaggggctagatatgtggaaagggagacagcgctgcaggagcccctgaattccttgctttgaggctcagggaagtcgtaggaaggattcgtagtcctggccctgctcctggatcttcagggtaaggatggggaaacccaagtgagtcgcccaaatgatcacacactggtaattgggcaaggttgtgaccatctgagggtttgcagtatttgggctgtgctggggtcttaatacagtgccatcccagactggggagggccaggtggccagggagactgtccctgaggcaggcacaatgactgccacaatcggggatgaaagaagagaatgcttgcattcacccacgccacaccctacttttctgcctttgggggctggggctgggacctagctggggtacacactcacacttggcatgtgtacaaaggagcttgccacggtccccatggcacaggaggcccacatggcaagtgaggcgtggaggttgaaagccagagctcctgaccaagcaaaggcttgatttgttccttgtgtgttccttcatcagagactgacagaggcaggggcaccaccgtgagtgtgcctgccgtgacaggacactgttgggtattcctcgggttgagcctctgagaccagcctggatggagaccagcctagctgtgtatggctggattcccagcttcatgaggcttgcctgggtgggcacagactcacagtgacccagattcagacacccagcatggatcagagtccgttgttccagttctcagaaccagaggcagggaatggggctagaactgaagatgggaggcaggggggcagatctgcgttcggatctgtttggatctcaagaaaaatcactccacatccccacacctcccgtttgtcagaggtatctgggatgaaaatgttcatgaaatggcttttctaaaccattgctcatggacaggcaaggcagttgattgtctcctcccacttaggatggcattgctttgccaagctgcccctagcgcttcttggctctgagggacgaggagtgccaggtgctgtatcaggccaaagatgaggtgtttgacaaagtccttgtagttcagactccctgagaggagaagactctcacaccagattcacagccatgctccgctgtcccgaagagtagacaggggtcatgctgtagaccacccttgctgctgactgaagggtgatgccaacccagatgggtcatgagtagcatcccgtacagtgaggtaagatagtgtgtctaaccttctggggtctcacaggcactactggtcagcgacaggaccaggcaggggaggaacaaaggtcagcaggagcctcttggggtgatgacacagggctccccccgcccagcctgcgttcagtctcttgagcacagtctttctaagaagcgctgatgtcaagcagttctaagtgctgccaccagtgactcacactgccgttggggcccactgcctcttggagatggcgaagcttaaagttgggggcccagctgagggacttcagtttcatgaggttcgtgggaaggtggggggctctgggactgaggccctccagtccccagaagtagttatagaatgaagggcaataatcatgtgtgttgggcgccaaccaataggccggggtcaaaaccctgagtgacacagcagtaaagagccccccctccccctcaggaagtcctgaggaggaggtgactccaaggacttagccttggagttgagaccccaagtagagagagcagatacaaaggctctgggcagagaacaggttccttgtgttttacccacatcaaggaaacagtgggattggttgggactgagggaccagggagggacaggagtagaagtcaggggtgggggtgggggctgacacctgtattatcttagtttgtttaagccctgggaggcaagggctgtaagacactcaagttttctggatgaagtgacatagaagttcagtcacttatttagggtcacatgtcaaacctcccatcttcaccactggttataaagaatgaaattcggtcacaaggtgagctaccacaaggtcacctctttacttgactgtgctctgcccagtaatcttgggaaaactgccaggactccatgcaatcagtttgcaggttattgttaggtgaaccccttccttgcagtttcagagagtaaggaaggtctgaagggaggggaggaaggtcacgtacataagggcccaagcgttggttgggttgagctcctgtccccaaggaagaaaacagactagtgtagagaccagccacgtgacactctgacaccactcacccacacgcttcatttctgcccaagctccccgactgaagaggagagtttaaaagcaccagagtgtcttggttggatccgggaagcattgttcacaggtccattttggagaacttgggctgcctgaggtttcctggagtggccagaggggtgtctgcctttttaaaagaggaagtgaggccttgggaggaggagagcaagggccacggctctcaaccacagagccccagtctcttgcccaattgcctctgggaaaacaaggtcctactgtgtgctcactctggggatgatctctgagactggctttccagggacctcaagctcctggctttagttcagccccctgggaggtaccgactgtccctccactctagtcctcgagttcaggctgttctgctacagtcattctaggcgctccctctacctttggcggcttctgagttcagtctgtcttcagacttgacttgatttggggtcctgttagaaccgagggagactttcgcctccttgtatcattctggagtgcatcgtatctcatgccgttcgtagtcgtagtttgtgagagcagtggttgagctgaagcctgccgtctctctcttcagtgtgtcttcccatctgaaatgtctaggttgaggttacagttgttttcagtcgttcttgttttccagtgtacttttggctaactaagtctgagctggccatcgatctgtcactgccagagatgtgctcatttcttgtgtctgctgcaggagcttttggaagtggtgtgtggttttgaagggttttgaggtgggtggaattttctgttatctctgttgctggattctaactctggctgttcaggctgttgtggtaggcacgtgtggcttctgtctcagtggtagaaaatttattgccctttcaaaaagagtttaacaattggtttggtttggtcttcctggatgtttgttctgatgtatttgaaggatgtgtgtgtgtgtatgcaaacatgcatgtgcaaatccaccttgtatgcacagtcaggcttatcccccagagtttagtctctctacctggcctgacttggggatcctctgtctctgctttcctggtgttgggattataggagggttactccatccacccagccttcacatgggtcctggggcccaaactttagtcctcatgtttgcatctcaagcactttaactaccgagctatctcaagcaccaatgaaatatgcagttgaagttcaccacatatacctgtaatcctagaacttggtaggctgaggcaggaggggcctgagttcaaggccaatgtggatgacgtagcaaataagcctgtgtttttaaaacgtgtgttttctattgagagcgaagccctagaaaactcagctgttggtgtgagccctctaactcaccagctgctttctgtttgtgtgggctctgccccacccccacacagacaccccgactcaacgctctcctttggtgtctctgggtcttgtcctagattttgaagccgagtagtgagacgcacagccagcaggcacaacagaccttggctgtcacctcccctccctctatgtgaatccgcctgagttcctccctgtcacacttgaactgccctattctctgccagtcacacttgcttttcccctggtgacttcgtgtcagtttgcttccagcagactagcactgcattctgctcaggaaccaggattctgagcatgttgctttgctggtcatacagtgggctacggcttgccctgcctgcctgtggtagggatgtagctctgtggtagagcacttatctccagtgtgtgcttatgggcctgggttgggtccctagcatgacaggaaagtaaatgcgatactgaagaagtcaggcattgcaggcatcatagatgtgtccctcctcaggtgtaagctccttggctggtattgcaggcagtgaggctcacacaggccaaggcccgatagtgggaaagcacctggccgggatgaatgttatgagatagcatatgactccagtctggctgcctcctcctgtgtggatatgagacatggaccctgagggaccttccgtggagaattagcacagaactagcaaagctcatcgagtgggagggaaagggctggtgaaactgtggaaggtagactgatgtgggagtggactcgcccagggcggtggagcagcagtggtgaggaggtctgagctggggaaggagagtgggaagtgaaggagacagtgtaggtgacccagcgagccggtctgcccaaggtgtacgtggggacctgataggggaatataggctgacaaggacagaatataggctcctcatctgcccagcgtggaagatggtagtgagggctgtagacattctagaatcttctctggctccttgatgagcaggtgaggaagcatctccaacccacctcccatcccatcaccatggtacccagtattgggccgtggtagtagtcataggaacaaagaggatggactttccccggtggggccagttctggagtggggacccccttgtgccgttcttttcctctttctggggtctcctagcatctcaggtctgctccttcccactggataccagctaatgatggcagccacatggggaccacaagcttaatctaattatttattagttatttctttattgtcgggcataaagtcaggcacaggctaggcaaggttgtttacagatggagagagcaggcaatctcttaggtcagcctggggttctcaggcatggtggggtgactgtggagtgtaagaggcctgtgtaaatgcttgagggacctaggcaacactaaagggacttagggaccccacaggccaagcaccttgctctgtgggctttgtaggctgaccctggagaatcatgtgttattcttcactttgcccatttctatgagataactctaaccatggggtttaggctggccttgaactcctgtctcaggctggcctcgtggctagcttcagggcatccccaccccaacagcctttttgtcagctccctgcaaacaaaaccctggctagtaatgcagcctgcacctccatagcaggccaccccatctccccaggacatggtcctgactgctcaccctgagattcatgccccatcccaggctgtgtgccgtggaattggagatcccgtgcttctaagcccatgtttcacagtgggaaggaagcttgcgcccctgagacttattcctgttgtcatggcaactatccttgtgtatccttgtgggtttttttgtttgtttgtttgttttttgtttttttttatcttagacttttctgagtggatagaagcaagcctttctcactactctgtgaaccctgtcccagaccatggtcagtttccttgttttcttggaactgcccactgaaacaaggaaatctgttcccacttcccagagaaggaaattgcattctgagaggaggacctcagcctgcaggtcttgggctgtcgaggtggagctgcactttttctgagagtcgtgacctatatcttaggtactctggggtccctgcccacttgggaggccctcactgccaaggctcacaacaatacagggtcgagacagcaggaagaatgtagacgagtgccccttgccctcactacatttgtctgtagctggcacccagtgttgactgcggagggtgtcagggaggggcagaaagtcccagtcaccactagacaagtttcctgttgaaggctatgaagacaatggaagagtctgaaccttggttcaaccactccttgaacctctctgccaggcatcagaccaagaattacacaatccaaggcctgggttcagatctcagccacagcagtcaccaacttactgtgcatccttagtcaggttcagaacctctctgggccaggttgctccatctctaaagtggggctgatacacctatattgacaatcttctccattggtgtcagagttcaggggggtccctaagagggagggaagctgtccccacctctcgagaggtgggagaactgggtacgtgcagaagcgatggtgctggcttctgcagatctctggcaggagtctggtggagtccagtccacactagatagtatttaatcagtgctcaggagccttgcatcctgtttctggaacagtaagtaattaccacagcgatgcttgatcacagctggctggcctctgcccaaagccttgctgtaggccagagacagaaagttctaggagaggatggggcatcatgcatcaacgtgtctccatggaaacccttcattcccactccagatgtccagacagggtgatacagcggtgatgcagtggtcgtcctggctgctgtgggctgccgtgcaacagggccagtgtggcacagaggtaccatcggagttcacgaggaaaagggctctgcagggataatcagccagagtaggtgctgagaggagctggacctagatgctctcttgggcttccagaattttccataggctgggcttcagggatcccatggaactacctgaaggcctccctgagggcactgccgccttgtgtgttctcaagtgtcaagtaacacttgcatttggtaactttgtctccacaatggttttccttttcaggggcttggagccctggcccacaaagggagcccaggatacccctgtcccttctgaagaggctctaggcatcacacagcctcctgggctttagcctctctctcaagcaagctcaactgtctccaagccactagaacatcgcccctggggccttggaatagtgtccacagttcatgccattcctgtggctcttcagtggcaaggtgcctgaggacactcatctctgcaccagacatcaggtctgcagagccctgctctttctccagtaccaacagggcctgcttcttccacttctttagagtcctcagtggctccctattgcccccagacagccccagtctctccagactggtagatggtgctgccacctggacttgccaacctctctgttattgccaaccacacccgcatctcagcccagccaagcactcagctgcagacaggaagcatgccaggccctccctactgcctagtgggtcagtgcccttccctcctggcctccttgagagttttcaggctgcatcacgggcgtggaattgcgctgccttcacagagagctgacttggctcacagcaatctgcctgcttctgcttctgaggctggggccgaagccctgtgccaccacagccggcctttgtgttagcgattcccgatggggagggcctcaatcctttgtcccccattctctctttactctagtgtgagcttggagccttttgctggccgtgtgcagtggcctgctacctggcctgacattcatccctggctcctagatcctacacagcatcagccggctatagcatcatccccaaaatctcatgttgacttcaaactctccagtatcttcttgtctccctcgggcacttgttaaaagaatcaaggcttgtagccagctggtggtgcgtgcctgtagctcatcaagagtaagacagaggatcccaattttaagccttgcctgggttacaaaatgaacttcaaagccagactcggtcatgtagtaaggccctgtctcaaaataatacatattcacatacacatgactgggccttagctgagagtgcttgcttagcatgcaccggaccttgggctcagtcccctgtactagagaaagaaagagcaagaaaggatgtgaacagaggtatttacagctgtgggaggtggcacacagtaggtgctttgaagtacttgtgacaagaaagagtacacagaaaggcaggtgacatctatgggcttctctctccactataggagtaggctgtgccagcccctccctggcctgccctgcctccctatctgagctggggctgttgacgtggccaccgtttctgggaaccccagtggctgctgcctaagagcaatgtgtccttggctcccagccagcccagcccagctgtcttgaagacggaaggaagttgcaggcctacttagactggaatctagggtccatcgattcagaagcgaccacaccccgttgacccttgacctttctccctctgcacgtacagcttgtcatatttccatttgccctgtgtttagagtgcatttcaagaagcagcacggtggtcaagcccacagattgtgggtcccatcctagcaatgggaccacagcaggcatccttccaattttgtgcttcagcatccttgtctgtggaaaggcacctgcctcgtagggcatctgcgagttaagccagggtagcagttgccgtcatgtacagctgtgtaggcagaggctcagccaaaggtccgtgcttagattgttgaatttgttcttggctaattttcaccgctcaccctgtaacagatggttactgaacacccactccataatataccaggccgtgttctgggcactagggacaaagtaatgacgagggcagacacgaacctggcttctttaggctaacgctcatgagaacagacccttaactctggtgacaaatgcatgatttaaatgaccagtgccttcttcagggaggcattaagggtctcactgtgttatgctggctgtccttgaatgtagaatccccctgcctccacccccgagatgctgggattacaggcatttaccgccatgcctggccacaggttatcccttacacttccatttcttaaaaaaccaggagcatcctaaaggggttccacgtcttccttctgtcccaacttttttgttaagccattcgtacacttctttttctcaaagcagtggcacgcgggcttgtagggtctttgtgtattaacgctattagccatttgtatgttggttgcttcttctggtcttgtttttattctttccctttgcatggctggggatggaacttagggccctaagttccagcatgagttttaccatcgagccatgtcctcagccccattctttgttcttttcctagtctctctctctctccaccaccagtgctggagccagagacatttttgtttagctcctgagtcagggtggaggctgtgcccagctgaggcaggggtgattgctctggtaacagggccaggagaaccctcagcacatgatgagggccagatgtggctcactggagtgttttggggctgtcaatgagaagggagatggcgtcctggaggcttgtgggtcctcgggagggtgagtggagtcccagaggcgacatcacaggggacttggaatttgttttttctttctctctcaatttaattttatttccaaataattgaggatttagtgcagttttaaaaacaatagagaagtagagaggactccctcagctctagggaggagatttccacccagctttcccccaccacactgctgcccccacctccctgtaccagacatggattgagtccttataactatgtagcaagtgcttttcccactgagcatctcctcagctcctccctgtgttgctttcttacacatttgtagagagttacaggcagggtactggccctggtactggttctcaggtcactcctggcatctccatttccttagagacttgctcatatctaggcttcaggcatgtgggacacaatagagaccaaggacatccctcagcacgggaccccttgtgactccttcaccagcagtcttgggcctcctgcctaccctcatggcccaagcacccaattctaacatatgattttaagagcagtgtgtacagagtcttttaacattcccctgttgcaggtgcctggacatgattctgttagctaggctgctctgaggagctggaggtacgtggccccgggtggagctggtgtggtctgggctgttgagggaagtgatggtacctggcctcattcctcttgtaggaatgactccagccacagagtgtggagggtggcccagtccacatcagcagcccaagacatcttgcagctccagaatgagttttcaaaactgagcctattaaagacccttgatggatgtcattccctataggagggggtctttactactgtgtccacacctgggggtcagaggacccctaaaatggaatggaaaacaaagtgtctgccttgctcacgagggcttggcttgtacccatgctcacatgagtctgtgacccttctgacagtaaggatttgggcttctggaagtcaggggctccaccatgagaacaaattcaaatcccagggccacctatacagctgtgcaacctccggcaagtcactcaacctccctgtgcctttgtcccttcatctgaaaatgagggaactgactgtacctccatgataaagctgggttaagtggtgggaagggacagagggagagatgatcagaagaaaacttagcatggcgttaatagcagtgctagtgaggattgccagagggcagaggtcctccgggacatcaggccaccagagtgttctccaagagatgcacaggttccacttgggcgatgtcaccccctggtcctggggctcggattctgttaataggaccatgaagaccactgttcctaaacaattgctctgccatcagccaccttcttcctccctccctccctccctcccccctccnnnnnnnnnnnnnnnnnnnntctctctctctctctctttcttagtctagaatagagtttattaagggcatggggaaggaagctaagaaggtagtagaggcagagagagagagaagagagaagtagaggggtagaggcaggccatgagcacatgaagagagagggggaagggaatggggagaggggaaggggtgaggggacagagtgggagcaagaaggcaagaaaccaagagagaaacaagagggcaagaggctcgaagccctttcttggccttcccacagcttagccaggcttcagtgcgtcacacaggctgttgacatttgaagttgacaggtacaagggttattttcatggctcattttatttcattgttaggttctggctggacttctcgaagctgaggagaagcagagggacctggcttctgattttggatctgcgtgcttgctggttctggcgcctgctggtcttgttcctgtaacctaggactcggggcttgcacatgctttttttttgaagttgctggagagggagcccaggaccttgtgcaggtgagccaggtatcctgacactgcaggattgttcatggcatgagacactggtggctggaactggatgcgtgtatgactgggtgtccaccttgggcattacttcctctctgcagctctgccgggcccagcctgacagacaggtccacgaagcagaaggaggcagaactccagaggctgaagaacccagctgtagactcacagctgctcggaggcaaaatgggtctgggactgacccatttagatacagcctccagataatgaggggagcgggggactgaggactgacccattgcaggggggtcactgaggactgacccattgctgcagggggggggtactggggtctgacccattgctgcaggggtcactggggattgtcccactgctgcgggtggggcactggggactgacccattgctttgggaaggcacttgggactgacccactgctgttcatagagtagcacacagctccccatttgcagggcttctctctctcccatcctccctcccaatttcttttctttgctttgatcctcttcctcccgaatgctgggggttggaacccaggacctggaacataccaggcaagcctactgaatttgtgtgttcatttaagcttccagaacctctaagatggggctgtcagtggatggccacttagcagacagggaaactgaggccctgggtacagcttgctcaggttcacagctggtatgggagggagccaggatttgaacttgagaaagttatgaatgtatgccacagctctcctgggacaggcgaatagaggtatgctcgcgtgctctgtgtgcagagggcacagagacatgggggagggaggccatgacacaaatgaaatggaccccgctgacccaggatcagcatctgcccactcttctttctgcaggcaccttttgtgtccccaatggggcggctttgcaccaagttcctgacctctgtgggctgtctgattttgctgttggtgactggatctggtaagtcactcattcattcatcaaccactaatgacatgtcaaggtcctgcagtcctcacggaatagaacaaagctcttgtggggattgggggggaggggggaggaagcagccgatgacaaatcaccatgactaagttattttcattgacactaattcaaattggaaattggggctgtccgggaattgagtagaaaataatttgagttatatgccaaaggttatcaaaagatggtgggaaaacgcagctcaggactgagtaagggaggcttgggggaggggtggagagggagagggcattgcactttaaagcagggtgcacagggacactggtgtcaacttagaggaaggcaggggagggcacacagtgtctgtggtgtgtctttggtgaggcccccagggagggcctgcctggcatgggttgggaggacgtgtcgcagggtcattgagtcagaagaccttgcagagtctgatcagaggaattgagtgaaggccagggtcgctcagtgatctggaaagagagtttctagatcaatctagaaggtcagcatgaagacacgtgggaattgacctgaaggtttctcatccatgtggccaggtgtggcttacacctgtcagcctagcacttgggagactgaggcaggaggattgtgagtttgagcccagcctgggctacaagttactgtaaaaaaacaaaacaaaaaaaaaaaacaaaaaaaaaaaaaaaccaaatggacacacaaattctaccccaagcccagacaagggtggattattctgtatgacgggaaaacccagggtagctgttgaaggagagggttcaggaggttagaattttgtttgctgtatgaaaacttcctgcatggtggaccacacccgctggcatgtgtattgtgactttgtctggacagtggccatgtagggcttgggtcaaaaagctcttgagggtcccacactcactggctgttacacacacacacacacacacacacacacacacacatactcacacacacaccacatctgaattcctggcagggagctgatgggtaagtgtctgtcccctcctccttcccttccctctttcctgctcttccattggctaagcctcttgggtaccaaagggtcagagcctgagcctgagccgtacagattgcagagtcaatctcttgcctcagtggagaagggaggtagggaaggagatgtgggagtggggggcgggatggggggtggggcgcggtggacaacactgtaggacactgccccttcctccctgtgctttaacgtggtgcttctgagggagagtggcacctaggtaggtgtgtgcgtgtgcaggcatgtgtgtcatgatcctgatgcactagcctccctctgaccttagtggtgggagcccctgaccatgccaccactgatctggccgttctgtctctgcagggagcatcaaggtcctgggtgagcccacctgcttctctgactacatccgcacttccacgtgtgagtggttcctggatagcgctgtggactgcagttctcagctctgcctacactacaggctgatgttcttcgagttctctgagtaagtggggtagggaggcagcaccccaaggtctgtccaggcctttgctattccaggtgaacgccagtctatgttgtgctgtatgcttgtggcagcttactgagtggtgtctgaggcggagccaggtctgggataatgtatccagcgtgatactacagttgagcagaacttggagcttggtggtgcagatggtgaggtaggaggatcatgagttcaaggcccacctgggcaatttagtgagattctgtctcaaaactaaaaagtgaaaggcctgcgggtgcagctcagtggtagagtgtttgtctgatggatgaccctgcgttctgttaccagccctccaacccctccccacccccactcccaaccccacccccaggatacggaggacactctgagactctggatcactgtccctgtgtcctatggtttcaatgttggactggatcagcatttctctaacttttgcacctaagttagccagggctagagctacatcctgtctcaaagaaatcacaaatacagttggcaagatggctcagacaataaaggcatgtatctgagggcttgagtttaatcctcaagatccacgtgttagacagagagaaccatgcgaccatttgactggtgacccctgagcatgctcaaccatgggacaagactaagtggaatttgtggtgaaggtgccaggttggcgtccagggattgctctggggcattccctggcatctaggtgctctgtgagtactgtgcctagggcaaaaccaagtctgcagatccagtgctcaggagcatccagagatgcacaacactgccctaatgcctgtggggtggtcctccatcctcctattgcctcaagacaagtgagcgggacttttgcacattggcacagaccaggcactgacaaattgtggacctcacgtcaactagccactacttgttttgtgtgtgtgtgtgtgtgtgtgtgtgtgtgtgtgtgtgtgtgtgtgtttgtgtgtgtgtgtgtgtgttttgttttgttttgttaagataaggtctctctacgtagccctggttgtcttgaaacatgctatgtagaccagactgggctcacactcacagagatctgcctacctctgcctgtgctggaataaaagatgtgcccaaccacagcaggcagactactgcttttatgaataacattttattagcatacgccattgcattcatttatgtcttgtctatggctgctttggagctacatccgcagtttgttgtagacagaaactatatttttgtcaaaagccttcagcttcctatctggcattttatagaaatggagctttggcccttggtgtggtctgtgagttgtgggtggcctgtctaagtggtcctttggcaaaattatatcctgatgtgtacagggcaggagcctgtgggggaagtgtgctagggcttatcacagtcccctgtaaaccaagggatgctggaacaccatgaattactttatgctccatcctggggtgaactaagtcatgggtctgagaaccacagccagaatagcagtgtccagaatgaagtaggcaaggtctgtggccagcgagatgctaaccaagtcatttcctctcgtggtcctgattgctttggtcttcctgtcaggtcgggggtaacctgggaagttgtgggggtcccaggggagtcggtaactatgggtggtcgttctgtaacagagtttctatgtctgcagaaacctcacatgcatcccgaggaacagtgccagcactgtgtgtgtgtgccacatggaaatgaataggccggtccaatcagacagataccagatggaactgtgggctgagcacagacagctgtggcagggctccttcagccccagtggtaatggtaagacttgcctgggtgctccagtgcgggaggtggggtacacattgactgcaggtcagctgctggtttgtcatatgcccttactctacctggagtccctgcaccggtctctaccacaaacttgctccacatagctttgttttgttttgtgtttttgtttgtttgtttgtttgtttgtattattgaggacggaacccaggactccccagatgctaggcaaatgctctaccactgagccaaatctccatgcaagtgtagtgataacaggagttgaaagcaagaatttgttgctctgtgaccaagggcaaatcgcattcctcatctgaacatcagtttccaaaagaaactgattattcttattttgtagatcagagaaggcaagcagtttgcctcaagtcacacagcttctcagtgccagaggcagaattgaagaccacatatctgagacaagagctcatggttttcggtctgtggttagaactgctgctcaggccactgggcacctacaagatactagaattaacccttgaatgagtttaaagtcatcgtcacattgaccttaacgtacactctgctatcgtggtctcatgtgtatgattgcctcagaagtgatgagcccggtgagtcggcacactcctggaatcccagcattcaggagtctaggaaggagggtcaggagttcaaggaggtgaagttgttaatagggacatcaaagcaaaacagatctcagggatcaagcctctcacccaggtgcccttcctccccagtgaagcccctagctccagacaacctcacactccacaccaatgtgtccgacgaatggctgctgacctggaataacctgtacccatcgaacaacttactgtacaaagacctcatctccatggtcaacatctccagagaggacaaccctgcagaagtgagtgggcgccacggatccctgcccttgcctgggcacaggctgggaaggatgctccgtctttggagtagggtgcttgggagggggtatagtgaactagagagctcactctcggccaggctctgccccaggcatgtccgtccccttcctggccctgaatttgcagtgtgtagctgtgttggccagtgttctgtagcttagacaaagtgccgagaaaaatcagcggtaggaggaaacgtctacttgaatgcctggtttcctagagatcagtctgtggtctcatggccccattactctgggtatagtgttgaggccaagcgtcgtagcagaagcatggtggagcagagctgctcagctcatggtggccaggaagcagacacagacagatagacagacagacaggcacacacgagcatatgtccactttcgtaatattccctgagaacattctcctgactccctgtccacacactaggttccgccatttcacagtagctccactctaggaagcaagcctttaccacatggacctgagggaacagtctgagtccagaccacagcatcaggaagaagactcatccctgccatcttaactcagaaagggggcttttgggccacacctgcttcccagccagagacacatgagattatgtgtggcagagtagtcacttcactcttggtcacatttgctattgtgtgttgttcatggcgacccgtcgtaagtgcatagataggagtagaattgagctgggtttagtggcccatgcctgcaatcacagctctcaagagattgaggcagggggatgggaagttcttgactagcctgggttacatagaccctttcaaacaacaacaataacaaacaaaatccttctaccttccttccccccccaaaaaataatttctacacagcaggtgtcatcagatagacgaagtcaggtgccgatagtggctgcctggtccctgctttagaaacaggcagaggtcatttcctgctatgcttgtcttcctcccctccttcctagcattccctctgctgggatgaccgggaaccagagtgacccctctgaggtcacttactcaatctcacacagcgtagtcttactttatgatatgttcaaacccagcttaacccacttgtccagataatagttgctaccagtcattggagaagtcaggggagggctgacaacctccatctcattctccccttagcagtggcagggatgtgggaatgatcccatttccagcactgagggagtacccagggcagcagccaggctgggaaccgacacacgtgtctgccagctctgtattcatatgtccctgtcttccttcagttcatagtctataatgtgacctacaaggaacccaggctgagcttcccgatcaacatcctgatgtcaggggtctactatacggcgcgtgtgagggtcagatcccagatactcactggcacctggagtgagtggagtcctagcatcacgtggtacaaccgtgagtatcagggtcgtaggctgtgaggatctctacagccgtgtatattctctgttcagaaattccctctggctgaccgtggcgttttccgttctaggatgcctctaactatacatccctgtggctgtggtgtggtgatccgagggctgcactaacacacagatttctgtggttgtcactgttcagggccacagaatgactgagtcttctttctatacagtatgcagtagctggatagtcaggactggggaaggttgtgtgaggttgactcggtggtaccgctgaggaggaaaagggcttgtccagagcaggcgtgatgtacagcgcacattgtttttttcagcaagtaatgaaaatctgtgactgagtgaccttgggggctgcggtggtgaggagagctcacgggaatcctggagcagtgtagctggcgtgtcaaaagcagaaacgcaggagatgggtcagtgcgccgaggcccggagtttaaatccccagagcccacgtaaaagccttgcgcagtagcacgcatgcgtaatcctgatggagcaattaggagaagccggtggccggctagcctgtgcagactgtgaaaacagagcatctgaagctgtgtgaaaggctagctcgcctgtgctcctcagatcctgacatacgccatctcgagcaaaagattaacaatcgattaaaacccacacatgaaaacaaagaaaccagttagctccagataaaagcaaatgccaggaaggaaaggaggcagagggcaggggtggaggagcaggtgggagaggatgacgtcagagaaatctcagtggccgtgaacaaggaagatattccagggcttgttctgaatgtgtgatcttttaaaccatgtggccctcttagcctgtgagaaaagtccatttctagccctgctgaacagagaagcccaggggagcaaccaactggccttcggtcactcagcaaggacctagtagaggctggctttgaacttgagccctccagggcacttgacctctgagctttgggaaaacaagcgaggcagcttcacgctgttgtgatctggacttggatcagggccagtgaggacagggacagggatgggtgtgataaggacttggtgtgtaagagggagagttggggagacaggtgggagggctatctgtagccaggtaaccaagggtcccaggggaacccccagtgtggacgcggactgcacatgacacagggcggcctccccattcatgactgtttttctccttgcagacttccagctgcccctgatacagcgccttccactgggggtcaccatctcctgcctctgcatcccgttgttttgcctgttctgttacttcagcattaccaagtgagttcctgctttggctggtgtctctggctggcccttcagcagtgctctcagaggtcacagtcattgtgctggctgagaaaaggctggaagtctgcctcgaagggcagggcagggcagcctgtggctggaggcttctccacagtggctgtgctctggaataaagagagctaggttgggggacagtaatggtggctgctctggagagaaggagctggcttggggctagggaggggttgtttggggcatagagaagatgggagctctgtccctctcaatgcccatggtatggtcccggcactgggcatgtggtaggagcagaggaatttgagcagatgctgtgaatatagtagggtttgagtgagacccggaagtggcgcttgctggcaggtagctggtcagctacctgggctcctctgtgggctcagagtgaccatgagaacaagacctccagaggagtctgggcagagccggtagagggggaagattcacttctggtgagttctaccttggagtctcagacccagagccatgttcttttagaagtgagattagaagtcacttcgaattagggctgtgcaggtacccggtacccgccgcctggctaagtgcagggagtgccagagcctctcctctccgtggcttgccactcataacctcgtcagtcacccggggctaggcactgctgttctgatgcagagtttctctgtgtcctgttgcccttcccttctcccacgtgatgcccctgcaccccgcagcccgcagttctcaaaggcacatggcacgttcttccatagagtcttagccatgcccccaccctaaacgttctgccccttcacttttctgggctgttccctgcaacccccaactctgcttctctctcctaccttcctctcttatacattgtggtcttcttgtttgtctttttaattgttttgaaacccagggtcttacacatgccaccctatctctgagctccactctagcctcctgcttacttttgcttggagacagggtcttgccaagttacctaggctggtctccaactctcctcagctcaggaaggtctggcactttgactcttcctgccctgtctcctgagtggcagggatgatttccggtcaccatccctggctgtggtttttgctcatcagcacttatggtggtgaatgagtgtcatgtgatcatgcctgcatttgcttcttgtttctcttgaaggcgacccacaggggcttctccactggctgtttttctggcttagtccctgtggccctagtaccttgatgctcagaaaatactatgggaagacggaagagtgaaagtcataggggccagttagcccaggaagaaaggaaatgcccgcttccacacggcccctgacctctcaagcctgttaaagccagcatggtcaaaagggacttttgagggagcgggatccttgctgtatagcttgaggctttggtagtgtggataggtcaagcagccctgccagcatcaggctctccctgggcacctctcccaattcagaatggtagtggtgatggacagttaggaccaagattgttccatatccaaaatgggatcagtgtggccttcgtgccctgggaggagtgacggccaggacacttggaagagcaccttggccactgtacattcggagaccaacctacttcctttccaccctcaggattaagaagatatggtgggaccagattcccaccccagcacgcagtcccttggtggccatcatcattcaggatgcacaggtaagagggtacaggcgttgcatagtgtgactcccagccatgggtagggtgggtgggtgcgaggagcaaacggccaggggtaagcagggtggtgcacgggtggtaacaaagcccatgcccacatctgtgtgggcttggtattattcctgccatgttctgctagtcacagtgaagtcctgtgtccagatcagagagtccaagatggcaccggcaagctggagcatctgagggcatttgctatctctgatgccctttcactggtgtggggggcagggagggcagaggctgagactcccagagctctgtggggcctgtgtggatctcagctctctaggcatggttgctgtctgtgaaaacactgagccttctgtgactgggttgtgctggcaccccccacccccactgattggctgtctattttaggtgcccctctgggataagcagacccgaagccaggagtcaaccaagtacccgtatgtatctgaacttgaacttgggtcatagtttttgtgggtttgtgtgagaatgtgatagttactcggctggtggcaatcaattccccttccttgccccccccccccacacacaattgccttctctcttcctggccccaaggggggagaagggggcaatcatgggtggctgagtctccattctgcagcaagaacaggctaagtgttgattttaagagtcagaaccacatctataacaccccaatatcaatacagggtgattccgtgtgggattctaaaggatgaatagttttttaaatgtggcaaaacttaaccctcagctttacctctgcaggcactggaaaacttgtctagacaagctgctgccttgcttgctgaagcacagagtaaagaagaagacagacttcccgaaggctgccccaaccaagtctctccagagtcctggaaaggcaggctggtgtcccatggaggtcagcaggaccgtcctctggccagagaatgttagtgtcagtgtggtgcgctgtatggagctgtttgaggccccagtacagaatgtggaggaggaagaagatgagatagtcaaagaggacctgagcatgtcacctgagaacagcggaggctgcggcttccaggagagccaggcagacatcatggctcggctcactgagaacctgttttccgacttgttggaggctgagaatgggggccttggccagtcagccttggcagagtcatgctcccctctgccttcaggaagtgggcaggcttctgtatcctgggcctgcctccccatggggcccagtgaggaggccacatgccaggtcacagagcagccttcacacccaggccctctttcaggcagcccagcccagagtgcacctactctggcttgcacgcaggtcccacttgtccttgcagacaatcctgcctaccggagttttagtgactgctgtagcccggccccaaatcctggagagctggctccagagcagcagcaggctgatcatctggaagaagaggagcctccaagcccggctgacccccattcttcagggccaccaatgcagccagtggagagctgggagcagatccttcacatgagtgtcctgcagcatggggcagctgctggctccaccccagcccctgccggtggctaccaggagtttgtgcaggcagtgaagcagggtgccgcccaggatcctggggtgcctggtgtcaggccttctggagaccccggttacaaggccttctcgagcctgctcagcagcaatggcatccgcggggacacagcagcagcggggactgacgatgggcatggaggctacaagcccttccagaatcctgttcctaaccagtcccctagctccgtgcccttatttactttcggactagacacggagctgtcacccagtcctctgaactcagacccacccaaaagccccccagaatgccttggtctggagctggggctcaaaggaggtgactgggtgaaggcccctcctcctgcagatcaggtgcccaagccctttggggatgacctgggctttggtattgtgtactcgtccctcacttgccacttgtgtggccacctgaagcaacaccacagccaggaggaaggtggccagagccccatcgttgctagccctggctgtggctgctgctacgatgacagatcaccatccctggggagcctctcgggggccttggaaagctgtcctgagggaataccaccagaagccaacctcatgtcagcacccaagacaccctcaaacttgtcaggggagggcaagggccctggtcactctcctgttcccagccagacgaccgaggtgcctgtgggcgccctgggcattgctgtttcttaggtgagtgagtgtgctgttgttgctgaggtctgtgctgaggccagggttcctccaagccagggaagtacttcctgggagacagcccagctggcaggtttcccagaaatccagagaatggtgaattgaagatgtaaacttggcctgaccctggacgctcggagcctggctgtctcctcttccactggcctgggctctcctccctcccaagggatacaggggctcactgtgcttggtcccacagcagtgctgacgttcctaagtcctgggctttcctagctgatgttgtcctacctactcagtcccattttgtccaccgaatagacctgtcactcaaggctctcagcggtcctgccatagctgctggacgctcccagctggaagctgggcctagaaactcacagatggcctggcagtggcatgggaggccctaaaaattagtggaaattttgagagaggacaggtattgccccacagaggccattcattgaacagccaggactgggactagaggcagagcctgctgtcctccgctcagttgtagaaagcaacaaggacacaaacttgattgcccaaagtcactgccagttacccacatatgaccagaagccagggctcctgggatgtggaagataaacaaacacagttgccgggtggcagggcccagcgggcacgataactggcagtcaaggcgatacctcgagggaactgtggggctggtcctggttggtggtcaggtggtagggatagcagatggcagactttggtgagtgagtgagtctgactgtgttctggaagatgggaccgggctcagcactgtctgctcacgtccccactgttgcaacacctagtctgtttgcaaggaggacaggacaggtcacatggagctttatgtcaataaagtctttatcttgtcaggtttcctttactatacacacgccgagcccacagtgcacgaaagctgaaatgtgcaggcagggggttggggaagtggggagacaaggccccagcagttggtttaagggaatgacttgggaatggggcagagctgtggctactccatctctcatccttaccctcctgctaccacagcttgtgcccatgtgtgcctgctcaggggaggggtcctcctctttccctctcctttaggcagagtgctagaggtgttggatgctccttagcacgcagagggcgtgacactggctgctaagtgttgttgaatgtgtcaaggcattgacatcagtaggccccacatcttaggcaggggatttggggtgtggcaacctgccaggccagcagagaacttgaatatgatgttcagaaggaaagacagagacaggtcacttagggaggcttgaaggaggccacttttgagatgagcccgtggtatctgcaaaaaagcctggaagaactcagaacatgcagcagatggctcatgtctgaagtttgaggcacagggatctggtgtggtcacagcatcagagagaagggtcctggcatgatggggactggtgtgcagttggatactggtattctgccttagttctgcctcttgagaggtggtccagtagaagccagcctcagactttcacatctcagaacagtcttttcaaagacaaggtctcagtgtggctcagacgggcctctagcatcactcggtctcctgagtgctgggatcacaggtgtgtgctactacacccagcttcccagagcagtcttaccacagcccctaagcaggggaggagaggaaacggagccatccaagatctacctcctgtgggcatccctcctgcctggctgaaggagaagtctgggtttaaaatccccattgctcagatttgtatcctggagggaagtgactcccacaggaatgaactgactgtcccaggaaattcttcccgctgtgcctttagaacttcctctgtaaagtacctcccttcagctggtggtgcctgtctttaacagtggctgacagccagggagtttgaggctagcctaggctttgacagtgagatcctgttcaataaacgcagcttcccagtccggcacttgaccttcaagctctgacctctggattagcccaggatttcttcactggtcctccaccttccacccccttccactgcttatacccgctcccatcatttccaacccaggaagctgctaagatctatgtggtagccctggctccattaccaccctctccccatctcctgggtgactgagggaactaaggtacaagcccgaggaacttgggattccctgccctgctgttaccttgcctcctgtctgccatcattaacataggaggtgccagcctgtgccgtcctggctcccatactcactacctaaggctacctgttgggaattccaaccctcaccagtcccatctcttcattctattaaaattacttatcaagcaacttctctcagagagacaattattaaattttctcagatcgtgagcacaaatcaaaattttatttcgaatttgcagaataagaatcaggactcatggagaaatgtatgtgctagttatatttcgcaactggtgaaagacccagagaatcagcctataggacagacctgttttggctcatagttcagtgtattccttccaccatggtggggatagcatggtggcctcagtggctctctgctggggaaagaacttgcactggggtttgtccgtaccctagtgaaaggaactggaggtggccatcgccttcaaggcccactggtgtcactcttctgctagaaaggcccagtgtccaaaaggttccaccatgtcctggaacaatgtcaccacctgggaaccaggtgttcaaaacacgagctgtgggtgcacattttatagccaaaccataggacactggctcaaagctcaatccgaggaaggagctttgtaagcaagtgactgtgtacaacggctctgccccacagagccgtgtgctgagatagaagctgccgagactgcttcctgtgctctcaccctgtaccacgcacaagtgagttataaagaaaagaggcttttttcagttcataattctgaggtcaggaggtggaatctagagatggccttgctgatggagccctcaggggagtcagggcaccccataggagaacatgtgtgtgtgctcatgtatgtgtgtggtgtgtgtgtgtgctcatgtatatgtgtgatatgtgtatgcctgtgtatgtatgtggtgtgagtgtgtgttcatgtatgtgtgtggtgtatgtgtgcttgtgtgtgtgtgtgtgtatgtgcaagcacactcgtgtatgcatgtggtgagtatgtgtgtgctcatgtatgtgtgtggtgtgagtgtgtgttcatgtatgtgtgtgtgtacaagcatgctcatgtatgcatatggtaagtgtgtgtgtgctcatgtatatgtgtgatgtgtgtgtgcttgtatatgtgtgtggtgtgtgtgtgttcatgtatgtgtgtggtgtgagtgtgtgcttctattatgtgtggggtttgtgtgtggcatgagtatatgtgtgtgtgctcgagtatgtgtgtggtgtttgtatatgtgtgtgttcatgtatgtgtgtatatgcatgtgtacttgtatatgtgtgtggtgtgagcgtgagtctggtttctgtgtatagtccttatgattccagggcctgctctaatgagtttacctaaccctgatcccctcccaaaggcctctctaaataccacagtgactaatttcctcctcttaatccctctccacaagcattcacatccagtcaagtttcccagggggacacaccagattcaaaccacacaggaaatgcttcccagtacttagccaggttccttggaatgcagctggtttgactgaggagttgaaattttcacttaaaatgaacaattttatttaagtttattggcatctaagctttgtttctgtgtgtttttgtcaacagcctccactaagagaggacagggaaagatctagaaaaatgaaaaaagaaaggacccaagggttggtgtgatgtctgtagagggttcctgcgcgtggcgggcgcagccaccaaggtgttgtgagctgggattttcccagcagcccccgctgtgctggatgccctggaagccacgatgatgctttaacttggtggaagaaaacgctgtttgcgcttattctggttccggcctcgtgggctgccgcggagcgcgcgtagcctgttcaactttcctgacataaatttcccacttaagtcattaagtcaaaaccaaaaaaaaaaatcccagaccacagggcacggttctgttcaccgcgggtgcactgcgcgctgtgggttcacagcgccggtgacgtcgcggatttgcggtgataccacactgagctcaagagacgtcagtgtccgtgggaccgtggacatggcgtgacaccactctggggtgaaacgcgggaaaaatgaaggcaggagcaagtgatgcccagcaactcctgtgtccagagggaggggaagggaagggccgtgcctcagtccctgctgccccctggtggcccgcactgtctcagcaccagcctgcgttcctggaactccccaactgcggcccaagtaggtgcagcccagcttctgcttgtctctgacaatgctcctgctctggagaacagcacagacattcaggataccctaaacccaactgtctggcaccgggccagtctgcaacttatctgagctcacatatgcatctgtaattgacacctgtctcacgagcccgtggtgagaattaaatacatcaccacttcagtgagcccctggagtggctcttgcacacaaaactctttaaaagcatctgctaagcttattcttgatgtccgactgagtgcgtctgggcagtgcgggagttgagcagtaaattatgctcaaggaaaatggcacccttaatcccaaagacagcacaagtccaggataaaatgtgccccgctgtcaccaccctgtgtctgcacatgtccccatctcgccataggctatgtgcagagtgactcttggctgtttttcctttacagtgctggggtcatgagcagaggtcctcacagcaggcaagaactccactgcagaaccaccccaatccctctgccattacatagcaccaacttctcataggtccaggtcctctgtcccagctccttccatgcagacccagatccaggccctcatatagagcaccactctgtaatgttatgactttgtggtctgggcacacatctgtattgcacactgtcctttgtgtctgtcccttgggcctctgatgagttctggctactctgacttaccctccttgctacagttctgccatgatttccagctgaccaccgaggcccaagtcactctacatggttttttgtcctttgctaccatgggaccacaggccacactgacagtcctccctaatcaggaaaagcagcaggagaaagtcctttgccgttttctttccactctgcgtgtaatgtatggtgctttgtcgtccacactgtggtcatgaagagacagtatcgagatggaagataaaggcaaatgaggtgcggcagagagggaaaagtcctcgaacgcatcatctaatcgtcaaaccctgcctcctgagtctaaagccatgtgcttttgtttaaacagaaattcctttgcaaaggtaacccaatcttcagtgttgtagcggatggaacaaggaactctgaagctaccttcaactaggcatgccctagttcctggaacctgtgcacatgtttatactttcagggaagcaatgaatgttacagtcagaataaaaattacagtaccaacccaggggcctccttcttccctgcagccacagggtggggaggggggagggaaggggatgtggtccacttcagtctcttcctcctcctttggatttctccttcctctttcttcttttacgcccccatcctcttcctcttctttcccctcttcctcctctcttcctttctcttctgccacctcttcgcccactaagttaattacaatcctttctaaatctggtcctacagagacaggcaccgtgacttgtaaatgaatgacggatggactgatgtctcccactgtctcttctcagtgcccttgtgtaaaccccagagccacccacagcatctgttgggcatcttcacagccagtgttcagccatgtcagcagcccagctggcacaaggctcatggcacatggacaaccacaattatgggcactatggacccttcctccttctcttccagtgggtcttctcctccaaggtgggctgcagtgctgagacttctgactatggccacactgccacagaatcgtggagcccagaaccatggagcctgacacatagtagctgctcaccaaaactgtcttgaagcagaactgggcctctggtggagtgagtgcagaactcaccgtggctctctggctctctctccttgagccctctctcagttctcctctgctgatcatccacagggtggtacagcagcccacagcagggagtgtgggtttctgtttcagttgtctgcacttccctccgatttatggtaaagataccatttttccatcttggggagatgaagtttcttttgaaaataaagttaattaaataaaacactcaaaacttttttttttttaggcctagagactaataacaggaaaagtataacaagggggttaggaaacagctctttgggcaaagtgcttgctaaacaagccagagaacctgacttcagatcctcagggcccatgtagaactccagatggcaccacgcacctgtgaccccagtatgagggaagcagcaacaggaagatcccggggccaccgacagctgggtttggagccagtaagctccaggttcaataagagatcctgcctccaaaggtcaggtgcagagccattgaaaaagacaatattgacctctggccttcacaggaatatacaggggcacccacacatgtgagtacacacaagaacacccatgatcgcgtgcacacacacagggaaaggagagggatggagagagagcacgcacacagatacggcatgcagctgtgcacacaggaagcaatccacagccaggtctccccacaccaagaccccactccctcactgctcaccacttcctactctgtgacctgtgaactcttacagccttagctagtgtgaccctgccacattatgcagggttagaccctggcctccctggtgggcctccctctgtccagcctccccacgtctccagtggcccctgcttcacaggaccctaccctagcacatcacagtctgtcctcttgatagagtggcctccttggggaccagcttgtaactcccagttcacaggcttctgtgggcctgatgaaaccccccccccccccccaacgctcctgcatgtgtctcatgctcagccaatcagagaattcccttctctacctggtacagtggtagctttgtacagggagtcatgtggttaaagttgaccattgagagcattcccagaactagtactggacttactgggtgctttctttgggctccacaggcttgtaggtgacaaacctagtcttctgacactcctacaaccaccactttctgttcctatcgaagctcaactgtctatgcgaatgaaagaagtcccagaacgcaagccttctactttgaaggaattcatccccttgacccacacatgcataaaaccaaccttttaaaacaagccagtaaacgtacttaattttatcttggttcagggtcttaccatggagccaggttgtgctggaagcatgctcttgctcctgcctcccaaatcctgggattgcagatgtgcatcagaattcaccttgaaaagccagttctgaacccagggaggtggctcagttgagaaggtgcttgcttgcttgccatgcgtaaggactgcatgattcattcattttacccatgtaaaaatccagggtgggggtggggagtgacaggcagatgcgtgtgcctatgcatgtgtctgtgtgcacgtgctcaatagttagccttcctagccaaatggatgagttccaggttcagtaagagactctgtcaatcaatcaatcaatcaatcaatcaatcaatcaatcaagtggagaataactgatgaagacatctactatcaatccttggtctttgacctgtgcacacacatttgaacaccagcatatacctacacatgtacacacacacacacacacacacacacacacagagtagttatgttctttgtagccacaggactgattgaagcagagattagtcttctggggaagggacacaaaagcctcaagttccctacgtagccaaggacaaccttgaacttgatcctggtgctccatctcctgagtgctttgagtatagacagtgtggccttggtgggtttatgaggtcctggggacctactactacctgtagtagtttggagacaaaaaggctatttggcttatacctccacatcacagttcatcaccaagggaagccagggcaggaactcagggcaggaatctggaggcaggaactgaagccaaagtcatggaggagactcttcctggcttgctcctcatggcttgcttagactgctttctctttcaactcagaaccacccacccaggggtggtaccacctacagtgggctgagctctcccacatcaaccactaatcaagaacttgctacacaacatacctatagggcagcctgatggaggtgattcctcagctgagggtccgtcttcccaagtaattcctgtcacattaacaaaacaaacaaacaaacaaagaaacaacccagagcctcatgaaattatcattcattaagattgaattcatgtaacagaaaatgtaccattttaaccattaaaaatatagattccagggtggtcacatggctcagtcagtaaagtgctgactgaaggggtctgaagacctgaggtcttgtcccctacacccatgcaaaaatatctggatacagtggcaggcccctttaacccagactctggggatgcagagacagggggcttcctggtactcacttggccggccagtttaattgaactgggaagctccgggttcagtggatataaggtggagagggacaaagaaaacatcaacattaaccttaggcttccacatgcacacacgcgcgcgcacacacacacacacacacacacacacacacacacgcacgcacacatgcacgtgcacacagacacatgcataggcacacgcatgcacacacatacatgcacacatacacacacacatgcacgtgcacacagacacatgcataggcacacacacgcatgcatgcatgcatgcacacacacacgcacgcacacacatgcacacgcacacatgcacacgcgcttgcacacatgcatgcacacacaatgcacgcatgcatacgcacgcatatacacacacgcatgcacacatgcatgcacacacacgcatgcacacatgcatacgcacgcatgtacacacacgcatgcacacacacgcatgcacacacacgcatgcacacacgtgcatgcacacacgcatgcacacgcatgcatgcacacacacacatgcacgtgcacacagacacatgcatagtcacacacatgcacacacacgcatgcacacgcacgcatgcacacacacacgccatctagcaggatttagtatacttaccctgaacttcccatcgctgtagaactctgggacaactcctcctcggcagctcctccagatgcaccactgcccacccacacccagcacccaaagcatcgccctctcagcctcagcctccatggtttttccatctgaggctttgaaaacagaatttttctctccatgctcacatccatcttttatcatttattaattatttgcttctttgcttgagaaggggtctcgctgtgttgtccaggctactctgaggccctctctttttaatataccatttgtatgaactctttgagactatcacgcatgcatacccacagtacattttgatcctattcatcctcaacttctccccctgactcccctcagatttacccctcacccaaacccactgtttgttgattggctgattgatttacattgttggtaagccatccttattagacaacacttggattgtgtgtgaaggactgtgatggggaggagcagaagggactttagtggaaccgatcacgttccacattaacaattaattaaatgcagagctaaattgacagttgcatgccatgggtgtgggtaccccgtaaaaccatctacaggttgaatctgcttcagacacttcaaggcaaaggagtgggcagacaaaacagagcaggtatgtgcgcattggctttctcatgagactaacgacatttgacgtgagtgggtccttgcaaagcctgatgagcggctctggctcctttaaggactccacagaggctgctgggcagcccagggggaatggggcttgcttccaagcctggcaacctgggacccaaatggtggaaggtgagaaccaacccccacaagttgttctctggcttacacacacacacacacacacacacatacacacacacacacacacacacactcacacacacacacacactcacacactctcacacacacactcacactcacacacactcacacacacactcacactcacacacactcacacacacactcacacactcacacacacacacacacacacacacacacacacacacatacacacacctaactggaaatggttcatgtgggacacatgcttcttcctgggactgtgacaatggtcttgtggcctttcagctcaaatgtcaccaccatcaggaggctcctaggccttggtgcaatgtctcttttctgggtcttccaagcctgcgcttctttgtta

SEQ ID NO: 519 - DNA, 3696 bp, Mus musculus
cgcaggaaagccccgcgcggcgcgtggagcctgaactcgcaggttctggctggacttctcgaagctgaggagaagcagagggacctggcttctgattttggatctgcgtgcttgctggttctggcgcctgctggtcttgttcctgtaacctaggactcggggcttgcacatgctttttttttgaagttgctggagagggagcccaggaccttgtgcaggcaccttttgtgtccccaatggggcggctttgcaccaagttcctgacctctgtgggctgtctgattttgctgttggtgactggatctgggagcatcaaggtcctgggtgagcccacctgcttctctgactacatccgcacttccacgtgtgagtggttcctggatagcgctgtggactgcagttctcagctctgcctacactacaggctgatgttcttcgagttctctgaaaacctcacatgcatcccgaggaacagtgccagcactgtgtgtgtgtgccacatggaaatgaataggccggtccaatcagacagataccagatggaactgtgggctgagcacagacagctgtggcagggctccttcagccccagtggtaatgtgaagcccctagctccagacaacctcacactccacaccaatgtgtccgacgaatggctgctgacctggaataacctgtacccatcgaacaacttactgtacaaagacctcatctccatggtcaacatctccagagaggacaaccctgcagaattcatagtctataatgtgacctacaaggaacccaggctgagcttcccgatcaacatcctgatgtcaggggtctactatacggcgcgtgtgagggtcagatcccagatactcactggcacctggagtgagtggagtcctagcatcacgtggtacaacccaagtaatgaaaatctgtgactgagtgaccttgggggctgcggtggtgaggagagctcacgggaatcctggagcagtgtagctggcgtgtcaaaagcagaaacgcaggagatggacttccagctgcccctgatacagcgccttccactgggggtcaccatctcctgcctctgcatcccgttgttttgcctgttctgttacttcagcattaccaagattaagaagatatggtgggaccagattcccaccccagcacgcagtcccttggtggccatcatcattcaggatgcacaggtgcccctctgggataagcagacccgaagccaggagtcaaccaagtacccgcactggaaaacttgtctagacaagctgctgccttgcttgctgaagcacagagtaaagaagaagacagacttcccgaaggctgccccaaccaagtctctccagagtcctggaaaggcaggctggtgtcccatggaggtcagcaggaccgtcctctggccagagaatgttagtgtcagtgtggtgcgctgtatggagctgtttgaggccccagtacagaatgtggaggaggaagaagatgagatagtcaaagaggacctgagcatgtcacctgagaacagcggaggctgcggcttccaggagagccaggcagacatcatggctcggctcactgagaacctgttttccgacttgttggaggctgagaatgggggccttggccagtcagccttggcagagtcatgctcccctctgccttcaggaagtgggcaggcttctgtatcctgggcctgcctccccatggggcccagtgaggaggccacatgccaggtcacagagcagccttcacacccaggccctctttcaggcagcccagcccagagtgcacctactctggcttgcacgcaggtcccacttgtccttgcagacaatcctgcctaccggagttttagtgactgctgtagcccggccccaaatcctggagagctggctccagagcagcagcaggctgatcatctggaagaagaggagcctccaagcccggctgacccccattcttcagggccaccaatgcagccagtggagagctgggagcagatccttcacatgagtgtcctgcagcatggggcagctgctggctccaccccagcccctgccggtggctaccaggagtttgtgcaggcagtgaagcagggtgccgcccaggatcctggggtgcctggtgtcaggccttctggagaccccggttacaaggccttctcgagcctgctcagcagcaatggcatccgcggggacacagcagcagcggggactgacgatgggcatggaggctacaagcccttccagaatcctgttcctaaccagtcccctagctccgtgcccttatttactttcggactagacacggagctgtcacccagtcctctgaactcagacccacccaaaagccccccagaatgccttggtctggagctggggctcaaaggaggtgactgggtgaaggcccctcctcctgcagatcaggtgcccaagccctttggggatgacctgggctttggtattgtgtactcgtccctcacttgccacttgtgtggccacctgaagcaacaccacagccaggaggaaggtggccagagccccatcgttgctagccctggctgtggctgctgctacgatgacagatcaccatccctggggagcctctcgggggccttggaaagctgtcctgagggaataccaccagaagccaacctcatgtcagcacccaagacaccctcaaacttgtcaggggagggcaagggccctggtcactctcctgttcccagccagacgaccgaggtgcctgtgggcgccctgggcattgctgtttcttaggtgagtgagtgtgctgttgttgctgaggtctgtgctgaggccagggttcctccaagccagggaagtacttcctgggagacagcccagctggcaggtttcccagaaatccagagaatggtgaattgaagatgtaaacttggcctgaccctggacgctcggagcctggctgtctcctcttccactggcctgggctctcctccctcccaagggatacaggggctcactgtgcttggtcccacagcagtgctgacgttcctaagtcctgggctttcctagctgatgttgtcctacctactcagtcccattttgtccaccgaatagacctgtcactcaaggctctcagcggtcctgccatagctgctggacgctcccagctggaagctgggcctagaaactcacagatggcctggcagtggcatgggaggccctaaaaattagtggaaattttgagagaggacaggtattgccccacagaggccattcattgaacagccaggactgggactagaggcagagcctgctgtcctccgctcagttgtagaaagcaacaaggacacaaacttgattgcccaaagtcactgccagttacccacatatgaccagaagccagggctcctgggatgtggaagataaacaaacacagttgccgggtggcagggcccagcgggcacgataactggcagtcaaggcgatacctcgagggaactgtggggctggtcctggttggtggtcaggtggtagggatagcagatggcagactttggtgagtgagtgagtctgactgtgttctggaagatgggaccgggctcagcactgtctgctcacgtccccactgttgcaacacctagtctgtttgcaaggaggacaggacaggtcacatggagctttatgtcaataaagtctttatcttgtc

SEQ ID NO: 520 - protein, 613 aa, Mus musculus
LSDLGGCGGEESSRESWSSVAGVSKAETQEMDFQLPLIQRLPLGVTISCLCIPLFCLFCYFSITKIKKIWWDQIPTPARSPLVAIIIQDAQVPLWDKQTRSQESTKYPHWKTCLDKLLPCLLKHRVKKKTDFPKAAPTKSLQSPGKAGWCPMEVSRTVLWPENVSVSVVRCMELFEAPVQNVEEEEDEIVKEDLSMSPENSGGCGFQESQADIMARLTENLFSDLLEAENGGLGQSAESCSPLPSGSGQASVSWACLPMGPSEEATCQVTEQPSHPGPLSGSPAQSAPTLACTQVPLVLADNPAYRSFSDCCSPAPNPGELAPEQQQADHLEEEEPPSPADPHSSGPPMQPVESWEQILHMSVLQHGAAAGSTPAPAGGYQEFVQAVKQGAAQDPGVPGVRPSGDPGYKAFSSLLSSNGIRGDTAAAGTDDGHGGYKPFQNPVPNQSPSSVPLFTFGLDTELSPSPLNSDPPKSPPECLGLELGLKGGDWVKAPPPADQVPKPFGDDLGFGIVYSSLTCHLCGHLKQHHSQEEGGQSPIVDGCGCCYDDRSPSLGSLSGALESCPEGIPPEANLMSAPKTPSNLSGEGKGPGHSPVPSQTTEVPVGALGIAVS

SEQ ID NO: 521 - DNA, 55196 bp, Homo sapiens
atcattttacatattattttatgaatgagcaccttcctcagtgtctcagaccaggggtccccacacagcagggccacacagcaggaggtgagtggcgggtgagtgagcgaagttttatctgtatttacagctgctccccatcgctcgcattaccacccaagctcggccacctgtcaggtcagctgaggcattagatgattctcacaggagcacaaacccttttgtgaactgcacatgtgagggatctgggttgcgtactttttcttttttttttaagacggagtttcgctcttgtcgcccagactggagtgcaatggtgcgatcttggctcactgcaatctccacctccccatgttcaagtgattctcctgcctcagcctggtggctgggattacaggcctgtgctatcacacccagctaatttttgtatttttagtagagacagggtttcactgtgttggccaggctggtgtcgaactcctggcctcaggtgatccacctgcctcagtctcccaaagtgctgggattacaggcatgagccactgcacgcggccctgggtgcgtgcttcttatgagactctaatgcctgatgatctgtcactgtctcccatcgcccttggatgggaccatctaattgcaggaaaataagctcagggctcccactgattctgcattatggtgagttgtataattatttcattatatgttaccatataataataatagaaataaagtacgtaatacatgtaatgtgcttgaatcatcccgaagccatggccccaaccacggcctctggcagtggaggctggagtccacatcacgctctgtgctgggtgcaggaatggagatgagtgggtgtcctgctcatttccctgaggaggaacctgaggctcaggctagagacttacctgggtgacacggctcctaagtggcagagtccagattcaaacccagggctacagacccagaagcctgtgcatttaaccacggttctgagctatccagcccaaagaggagagtttaaaaggattacatttcttcgttggaaatcagtgagcatagtcgcccagaaccatttttgaaaaactcagagaaggcctatgttttcctgaagcggccagggaagtattctgcctttttaaaagggaagactgaattctagggaggagaggcaccagctctctgggctgggcaggtctccaagctggcagggccacagcctcccgacggtcttgcctctagcatatttcttccagaagccacatttccacaggtgggcagctctaactgggagaaaatcttcctgagatttagccaaattagctttctttctttctttttttttttttgagatggagtctcactctgctgcccaggctggagtgcagtggcgcaatctcggctcactgcaatctctgcctcccgggttcaagtgattctcctgcctcaacctcccgagtagctgggatttcaggcacacaccaccacgcctggctaatttttgtatttttattagcaatggggtttcaccatgctggccagactggtctcaaactcctgacctagggtgatccgcccacctcagcctcccaaagtgctggtattacaggtgtgagccaccgtgcccagcccaaattagctttctaggagcttccactttctgagtctgtttctgcctcttggaggtagtgaccatctccctccaaactcggatacttctcttattcagactacacaactgtagttatttcaggtattctccctgactcaggaaattataagtttggcctgccttggcacatgagtcaactggttggagtcccacgcaaagactgtttgtttggtcaaagaggaaggagactattacctccttggatctagagcttatacttctgttgatgcaacctggaatcatactgtgtagcagccatatcccacttggagtgcatattgggcttgtcagctaaaatctccatgtttctcttctatatgagctgctgttaatccaagtttcttctattctgagagtccttgtctaaagctaagaggttccagtttttcatgctctctaataaatctacttcaggctaacatgctatcattttttctttgagtactgctttggtttctttccacaacttgttacacaatgttattcactgcccagtttagaatttcccttttggttcccattttaagacttatttaattatatgctttttaaatttttgagacagatagaattttttaagttatctttttattgttgatttctaaatttggtcatcatggttgttgtggtcaatatatgtggttcctataatatcagtggtagagaatttgctgagatctttataggattttctggtcatttttttcctcttgtgtttgaaaagaatgtatattttctgttgggtataaggttctagaaatgtatctatttgatcaagctagctattatattatctatatttgttatgtcactatgtggttttttttttttttacctgatttacctcccaccgtaatacaattacaattcaccataatagaggctttgttaagttctccttttgagtctgtcagttttttgctttatttttgaagctatgttgttaagtgcatagccatatgagtagaataagggttcaggatttttatacctttttggtgaattgttgcattttcccgagtagctgggactacagatgtgcactaccacgcctagctgatgtttgtgttttttgtagagatgggatttcgctatgtttcccgggccagtctcaaactcctaggttcaagcagtctgcccacctcagcctcccaaagtgctgggattacaggcatgagccaccgcagctggctgaattgttcctttaatcagtataaaagagccaacttccagcctgggcagcatagtgagaccccatctctaccaaaaactaaaaattagctgggtgtggtggcgtgcacctgtagttccagctacttgggagggcgaggtgggagaatcacttgagaccaggaattcaaggccgcagtgagctatgattgctccactgcactccagtctaggtgacagagtgagacattctcaaaaaaacaaaaacaaaaaaaccatccaccttctctcttctaatacttactcaagacatcattgtcatgaattctattttattgatgtcagtactcctgtactaataagccagatgagttaaaaacaacagcagccttgcaaccagccatgaagcaagtgatcttattctcatttcacagatgaggagactgaggctctgagtggactccagcctgccacggtctcccaccgagtcaggttggagcctgcacttaggcccagagttatgcttctgtgtctcagatgcttgggggtccctgcccacaaaggtggcccccatgtctgtgtgtccccacccatccaggaatggtatggggtgagacaacaggaagagctccatgggtagtccccacccactgccttccatatgccagtctgcaagcagaaaatgaacgggaagctcttacctgtgcccatgtgttgtcctggctttgggtttgcccagggggcaaagtcctggtcattgttgagacaagttcactgctgctgagggccgagcaaatggtgacaaaggccagattctaaattcctacctggttacttcctgctccgtcaccatcacctcgggcaaattctgaacctccctcagcctcattcctccatctgtgcttgcagggagaatattttactgtatcttccatagtgagctttccaggagaagcaaaaaagagtggtgtataaaaaagcaagtttatgactgcttctgtgccaggcactgtgctgtgcactccagagccaaaggcctgggttcaaatcccagcccactcactagctgtgcatccttaggcaggttcctgaccctctctgggcctcggcttctccatctctgcaatggagatgatattaattgtatctgcaatgctccttggattgggtccatggttaagtgagtgagtgaggctcaagggcttctttttttttttttagagatagggtctcactctgttgcccaggctggagtgcagtggcatgatcacagttcactgcagctgcgacctcgtgggctcaagccatcctcctgcctcatctcccttagtagctgggactacaggcatgtgccaccatgcctggcaatttttttttgtatttttggtagagacggggtcttgccatgttacccaggctggtcttgaactcctggactcaagtgatctacctgcctcagcctcccaaatggctgtgattacaggtaggagccaccgcgcccagccttcaagtgcttttttttgttagtgagactggtacaaccaatgccaaggctggtgagcaaagttgcacccagttggggaggggcgaaaccaagggcagaagggcccagggcatggcctctcatggctgaaggaagaggggacacgtggccagtcacagtgacctctgcagacctcaagaaggaggccagctaggagccatagctgtcactaagacagtcaaaatctaatcagcaccctggcgccaagaggccattgtccgctgctcaggacagtgagtgatagtcgataaccagctctctggaggtcagggccccgaggtggctgagatctgtgcctgcattaggacatttaaggggactccaagccaggatttgctagtgtttgcccagcagggagaggtggaaaattggggatgaccaaccaggcctccctgctcacagccaggggaattcatcctgtcgttcttccattcagcaaatattcatggagcacctgctgtgtgccaggcaccgtgctaggctctggggagatggctgtgagcgggatcgacactggccttgtgtgagctggccttgcagtaggggatatgagcaccaaacacataaggcccgagtgtgcaatatgccacaaagattgcagagaaataaagcaagataacaggttgcagaaagatggaggccaggctggctgctgttcctgggtaggtggcttctggacacagtttcctcaggctctgtttcctcctttgggcctctggaatcttctgaagacaggcctggcttccaggatcccggatggagttgcctgttgactgtgtggactcaaagtgtccacagtgcgccggagcgcgtggtcttccccagcaaatctgcttctcttctcggctctccatcgtgggaagggtccctgggatcctccccaccaccccagcctgaggccactttccctctgtccccgctctccccagcctgctttccccaccaagcgccaccaagtccctgctgcctcctcctcccaaacaggctcaaacctgccccctcttcgccagctctcagctcagcccgctcctctcctgcttaagagccttcactggctccccactgccctagagacagagtttgagtctactgccatggcttggcagacggtgttgtccctggcctgccaaccttccagctgccatcccagccagtccttctcccccttgctccagccaagggccccgcttgtagggtgggaagtgggccgtgccctccctcctgcctgcctattcgctgggtcttccctcattccctccctcaccccgccctctcataagaaccttcagaatctgccagacgcagtggctcacgcctgtaatcccagcactttgggaggctgaggtgggtggatcacctgaggtcaggagtttgagaccagcttggccaacatggcaaaaccctgtgtctgctaaaaatacaaaaaaattagctgggcgttgttgtgggcacctgtagtcccagctactcgggagactgaggcaggagaactacttgaacctgggagacagaggttgcagtgaactgagatcccaccattgcactccagcctggactacacagtgagactctgtctcaaaaaaaaaaaaagaaccttcagaatcataaaatgggtttaataattatacttatctcatagggagggcttaaagcacctaggccagtgtctggcaccaaggaaacactgtatacctgttaaaataagaataaaataaaatacacatgctcacttattgagtgcctgctgtatgtcgggcccctccccgagagaactctggtgcatccccgataaagaaacctgaccctctaggatgagggagggtcttccctgagcgcctgctaacagcctcctctgctaatctgaagtcctgcagcttgcccagcaggctggcttgtcacacgggctacccccacaggccgccatcttggaaaaggccaatggctgtggaatcattcttgactcctattagccttcctgttctctctcccgccccacagcatccatcctgtcagcaaatcctgtgggctctgtcttcaacacagatctagaattcagccccttctcaacctccccatctccgcagcctggtgtgagccctggcacctctctctggggccagtgtggtagcctcctcactgctacccacttctacccgtgcccccaccacccaagcaagagaggtcttttttaaagtctcatcatgtcacttctttgctcaaaacgctctggcaacttcttccttgctcaaatatttgttaaaagaagaaaggaatgaatgaatgaatggcctgtttgcatctgtaatagccagcacataggcagtacttggaaaacacccacagcaagaataaatgaggagatggctggacacggcagctcatgcctgtagcatgttggaaggccgaggcaggaggtttgcttgaggccaggagtttgaggttgcagtgagctatgattgtgccatagcactccagcttgggccacagagagagatccccatctctacaaaaatttaaaaattattcgagcatggtggtgtgtgcctgtagtcacaactacttgggaggctaaggcaggaggatcacttgagcccaggagttcaaggctgcactgagccgtgacggtgcgactgcattctagccacagaatgagaccctgtctctaaagcaaaaaagagaaggagaataagtgaggtacttgagcaagtgggtgaggatggttgagccacagcaggcccacagggaggctggtgggtgctgttggtggagggggccgatttgtgttcctggtggctgcagagccagtctgttgcctcccctccctcccactggctgggctggggacggagccaaccaggcagatcccgggccattctggggccctggcctggcctgccttactatcccagtggggccaccgacgtggctgccatttctggaaaccccagttctaggtaggttactgtcccaggaagaagtgcatgcctagcttcctgccagcccagcccagctgtcccagaagccagaggaagctctgggctggtttcttataagtagcatgactaactgattgcgccacaggagctgaggtttcaggccagtttctgtcgtggagtttcaggggtcagcggctccaaagccccagcccccacccgaggcccctgctgtccctggattcctctccacatgccacctgtcacagaggtgcttgcatcctgtctgcagaaccagcccctcctccaagccaggtttcctgcccagagggaagaagagcagaaggcctgtaccgccccctgtgcgcccccagtcctccgccccctgcccccctgccacccgctgtgggttcgggaagagtcctgctgggtcgcttccaggctgctgctggcttctgacatttcaaggcttaatcacttaatctcccccgagttttttaaaaaaagtgagtcaagtgtgttctcctggtggcgggcgtgttttcccaggcccatgcttctgctcatttcctggctgcggccttcactgactttgctgcttcctaactctgtgaccttggccttgtcacttgctgtctctgggtctcaggccaatgggtctcaggccagtggggctccccggacaaagttccagggttttggggactgcatttcaagggtcagcaaccacagtccttaaacacgtggattttggagtgacaatgcctaggttatggttctgtgaccaccagcaagtgctctagcctttttgtgcctcagtcttctcatcagtaaaatgggaatgttaatggcacctacctcatagggtcgttgggagaaccaaattgattaatatattgtaagtacttagaacagggccaggcacaaaataagtactgcatatacagttaactatggacaaaagcttgggacctggttcatgtttaaaaatgattattgaggccaggtgcggtagctcatgcctgtaatcccagcactatgggaggctgaggcaggcggatcaggaggtcaagagatcgagaccatcctggccaacatggtgaaatcccgtttctactaaaaatacaaaaattagccaggtgtgatggcgtgctcctgtagtcccagctactcaggaggctgaggcaggagaatcacttgaacccacgcggaggttgcagtgagctgatatcgtgccactgcactccagactggtgacaaagctaggctccatctcaaaaaaaaaaaaaaaaaagattgttgaatttattattgctgaatttttttttttttgagacagaactttgctctattgcccgggctggagtgcaatggtgtgatctcaactcattgcagcctctgcctcttgggttcaagcgattctcctgcctcagcctctcagcctcccgagtagctgggaatacaggcacccaccatcatgcccggctaatttttgtatttttgtagagatggggtttcaccatgttggtgaactcctgacctcaggtgatccacctgcctcggcctcccaaagtgctgggattacaggcgtgagccactgtgcccagcctattattgctgacttttaaaccattcattcatttaatatatgtttattgtacacatgctatgcctgtgtcaggcactgtttcaggcactggggataaagcagtgagcacagcagacataaagctctgccctcatggggcttgtggtctctcagagggaggcaaacaatgcatttatagacaaatacataatttaaatttgaggttacctattatactcccaacttgaaaaactagcagtatattgaggtggctatttcacatctgatggaggaatatgtcttttgtgaaccatttatgttctttgcctatttttcttaaagggatgtttgtcttattgatttgtaagaactcttcatatattaaggccattaaccgttcataatgtagattgctacctttttctagtcttttgcttgctgatatagttgggatgtcatcctctctaaatctcttgttgaaatgtgatccccagtgttggaggtgggtcctggtgggagatgttgggtcatggggacgggtccctcatggtttggttctgtccttgccatagtgagtgagttctcacaagatctggttgtttagaagtgtgcggcacctccctcctctctcttgccctggctgtcaccatgtacgcctgctcccctcttgccttccccgtgaataaaagctccctgaggcctccccagaagccaagtagatacgggtgctatgcttcctgtacagcctgcagagccataagccaattaaacctcttttctttgtaaattactcagtctcagatatttctttatagcaatgcaaaaatggactaacacacttgagttctgtctttttcttatggcatattttaatctaggccagacacagtggctcatgcctgtaatcccagcactttggaggccaaggcgggtggatcacttgaggtcaggagtttaagaccagcctggccaacatggggaaaccctgtctctactaaaaacacaaaaaattagttgggtgtggtggcacacacctgtaattccagctactcgagaggctgagacacaagaatcgcttgaacccgggaggtggaggttgcagtgagccgacatcacgccactgctctccagcttggggaacagagcaaacctccgtctcaaaaaaaaaaaaaaaaatctagggaagttgaaaacattttgcagtcaaagctatctttgctatctgcatcttgaaataaaataaacattcatacatgtaacctcattaatctgattagagatagtgataagtactgggacagacataaacagggtgctgtgataagaagtcacagggagggcccgcattagttgaggggggtcagagaaggcttctgaagtgtttctggtgcaaatgcttggaaaagggagagctgggagtgtatcccagggctgaggccaatggaggattgcagaagagggagaggggataggaggggaatgttagagggataagcaggggaattggctcttttcttcattttcttaaattaaactttttattttcagataattaaagatttacacacagctggaagaaatcatagagaagccgggcgtggtggctcatgcctataatcccagcacttttggaggctgaggcgggcagatcacttgagatcaggagttcgagaccagcctggtcagtatgatgaaaccccatctctactaaaaatacaaaaattagttgggcatggtggcttgcctgtagtcccagctactggggaggctgaggcaggagaatcacttgagcctaggaggtagaggttgcagtgagccgagatcacaccactgcactccagcctgggcaacagagtgagactccatctcaaaaaaaaaaaaaagaaaagaaaaagaaaaagaaatcacagagagacccctgcttctatgctgttccccccgagggcaagattgtagaaatctgtaatacagtatcacagctgggatactgacactgatataagctactgaccttattgggatttcccgatttacttgtactcatttttgtgtttgcgtacgcatgtgtggtttagtgctatgcaattttatcacggcataggtttgtgtatgcagccaggatccagcacagttctatcatcacaaggatggctcaaattctccttttatagccacatccaactcccttcctgacccaccccctcagcccctggcacccactgatgtgttttccatttccatggttatgtgatttcaagtatgttacataaatggagtcacggggtgtgtactctgggaactggcttttttcactctagggcttggattttattctaagtcagagatgcttctctaatgagctgtgaaccccctggggatctgtggcccctgtgaagaagccctttaggagccagggggcattggatgtgtgagctggccctggtctcatttctgattttaaaatggctctggctgtgatgtggagaagaggcagggtgagcctcatctgcagcaactgctaactgcccacatccccccagacttctcaaaaatttgccactcccctgctcaaagaccctcaaaagctgcccactgcttagaggacaggcctttgacctgaggtcctcacttgggcttcagggattctgtgaacccctaaaatggaatgcagaattaagtgtatgcaccttgccagaaacagggtttggggtttacattagatgctcagataggtcattgatccccaaaacactaaggtctctgacttctagacagatagtagttaagaaccaaagctttggagcttgagtgctggatttaagacccatgactgtcacagctgtgcaacctcagacaaatcactcagcctttctgtgccttggtttcctcatctgaaaatggagaaaataatattacctatttcatagattattaaatgcattcttgtatgtaaaagatgtaaaagaaaacttggcatgtggtaaactctgtgtgtttaagtgaatggtgaggctgcccagtataggagggcagagctttccaggtaaagactttctaggcctcctgggattatcaggccctctctgtgttggttgttgtcatacatgacagcagtattccttccaaagggatgccaagttgtggttgcacactgcacttagatccagttgattgacagcactgttcaagtcaactgtgtccttactgatttctgcctgctggatctgtcgattaccaaaagagttgaagtaatagtaataatactattattatccaataatagtattattcagaataatcacacagatttctctatttctccttgctgctctcagtttttgccttacatattttgaccctttgttgttagttgcctacacattaaggattgttatttacatcttcttggagaattaactcccgaatcattatatagtgccacttttttttaatttaaaaattttattttttattttttgagacaggatctttctctgttgcccaggctggagttcagtggcatgaacacagcccactgcagccttaacctcctgggctcaagtgatcctcctgcctcagccttcccagtagctggggctacaggcatgtgccacctctaataacttttctttaatttacaatagtattagtttgttctcatgctgctctaaggacatgcccaagactgggtaatttataaaggaaagaggtttgactcacagttctgcagggctggggaggcttcaggaaacatattatcatggcggaaagggaagcaaagacatcctttttcacatgacgtcaggaaggagacacgccaaggaaagggggggaaagccctttataaaaccatcagatctcaggagaactcactcactgtcacgaaaacagcatgggggaactgctcccgtaatctaatcacctcccatgaggtccttcccccaacacgtggggattacaattcatattacaattcaaggtgagatttgggtggggacacagagccaggccatatcacattattattaattagtgccttctctctcatttttttgattcgcctaggtagagatttatcaatttcattgatcttttcgaagaaccaatttttgatttcattgattttcctcgattaattttctatttttaatttcattgatgtatgctccaattttgtatttttttcttctgcttgttttagacatatattgcttttctgtttctagtactctagatggaaacagattattgattttagaactttctttctaagatatacattcaataatataaatttccctctaagcactgcttttgctacgtctcaccgattttgataggctatattttcatttttatttagttaaaaatatttttagtttctcttgtgatttcttctttgatccatatgttattcggaagtgtgtttttaaatctccaaatacttggaaattttctggctttcttcctgctagtgacttctaatttgaatccattgtggcctaagagcatatgttgtgtgatttctaatgttttcaatctcttaaggttgttttatgtcccagaatgtggtctgtcttggtgattattccacatgaacctgaggagaatgtatattctgctgttgtgagatgtaacagtctataaatggatacctctgttaatatgacctcgggtgactctttttttttttttaagttgctgcttcaccattggcttttggagattttgcagatgataaaatcctcaggacttttctgctgctcagtcagattttcttatcctacacttgcggaactgttgtttgaaattgacaagcaggatggccaactctgcccggctcattttatttcatcttattgggttcagcctgcagttttaggagatgagattgaaggaactggtatactggaatccacggtgggctcggaagcaaacaaacgtgggttctgattctagctctgaccttttaccagctgtgggacctggtggatgggttatttggcctctctggcctcagtttccttagctagacagttgggataacagcctacctttcaggattcttgtgtggattcggtgaggtaatacttctaaagcacctagcaaagtgtcaagtacaaggtaagtgctgggcaagcagggattttgttcacacaaagccttgactcaacataaggaggctgtttccaatggctctgcttaactgagacctgagagtgattgctccatctgtggtggcatatgggctgaaactgcctagcagcatgtcagaagtggggtgttcgcaggacatccttgtccaggttggcagttgagcttggcaggtgaccgctgagaccccttccaactccaccacttcaggaatctcttttttttttttctgagacagtcttgctctgtcacccaggctggagtgcagtggctcaatcttggctcactgcaagctccgcctcccgggttcaagccattctcctgcctcagcctcctgagtagctgggactacaggcacctgccaccacgcccagctaattttttgtatttttagtagagactgagtttcaccatgttagccaggatggtctcgatctcctgacctcatgatctgcctgcctcagcctcccgaagtgctgggattacaggcgtgagccaccgcgcccagccaggagtctcttgatttagaatgggaacttgaaatcatctcctcttgccgtgtacttgaacgcgataacctggcacttatctttttaattcttttactcacctgcatctttgttctttttgcctctgatgttcagggaagcctcttctcccactgcatctgtgatctctcctgaaatgtagcacccacacatccctgagaagctagctgcggcacgtgtgtgtgcacatgggcatgcgtaagtctgggcgtgccttccacaacagattaaggatatcaatcctgacgccatgctgggatgttttagtgaatcttgacagggttgttgactcccctgtttccctggaggactttaccatgaaagtcttctgctgtgtgactttggacaggcgtcttggcctctctgtttctctttattcataattgaggctaaagtgacacctttgccatctctgccacaggatactgtgggcatctgtgtagttgtgagagtaaaagttactaggacttgccaaggaaatcagtgtcaggaacccaccaccccattcccgcccctcctttacttgagactttacttttgtaactctcagcaaggaagacgagttcaacctttgagccgatacagagccttcccctagagagagctttgcagcctcatgctgagccagttaggggccccacatcatgtccaaaatgaatttaatcaacaaacagttactgaacacgtcctatgtgccaggcaccgttgtagatactggggactcggcagtgaatgggacagaccctggctgtcaggatgacagacaatttaaaaagggacagatgtcccacgctggcttgtcctttgcacccccggcacttcgtgaggagcagcggccagttcttgtatatagactggcccttggtgtacatttgtctgacgtttccaaatgatgtatgcatccttggcaggaacccaggaaaagacatgctgtgctcttctcaggaattgtttcagggaggtgatgttggggatttgtcccattcttgttggtgagtttagatcacttggtgaaggtggtgtctgccaggtttctgtattgtaacgttcattgatatgtattttcactcattagttaatatacaatacaagttttgcagggagttactttgaggctgtcatagtaaaatagagctttcccttcttccctgtttatttatttattagagatgaagtctgactctgttgcccaggctggagtgcggtggtgcgatcatagctcactgcagcctccaactcccaggctcaagccatcctcctgcctcagcctcccaagaagttgggattacaggcacacaccacactgcacccggcctcctccatttattgatctatgtcaatacagactcctggactttaactccaagggttacaagtggataccataatattcattttgatgctcaaaatgtgcctgttttgtccaggtcaggctagctgctgagtacttccttattgtctggcacaagaattccaagcctatctggtacttttccttctcctggaatcagctatttctctaaggcgctctggttcctttcagtacagaatagtatttagaagccaagacctggtcactaggaaggcatgataatcaaatgtgatgaatgatcttggattgcatcctggacgtataaagggcattattgaggcaattagcaaaacataaataggggccgtggatgagatagtggtgatgcatcactgttaatttcctgatttcgatggttgtattgtgattatgcagagaatgtccttgtttttctgacatgcacactgaggtattggggtaatttattcattatggagatatgtgagtgtgtttatgtgtctcatacacagatgtttcttaatgatggggttttgtccccataaactcatcataagttgaaaatattattaagtcagaaatgtacttcatactcctaacctactgaacgttatagcttaacttagctcggaacacttgcattagcctacagttgggcaaagtcatctaacacaaagcctgttttgttataaagtgttgaatagcttgtgtagtttatggaatactgagagtgaaaaacagaatggtcgtatgggtgctccaagtactgcttctactgaacacccattgattttgcaccatcataaattaggggaagagaggaaaagcacgcgtaagggaggaagggccgggtacagtggctcacgcctgtaatcccagcactttgggagaccaaggtgggcagatcgcttgaactcaggagttcgagaccagcctgggcaacataatgagaccccatctctatcaaaaatacaaacacttagccaggcctcatggtgcacatctgtggtcccagctactcaggaggctgaggtgggaagattgcttgagcccgggaggtggaggttgcagggagtcgaggttgtgccactacactctagcttgggtaacagagtaaactctgtctcaaaaaaaaaaaaaaaaaaaaggaaagggaggaagggaaggtccctccaggtggaggggacagagagagaaaaggcatggaggtgggactgagtttggtgtgtttaagaagtgcaggtggcagccgggctcagtggctcacgcctgtaatcccagcactttgggaggctgaggcaggcggatcacctggggtcgggagttcaagaccagcctgaccagcatggagaaaccctgtctctactaaaaatacaaaattagttgggtgtgtggcccatgcctgtaatcccagctactcagaaggctgaggcaggagaatcgcttgaacctgggaggcggaggttgcagtgagccgagatcgcgccattgcactccagcctgggcaacaagagtgaaactctgtctcaaaaaaataaaatgaaataaaataaaataaaatgttaaaaaacaaaaaagaagaagaagtgtaggtggcaggcgtaggatgcatgggtgctgggcccaggtggagagggaggtggagccctgctggggggagggccttcaagtgtgcccaagtcactcggagagcatccagcaggggcctagagctcctgaggtggccttaagttcttatgatgccccagacactgcacacagtgcttcagaggcaacacctccgttcctgtttgctgcaagcctgtgaggttagccttggaaccattcctgtgccacagaaacacagccagagcaccaaaagagaaatgctgttaatggcaaagaactactcactagcagaacaaagcctgggagctgcttttttgaataagatcccaggagagagacccaagcgggaagtgaaggatgggcacttgaaatgttgcagggaatataacccagcgcgtgctgttttctttttttctttttcttttttttttttttctctttttgcaacagggtctcactgtgtcgcccagcctagagtgcagtggtgccatctcggctcaccacaacctccacctcctaggctcaagcgattttcctgcctcagcctcctgagtagctgggactacaggcacgcgccactaccgcccggctaatttttttttgtatttttggtagagacaggtttcaccatgttggccaggctggttgtgaactcctaaagtgctgggattacagatgtgagccaccacgcccggccccagtacacactttttggagggtatttgacgttatgtaccaggagtgctggggaaaagtacacacttgactccgtgagattctgcttcttagcatttttttcttttcctttttttttttttttgagacagagtctcactctgtcacccaggctggagtgcaatggcatggtctcggctcgctgcaacctccgcctcctgggttcaagcaattctcccacctcggcctcccgtgtagctgggactacaggtgtgcgccaccacactcggctaatttttgtatttttagtagagacagggtttcactatgttggccaggctggtctcaaactcctgacctcgtgatccgcccacctcagcctcccaaactttctgttttcttttcttttcttttttttttatgacagggtcttgctggagtgcagtggtacggtcttggcttactgcagccttgacatcccaggctcaaacgatcttcccacctcaacctcccaagtagctaggattacaggcatgcaccaccgtgcctggctgattttgtttaatttttgtagagataaggtctcactctgttgcccaggctggtcttgaactcctgggctcaagccatcctccctccttagcctcccaaagtgctgggattacaggtgtgagccaccacacctggcttctgaacattttttcttaatgataatagctggtgctatgggctgaatgtgttcccccaaattcatatgttgaaacttcatcccattgtagtcatattaagagatggggcctttggagaagtgattaagtcatgagggctctgtggttggtcatgaatggggttagtgcccttatgaacgggctgaaggaagtgtgtttgccccttctgtcatatgaagacacagcagcatggcatcgtccgtgaggaatgggctctcaccagatctggatctcctagtgtcgtgatcttggacttcccagtctccagaactatgcattagaaaatttatttatttattatttatttattttgagatggagtcttgctcttgtcgcccaggctggagtacaatgacgcgatctcgactcactgcaacctctgcctaccccagttcaagcgattctcctgcctcagcctccagagtagctggaattacaggtgcccgccaccacactcggctagtttttgtatttttagtacagacggggtttctccatgttggccaggctgatctcgaactcctgacctcaggtgatccacccaccttggctccccaaagtgctggaaatacaggtgtgagctactgtgtctggcctgaataataaaatttaaaacaatttttcaaaaattcaccatgaggtctcactatattccctaggctggtctcaaacccctggactccaagtgatccaccccaccttcccgagtagctgggactagagatgcacaccattgcacccaatagagcaatacgtttctgttctttgtaaattacctgctctaaggtatttttgttatagcagcctatatggactaagctgacttgtaacgttacttgagactttaaagtgttccggtcactgttggagggctctgtctgtgttagctcatttaatccccacaacacctcaatcagatggggctattcttagtcccactttatagataaggaaactgaggcatggaagcacagcttgctcaaggttcacatctagtcagtgacagagcaggtatttaaacctcaggaaataatcagagaaacatgtgtagagggttgtccaaggaaggccacatccagaagcatctcccaggacagttgttgtgtagctcaccctctggactttgtgggtctgggtgttgtttcatgattatagagagagctctgtgaacgtggaggacctgttgtcggcagagacacaaatggccagggcatggctgggcagccgcagtggctcaggcctgtaatcccagcacttcgagaagaccagaggggcagatcatgaggtcagaagttcaagaccagcctggccaacatggtgaaaccccgtctctactaaaaatacaaaaattagccaggtgtggtggtgggcacctgtaatcccagctactcgggaggctgaggcagaagaatcgcttgaacccgggaggtggaggttgcagtgagctgagattgcaccgctgcactccagccttggagacagagcgagactctgtctcggaaaaacaaacaaacaagcaaacaaacaaacaaataaatggccagggcaggggagggttgcatattgaataagatgagctctgctggaagcacaggtcagcactaacctgcttcctctctctctgcaggtgccttggcatctcccaatggggtggctttgctctgggctcctgttccctgtgagctgcctggtcctgctgcaggtggcaagctctggtaagtcaccacttctcaatcattcatttgttggctattaatggcgtgccagggtcctgcagtatgtcacctggccttatggagattacactgcagtgggaggggacagccaatgacaagtggccctgattatcagtaaattctaaagattgttagaaagtgatgggagccgggtgcagtggctcacacctgtaatcccagcacttcaggaggccgaggcaggaggatcgcttgagcccaggagttcgaggtcagcttgggcaacatagggagaccttgtctctacaaataataaaatattagccaggtgtggcagtgcacgcctgtagccccagctactcaggaggccgaggtgggaggatcccttgaactcaggaggtcaaggctgcagtgaactgtgatcgcgccactccactccagcctgcgtgagaaagtgagaccctgtcaaaaaaaaagagaaggtgatggggaaagaacacagaacagcataagagggggttggggaagctgggtggagtgggggggattgcagttgaaagtagggaagtcagggaaggcctcattgagctgacttggaggaagcgggaaccgtgcagatgtctggggaaggctcattcttggcagagaggccctgcactgagcctggcgggagggttgagcacaggagggaatgtggtggaggagagtgagcagcaggagggagcagtgaaggtcagcaaggtgacagagtggctgaatcaaaaaagaccttgcagtgtttgagcagaggatccatatcatccattatgttccaaaggactcttcaggatgccgtgtggagaaaggaagagggtggaagccaggaggtctggagggaggtctggagtggaggagatgagaggctccggatccctctgggaggtagatttgaggacagattggaattgaggtgaaagacagagaaagagaagtggccaggatgactccaagatttctgacctaaactactgggaaggacgcggttgtcatttctgaaatgcagaaggatgccagaagagaaggtactttggggaggggcgggaatcaggagttagttttggacatgagataagcttggaatatttatttgctatctaagacagctccttaacatggtaagcccttatgcaagttgttgtcagctgagatgggcgtggcactgagcatgggagcatggaggcgcctgagtggtctcatgctcaggtggtttagcaaactcagtgtacatcctgccaattccagtcctgccatggccactgacaagctaggagggcgctgaaaggagaaggaccccgatgtctcctccagcccatccatctcctctctcccattggccaaacccaaccggaaactaaaggccaagggtacccggtgatgaagactgtggtatcagcctcctgagcacagagagggcagaaaggggtggagacaaagaggggcgcagatagtgggcaaatggggaagtggcacttcccctagctcgagggcagaggcttggtgtgatggaatggcactccttaaactgctacatattttccctttaatttggccaagaacaagttgtcaagtttgtgtgagataaaggtgcacttggttcgttcttgtctaatggcccccgcacccatgggtatttcttcagcttccacagtcatcccgacactagctgggaagctccagcagccctggtcctggccccagctctgtgggcgctggccctcaactttgcctgcactgtgcttttgtgctattccccttggtcctgtttgggtgcaagtccccctcacgcattgagttcctgggccgctcaggctgctcctgtgtctccccagggaacatgaaggtcttgcaggagcccacctgcgtctccgactacatgagcatctctacttgcgagtggaagatgaatggtcccaccaattgcagcaccgagctccgcctgttgtaccagctggtttttctgctctccgagtaagcctgcgctggagctggaggtttggggaggttgtgcccaaagggtttgccccaagagtgagctgggtccaggtggtgcgctggagtgcaggatgctgagtatggtttgctgctgtttatatggtgttagaggggaggtcccatctccagggacatgttatgtaagatacagtggagcgcatggtgggagtgttggtccacgtggcacatggatacggctggaatactggactagaccagcagttctcacactttttggtctcaggaccctttttcacacttaaaaatgagtgaggacccaaagggctttggtgtaggtaacacatcattctatgtttacctaattagaacttgcaatgaagaaatggtgtaatttttaaaaaattaaaacaattaaaaattttttttcttactgaaatggaggtctcactgtgttgcccaggctgctctcaaactcctgggctccagtgatcctcctgcctccgcctcccaaagtgctgggattacaagcgtgagccgctgtatccggcccaaaatggagaaattttaagtcccaacaacatgcaagcccgcattcaacaaatcttcagatcaattacatgatcacaggtcatgtagcctctagaaaattccactgtacgccagtgagagagagtgaaaaggcaaataacgtccctgtattatgatgaaaagagttttacctggtgggcccagaccacactttgagaaccactggactagacccttgattgaggagtacggtgttgagagtggagtcctctgtgatggtggatggaccaggacacatggcataggagtcaggtggttccctgggctactccatggtgcacaggatgcttcgttacactggtgcccaggacataatcacgtacacaagacacacagttacggggcagactggggatatacggcacaccagcatgcagggttcaccagtaaaggtggtattccatgattattctaaggtagatgggctgtgctttgtttccattggcttagtccagggattggcaaactatggcccgtgagccaaatccggcccactgcttgtttttgtaaataaagttttattggaacacactggctgctgtagttgtaacagaaactgcatggccctcctttatgtttttttttgtttgtttgtttgtttgtttgttttctttgagacagagtttcgctcttgttgcccaggctggagtgcagtggcacaatctcggctcactgcaacctctgcctcccgggttcaagcgattctcctgtctcagcctcccgagtagttgggattaatggtgcctgccaccacacccggctaatttttcgtatttttagtagagaccggttttcatcatgttggccaagctggtctcgaactcctgaactcaggtgatccacccgcctcagcgtcccaaagtgctgggattacaggcatgagccactgagcccggcctcctcctttatcttaattgaaataattcagaaatggaaagtcaaatactgcatgttctcacttataagtaagagttaaataatgtgtacacatgggcattattccatgtaccatggaataacagacattgaagacttgggagggtgggagaggggtgaaggaagagaagttacttaatgggcatagtgtacaccatttgggtgacggacccaccagaaccccagacttcaccactaggcagcatatccagtgagaacagatctgaggcttgccatcaaaattgcacttgtaaggccgggcactgtggtggctcgcggctgtaatcccagccctttgggaggccgaggtgggcagatcacttgaggtcaggagttcgagaccggcctggccaacatggtgaagctccatctctactaaaaatacaacaattaactgggtgtagtggcgcacacctgtaatcccagctactagggaggctgaggcgggagaattgcttgagcccaggaggtggaggttgcagtgagccgagatcacatcactgtactctagcctgggtgacagtgagactttgtctcaggaaaaaaaaacaaaaacaaaaaacaaaaaactcgtaccccctaaatttatacaaataaccaaaaaaaaaaaaaaaaaaggaaattgtgtggcctttgaagtccaaaatattaactatctggcctgttacagaaaaagtttgcagacccctggcctagcccgtgagatgtgggttggctgttaaggtggaacattggaattatcttacgatggccaaactgtgcgatgcagagcttatgttgttctaaattaattagtgccaccggttcttccctttcatgggctttcaggaacaagctaagtcccaggaccagggccggcagctaggcaggtgtgaggagcatccttggtgcatgtggtaagaggctgtggccagcaagagaggcaaccctagtcggctgccccagcacaccctggccgctcccaagcccccagatctgtcctcacatccgtgatcgggaagctggaagagtctgatgcggttcctggaggcatgtcccggacacagctgtggggcccagccagcctacaggtgaccagcctaacccagcccctgtgtctgcagagcccacacgtgtgtccctgagaacaacggaggcgcggggtgcgtgtgccacctgctcatggatgacgtggtcagtgcggataactatacactggacctgtgggctgggcagcagctgctgtggaagggctccttcaagcccagcgagcatggtgagcagggcggagtgcggcaggggtggctgggtgtgttcccacagctgcctgggctgagggtggggtgggcaggggaggaggtggggtcatagcaacagcaggaggaagccgcctgtattttcccaaatctgatgggattcctgcccctgcctgggcctcagtcctcccacctttgaaacggagctggtcgcagtagaccaccaagcccccttcagcccagctgtttccacccctgaacttaagtgcccaggaaggcgtattgagatgaggtgtgcttgctggaaggcatgcctgctgctgattgaaaaccgaactgggaacattccttccattctgtgtccactggtcagctgctgcggctttggatggtcttgaccgtggaaggctgaccttcttctggtacccggagtccctgcaggaatcccccttgagcttgctgggctgtggtgacaggagtttaaaacatgcgttgtattccagtgatgcatgatatgacatgcatcacaggaataaaaacctgaggtctcatggatatgattgcttcaaaggagaccaagttttaaaacagatgaatcaaaataaagaaaaatactcagtaaatcatcataaagtacagagatgtggccaaaggtgtgaaggatgcagctgtaaaagctgaagtttgaggccgggtgtggtggttcatgcctataatcccagcactttgggaggccgagcccagcggatcaccggaggtcaggagttcgagaccagcctggacaacatggtaaaaccccgtctctactaaaaatacaaaaaattagtctggcatggtggcaggcgcctgtaatcccagctacttgggaggctgaggtaggagaatggcttgaacccaggagaaggaggttgcagtgagcttagatcatgctactgccctccagcctgggcgacagagtgagattacgtctcaaaaaaataaaaataaataaaaataaaaagattttttaaaaggctgaagtttgggttactttggctcatacactttgccttcactgtagaaaggtggttagtaaagaccaggcgcggtggctcatgcctggaatcccagcactttgggagcccagcgcaggcagatcacttgagccctgggctattgaggctgcagtgagctgggattgtgccactgcactccagcctgggcaacagagtgggaccctgtctcaaaaaagaagaaaaaaagggtaattaataaacactaaagttctatgtagaattttagcaacattattgttattataatcttctttgctatggctctgaatctgtgtggtgctccagaagtatgctatggaggttttgtcgaccaaaaatctgggtggtggctgtggtttgtaggccggggctgggctgggtgatgggggagtcactgcatagatcctcacatagaggccgcttctcccgcagtgaaacccagggccccaggaaacctgacagttcacaccaatgtctccgacactctgctgctgacctggagcaacccgtatccccctgacaattacctgtataatcatctcacctatgcagtcaacatttggagtgaaaacgacccggcagatgtgagtgggcatgctttgacgtttttctgtgacctctggggaacagggtgggtgaccagcagaggcccagtccctggagccaggagcctgggaggcaagccctggggctggatagcaaatcccaggagctagagacctggcttctcacctggctctgccctaggcaagtccctttgcttcctggccccccacccctcacatcagagaaggggagttatctctgcatgccgctcctcctctgtaaaggtagggctgtgggccacatctgtgtttcccagtttgggggacacaagtgatcgtaggtggcacattgacagctcacttgaataaccctattattgaagagaataatactgactcaagagacagtgacccgtgtcagttcccttttgaggccaacgggttaaggaggaagtccccatacagctgactcgtttactaattcctcttaatgaagagagcagaggccacaccccaggcttagactttcccaagaaaacaagatcagtttgttggttgttccccatggaagctggtcctgacattcccttcacagtagtgttggtggagtttttgttgttgtttgttttgagacagagtctcactctgtcacccagggtggaacacagtggcgtgatcttggctcactgcaacctccgcctcctgggttctagcgattctcctgcctcagcctcctgagcagccgggactacaggcacctgccaccgtgcccagctaatttttgtatatttagtagagatggggtttcactgcgttggccaggctggtctcaaactcctgacctcagatgatccactcgcctcggcctcccaaagtgctgggattacaggtgtgagccaccgcacctggccagtggagttccttcttaagtacatgtattgacatctttaaaaagggcgagaggatttacaggaaactatcaggtcagtaatggcaggggccgtccacagtgggtggctgagtccccctatttttctgctggtgtgcggggaggtcatttcctgccacccatgtttccccaccctgaatccaccttcctcacattcccattggagggacactctctggacatatgggacctggggtcccacagggctgcattccaatgcctgctgtgccactcgccagctgtgtgatgttgggcatatcccataacctctttgtgcctcagtttcctcatctgtaacacaggagtgacaagagcacccgcccacagggctatgacagtacaaggtgtgtgatacagatgagctcccctgtttggcccacatgtgtcctaaaagccatgtgccctttctcttgagtgccccaggccacagagatccccatctgcccgctgtcccacacactggtctgtcatttgttccttgaggtttgtgagggccggctctgtgcatcccaggggcccaggctgggcctggttggctctcagggagcaggcacccgccaccttaagctcccatgctggtgtctgtcactgcttcctctcaatctggccaagccaggggtgtcgatttatatctctcaggtctggtttcccctttggcactgggccaggtatggggaaagagcaggaatggggcagttggctcacacagcagaggctcagaaagcggggggcatggggggaaggagtgcacagatgctagagagtggggcaagttttgtttggtcaataaatctccttctcatgccccaggcctgtgcaagacctacagagagtcccaaggatgggctggggggaagagaaaggtaccaccttcagagtccaaagatatgttatttaatattttcatatttctagatctgccttcaggcatggctggatccagcttctaggaacctgtccagctctgcgccctgctttattctgtactggcttcgtttttaggcaggctcttccctcatgtagtggcagatatgcctactagttgctccaggcctacatcccaaagccacagtgggaaaagggttttttttcttgacggttctaataagagtcctaaggctgctgctcagtggcctggcttcgatgctgtgccagcctctgaaccaatcactggctgtgggtggagagagggtgctggtggagggccctgcttgtccagggaggagtcacatacctgcctctagggctgcaggtgggctcagctccatccaaaccagatgaactgaaaataaggcaggagtggcttccccaggggaaactggggaagaggaagcaggactgtgctggctaaaatgccagccaggtttaagacgtggcaccagatgccagtcatgggattggattggtcagcatgcctgggctatggcttaggggtatgttggtgctcagggatgccacaggcctccagataccaggtctgaggcagaagaatgaagtccagcttctcttgtgggtggaacagtggcaactgagataccccatctctcccttcccaagaacagagctgaacataaagaatttagtgattggccagagcttggccacatgctcccctctgatgaatgataggccaggtgatgggattggcacaattggcttagactaatgagggttggccctggagttgcaggcagtggagttctgtcctaagcagtgggcacctaaacccgatggcataaaagctgggcgggtgtccacctgcatctgccacagcactgcaggcaccaactgtggctcatactgagtgggataaattccagaaagaaacattaggaacttactatagaattttggggctagagctactcattcattcccctagataatttctaggcaaggttccatagtggagggggagttttggcttgggcattgaaggatgcataggagttttctagatggggaaagaagggaacggtagaccaggcagagggaactgcatgataaaaggtttatgggtgtgaaaattcatggaatgtttgaggattatggggttgggggatgtgggaatatgtgtagcgataaagcaccaaacaaagccaaaagtttagttagagccctgaatgcctgcctcataatggtttccatattttatatgcctactatgtgccaggcacattgctcagggtcacacagctggaaatggcagggctgagtttttgttgttgttgttgttgttgagacagagtctcactctatcacccaggctggaatgcaggggcgtgatcatggctcactgcatccttgacttcctgggatcaggtgattctcccacctctgcctcccaggtagctgggactacaggcacaggccaccacgccaggctaattttttgtatttttagtagcgacagggtctcgccatgttgtccgggctggtctggatctcctggcttcaagtgatccccctggctcagcctcccaaggtgctgggattacaggcttgagccaccgcatccagcccagatctgagatttgcacccagtatttgaactcccaagcctgtgctctttttcctcccatggacatttctctcagagatggtctcccaaacacctgtccttcttgttaaaaaacagacaaaccgcaagtagttctttggaagctcagatttctcttttgtttcttagtaaaacatttcccagttcccagctcccttccagggtgtaagatttcttcggtaacttacatctagctgttgcttcttgtttgctcatgtttagaaagaaagacaaaagagagtgagaattttctctcccttccccagtctccccacaactcacaccccaccctcagctccctctgtaataggaaaatctctgaactctctgtagttgctccagcaatcttttggaactttgcttctttcttgtgaaaaaacctccccttggctcactttgcaccaggtttccccaaatgtgcttccaaccacaagcagaaatggagctgccagtaaccaggaagaaactgccgggggctgaggaagaggagagggaggtgcatagccctggatctcgcagggagaggggtgacaggatgagaactcaggttgctcacttgccatcagggtcagtcatgaatatagcgttcatgtatcactttttaaagcttttttggagggtaaaagtaatagttacacaaaataaaaatacaaatggtacaaaaggacttagaatggaaacatgtttctctcccgactccagcctcctgtttttcttcccagagactgaccactgctgtctgtctcttgccagaagggaaagggaggcaaggttagggcaggcagagggcatgtgcatcctttagagagagcttatgtctatacaagcaaatgtgtgtgttcagtcatcgctgtcttagttttctattgctgcataataatggtactaccagcttcacagctttaaacaacacccatttattatctcatagtttctgtggttgggagtctggacatagcttagccaggttctctgctttagagtctcgtgaggctataatcaaggtgtgggatggggctgcagtttcatctgaggctcaattggggaagggtcacttctaagctcatacaatattggtgacattcagtccctggcaggctgttgaactgagagcctcagtttcgtgctggctgttggttgtagttaaccctgaattccttcccatgtgccctttgcaaagccatcaaggcagagagacttgcctagcaagtaggatattacagtcttctgtaatataatcacatccatgaaatcctctatatatcccatcacctttaccatattctgtgggttagaaacaagtagcaggtcctgcccacactcgagaagaccagatgacacaaagatgtgattcaaagtggggatcatcggggccatcttaggtttgtctgcagtgatcactgtgccatctctctctctctcttttttttttttttttttcgagacgaagtcgtcactctgtcacccaggctggagtgcagtggcatgatctcagcttaccacaatctctgcctcccaggttcaaatgattcttctgcctcagcctcctgagtagctgggattacaggtgcccgccaccacacccagctaatttttgtatttttagtagagacagagtttcaccatgttggccaggctggtcttgaactcctcacctcaagtgatccacccacttcggcctcccaaagtgctgggattacaggcatgagccaccatgcccagccccatctctctttaaaaaacaaacaaacaaacaaaaaacataaaaagaagcagagaacacatacacatctgcatcttcccttgtttacttaacaatagatcttggaagtcacttctcagtagaggctaggttgggcagagcattggattctaggccagtgagtttggacttgaccatggagacactaggaagcccatgaaggacagagagagatgcctcgaccctgccagtcctttagaaagatcacccagtgctttttgtataccaaaccctatttgaaatacttacgtatattaacccatttccttatcaccacaaccctgcgggaagggagataggcacttttattatcttcattttgcagatgaggacattgaggtccagagaggttatgtcacttacttaaggtcacacagccaggaagtggtagtagggactcttacccttgttttacagatgagattgaattatctcacgaaaactcagaaaggttaaacaacttgcctaagtaacatacagctaattagtcgaggagcctgacgcatgttgctctagcctggtcacagttacagaggtggcaagcaatggcctgaacaggacgaacaaccaaatacccaggctggtggctcttaaacatggtggggtcagctaacgacagcaaccagggtgggcactggtgcccctcgcccccggctggtgccctaacatctcccttttctctaccagttcagaatctataacgtgacctacctagaaccctccctccgcatcgcagccagcaccctgaagtctgggatttcctacagggcacgggtgagggcctgggctcagtgctataacaccacctggagtgagtggagccccagcaccaagtggcacaactgtgagtatcaagaggcctaagcaatggtaatctccactctccattcttcccctgtggccagacacttcccctggctgagtctctgggcttttatatcataggatgcctctaatggcaatcctgccattagatacacctgccgtggtgtatctgccaggtaggcaggctaggctgcagtaacacacaagcccacaatttccatggcttaacactataggaatatatttcttgctcacgtaacaagctaacgtgaatgttgctggtttgtaggtggtttccctccctgtagaaatctggggagtgaggttctttccatcttgtggtgccatcattctccaggacaaagattcttacctacttttgtgtcctggtttcctttggcagcctggtgaagcctatggacctcatttcagaatatttttaaatacataaaatcccagcctgggcaatatagtgaaacccccatctgtacaaaaattagccaggcatggtggcatgcacctgtagtcccaggtactgggaaggctgaggtgggaggatcacttgagcccaggagtttgaggctgcagtgagccgtgatcgtaccactttactcccacctgggtgacagagcaagagcccatctctaaaaataaataaatacaatgaaataaaataaaataaatagaactacagaggaaactaattgtattgaaatgcagttataaaacatttaaacacatttttaatctagagatatatgtgcttctttattaagatctataaataataagttctaggggtagctcgcataaatactgtaatttcaaagtagataagcataaataatactttatgatactgaaattgtgatgtgatatgagaatagctgtgagttttgttttgctggggacaggatcactgatgctgtcattactggggtctcttccctccattctttttttaaaattgtattttattttatttttaaaattttaaaataaatagagacagggtatcactatgttgcccaggctgcttttgacctcctgggctccagtgatcttcccatcttggcttcccaaagtgctgggattacaagtgggagccagtgttcctggccccttcctccattcttaatggaaggagatgctaggtgtgagaggttagggaaagtaaagatgtaatttctttcccatccaagttctcagacccctgaattctacctgcagccatgttggtccatcaaccccaagtgaagaatccctgctctagggccccaccattgtctgtatccagccagcagaagaggcgtgattatggagatcacatctgcttcttgaaagcagacagcccggaagtgggccgcatcacttcctctcaaattctattggtgaaaatggtcacatgactacacatagccacaaaggaggctgggaactttctcacttggaacctacatcccagaaacaactcttttcagtgaggtatcccacaggtctttcgcagtagaaatattgattatctcacataaaatgaagtcttacaaatggacctactgggttttgtacagcagccaagtgatatctcttcccttctgctgtcttcccttctgccatccttcacatggtggcattgtatccttagacttgccacccatgccctcaggttggccgttgcacactgtcttacataaagcaggaaggaaaggaaaggctgctacgagagagtgtaccttgtgcatctcttttttaatcaggaagcaaacatctttctagaagcttccctagcaaaattccccttacatctcattggccaagactgttacatgttacatggttactgttattacttgctcattgcaaggaagactgggaactcaaatgcctggaaaaaggaacaggataatcgtgattggctcaagccttagggtgggcatggctccctgacaagggagagaggaaaaagctgttgagtgaagaagactgcttcagtttccccatctgtataatgggaggagtaagggctgtcgtgaaaactcaatgaaagaagattcttcaacgtggtaggtgcagtggcagctggcagtaccctgaccctgccaccgcacagccctctcagcattgctcatcctgcactgtggatatcagttgagccacgtgtctcctgccctgggctgtgagctccataggcagggtctccatggctgtatctccagaacccagcacagaaccaggtgcttgggaaagttttgaattgattctcatctgccattggcatggggaagggaactagcttgtatgaaacagataacaatgtatgggaccctcattcattatttcagcaaatatttgctgagttcctcctacatggctagccctgtgctagacactggggaatcggcgatgaacaaagcagatagaaatccccactcttgtggagctgacattctggagggagagacaaaaagcaaacatataaagaaagaaagaaatcacatggatctggatgacagtgagtgctgggaagaaaataaaagcagaggaaggggatggagcgatgggcagggggcaacggtagggagggtgtcggggaaaactttttggagaatgtgacgatgaaagtgaacaaggagaagtcaaccgtgttgagatgatggcagctaatgatgtggacaggccactctgttctgagtgcattatctattgattcatcatgtcatcctcgcaacagccctgcacgatcaattctgtcattaaccccatagtacagatgaggatgcggaggcacagagaagataagggacttgtcctgtgtcacacagcaaggagccatccggctcctaagttggtgcatttgacttctgtgcttccggaaagaaagagcagcaagtttaagatctggaggtggcactgagctttggaggagcagggggcaatgaggtggccggtgtgacgaggactcaatgtgcaagagggagagtggtggggagatgaggtggaggggtggtcggcggtcagatcgtggagggtctcggacgagggtcctgaccctgggtctccagtcctgggaagtggagcccaggctgtaccatggctgacctcagctcatggcttcccctcccacttccagcctacagggagcccttcgagcagcacctcctgctgggcgtcagcgtttcctgcattgtcatcctggccgtctgcctgttgtgctatgtcagcatcaccaagtgagtcctgggcccagtgctgccgagcagtccctctggagtgcagggtggcagggacttgcccctctagtctgcccctttgcagtcctctcagtcaataatacgtatttactgagcagctactacacaccttgagagtagagctgagaacatatcgacaaggaccccacttttttcttttttttttttttttttttttttgagacggagtctcactctgtcacccaggctggagtatagtggcacaatcttgcctaacagtaacctccgcctcccgggttcaagcaattcttctgcctcagcctccagagtagctgggattacaggcgcatgccactatgcccggctaattttttgtatttttggtagagatggggtttcaccatgttggtcaggctggtctcgaactcctgacctcatgatctgcctgcctcagcctcccaaagtgctgggattacaggtgtgagccactgcacccaaccaggactccacatttctaaaaccggcatcctactggggagactgaaaatacatatcaatcacaaacaggtggttttccatagtgacccactctctgaatgcactagaccagggtggaggccagagatcttctggggtgctttttgcaagggggaccaggataaggctctccaaggagggaaaatttgaggggggccctgactggggagaatgagctggccagggataagcaagatggagtcatcccacatccccttacaacactgggtgcctgggcaactgggggcatttgggggcatgtggtaggagccagaggaatttgcgacgattgccctgatggagtcaggagacctgggtttgaatcctggccttggagcttggtagctggcggccgacaagttgctgaaacccctgagcctggggttcctgctttgcagagtgacagtgatggtgagaacatatttcatcagccagaagaggccaaatcacagtaaaggctgagggaggagatgagtggcgagtggctgggaggtggtggaaggagcctcgtttccagagagctcttgccagcccttggaatcatggtgtctcagagcctcagtcctcccatctctgaaatgggactagcaagctcaacctcactaagtcaggattagaggtggctaaggattattaacatgattgatgaaagtgcccactcttggcccagcacacactaggtaggcagggaatgcaaattcccctccatatcttgtcactgatgcctccgagcaaccttggactgatcgccttgctctgagcctcagtttccccatcacctgtacctcttcccactccccatcactatatcccagcatgccagcctctttgctgttctttgtctttggtttcttgttttgttctgttttttagacagggtctcactctgttagccaggctgaagtgcagtggcgcggttacggctcactgcagcctccaattcctgggctaaagagatcctcccatttcaacttccagagcagctgggacaacaggcgcttgccaccacacctggctaattttcttattttaatttaattttattttattttttgggacagagtggagtctcaaaaaccaagctagagtgcagtggtgcgatctcgactcactgcaatctctgcctcccgggttcaagcgattctcctgccttagcctcccgactagctgggattacaggcgtgtgccacgacacccagctaatttttgtatttttagtagagatggggtttcaccatgttggccaggatggtcttgaactcctgacctcaagtgatccacccacctcgttctcccaaggtgctgggtacaggcatgagccactgtgcctggccaattttcttacattttgtagagactggctgtcacttatgtagcccaggctgatcttgaacttctacccctttatctttattcatggcacttattaccatgaatgaatgacctcatataagcatttctttcgtttttttttttttttctttgagatggagtctcatgttgtcccccaggctggagtgcagtggcgcgatctcagctcactgcaacctccgccttccgggttcaagcgattctcctgcctcagcctcctgagtagctgggattgcaggcgcctgccaccatgcctggctaagttttgcatttttagtagagacggtgtttcaccatattggccaggctggtctcgaacttctgacctcaggtgatacacctgccttggcctcccaaagtgctgggattacaggcgtgagccgccatgcctggcctcatataagcatttctgtctccatttatcatccatctttccctcttgaaggtcagtttcaccaaggcaggcatctttgtctcgttcactgttgtggcctcagggccaggcacagtgagtcaaacatagaaggtgctcaataaatatgtgtttatttattgaaaccatgggcagaggctaattcagaagcggtctgaggaccttacctcccagtgatgatgcaccatggccccaggcaggccaggaagagagaagggttgtgtttctccgtaggtcccccagcttcccaggccatcccaggccattccctggtcatttgccctcagctgctctgaaaaagggattgttgaggggaacctagaatcctctctctgcagtttgagtctttcctaatcccctggggtctcattcccactgaggacataggtggcctcctcaggaactctgtgctgggtaacagaatgcgggagtgtgaacctggctctgccacctaccagctgtcactccacctccttgggcctcactctcctcatctgtagaatagggttagcaatagaatccatgtcaccaggttagaatgatgagtcagtggtttgacctccagaaactaatcagcctgatctctgatgccaaataagtattggtgataacgaccacttttatgggaggagcgttcacctgtcaataattcagagatcaacaccttttccttttgtttttcaggattaagaaagaatggtgggatcagattcccaacccagcccgcagccgcctcgtggctataataatccaggatgctcaggtaggagtaggcgtggatgaggacatgtgggactgtgtacatgaagaagtgtggttcagaacacctgggctgttaaggaccttcactggcttctggaatggcaaatagacagtcaggagggttgcaggggagacagaggcagaagccgaatgaggtcattagcagaccagaggctttcccgcccttccccttggcaatcccagcctggggtgggcttctctggggttggtttcctgtttttttccctccccttgggagaatgacccttgggtcatcatcactgtgtcattccctggggaggtgccagtaccagggctagaggccagaaggagtggaggaaggagagggtgacaggctttctgtgtcttcttcttaagcataggaaactgcccccgaagcactagcaaatcccttccgggttctcattggcctgaaatgtatcccacccctaagccaggggtggagtcagcttccccaaggcgatggtcctgtgggtgagtgggtggggtttgcctgagcaagatgagagttctctaggtaggagaaagggggattataggtcctgtctagaagagaaggtctgagggtccttgcttttccagggactctggaatctagtggtgttggctttgaatcctgactctgccactcactggcagtgtggacttgagcaagttgcttaattctctgagcctcagtttcctcttgtgggttataacagtgtttacctggtaggacagatattggaatttattgagacaatacatataaagtgcatattccagcctcttgcaaataccaagtgccatttatgtatcagttagtgtttgctgtgtaacaaatgaccccgaaatgtagagggttacaacaactttatttagcttatgcttctgcaggctggcatttggggctgggctcagcagtgagggtggcgggggaggctgggctgggctgggctgggcagatctgaattgagctgacccgtccccgtagcctccctccgtgtctgacagttggctttttttttttttttctttttctgagacggagttttgctcttattgcccaggagtgcaatggcgtgatcttggctcactgcaacctctgcctcctgggttcaagcaattttcttgcctcagcctcccaagtagctgggattacaggcatgtgccaccacgccaggctaattttgtatttttaatagagatggggtttcttcatgttggtcaggctggtctggaactcctaatatcagatgatccacccacctcagcctcccaaagtgctgggattacaggcgtgagccactgcacccagcctagttggctgacttttacctgggacagtgcaggtgcctgagccatgtgcctctcactctccagcaggccggcccaggcttgtttacagagtggctcagttttcaagggtgggaagtcccaaggcttcttgaggcctaggcgcagcactggcatgatatcacttccatcacattctatgggcccaagcaagtcccagggccagtgtagattcaagggatgggaggagattcagagcactcctctgtggccacttttgccatcgaccacagtccctgtaaatattaggacaatgtaattaattcccaggaatctgaggctcagaaagcgtaagtgacctgttggacttctgatctgtgtgatgtcgaggcttgtaccccttcctgagcattgccgtactccaggccgggctgcaaggccactctgctctttcattggctgtctctgtattttaggggtcacagtgggagaagcggtcccgaggccaggaaccagccaagtgcccgtatgtatctgaacttaggtcacagcctgcatgcattgggaaggtgatagaattggagaggcaagcccctagctccatgtctgccttctcttccctgcattcggtaattgccctgtgacattagccttcaagggacggcaggaggaggggtgttctggaaacgtggactgctggccaagccccctgagtttcactggtgtgtcaggtacatggtgataccccttgggagtgctgttatagttaacaaccagagcagccgtgcctgttgttaaaatcttgacctaattgtatacttgtcggcaaatagccactatcctgaacactcccctccttttttttaatatacaggatctcactctgtggcccaggctggtgtgcagtggtgcgatcatagctcactgcaccttcaaactcctgagctcaagtgatcctcccatcttagcctcccgagtagctgatactacagatgtgcattaccacgcctggctattttaaaaggtttttgcctgtaattccagctactcaggaggctgaggcatgagaatcacttgaacccgggaggcagaggttgcagtgagcgcagattgtgccactgcactccagcctgggcgacagagtgagactcttgtctcaaaaaaaataataccaaaaaaagtttttgtaaagacaagctctcgctgtgttgccccgccactgtggcctccttagcttcttccctggggcctgctggacctttccatactccagaaactaaagggggtccaggaccctgcttcaaccctaggatcccgcatcttttttttttttttttttttttggacgcagggtcttgctgtgtccctcaggctggagtgcagtgattcactgcagcctcaaactcgtgggctcaagtgattctctagcctcagccttctaagtagctgggactacagtcatacaccaacatgcccagctaattttccttttttttaattcttgtagagatgtttgagacggcttgggctctgttgcccaggctgttctcaaactcctgagctcaagcgatcctccctcctcagcctcctaaagtgctgggattacaggcgtgagccaccgcacccggcttccatatcctttctaattggtcatggcttgggataatggtgttgcttttaattatcatcatccataaagactttttcttactcaacagatctgagcttgtatttggtgcccaggacatgtgctgggttcccgaaatcccaaagacacagaccctaccctcagggatttctcattctagcaacatagactgatcaattactgattataacgttagaaggcatgtctgaagtagacagccatcaggacatggtgatttcaggctgggctttgaagaatgaataggagtttttcaagtgtcgaaactgaaccctgaccaacctttgcttttgcagacactggaagaattgtcttaccaagctcttgccctgttttctggagcacaacatgaaaagggatgaagatcctcacaaggctgccaaagagatgcctttccagggctctggaaaatcagcatggtgcccagtggagatcagcaagacagtcctctggccagagagcatcagcgtggtgcgatgtgtggagttgtttgaggccccggtggagtgtgaggaggaggaggaggtagaggaagaaaaagggagcttctgtgcatcgcctgagagcagcagggatgacttccaggagggaagggagggcattgtggcccggctaacagagagcctgttcctggacctgctcggagaggagaatgggggcttttgccagcaggacatgggggagtcatgccttcttccaccttcgggaagtacgagtgctcacatgccctgggatgagttcccaagtgcagggcccaaggaggcacctccctggggcaaggagcagcctctccacctggagccaagtcctcctgccagcccgacccagagtccagacaacctgacttgcacagagacgcccctcgtcatcgcaggcaaccctgcttaccgcagcttcagcaactccctgagccagtcaccgtgtcccagagagctgggtccagacccactgctggccagacacctggaggaagtagaacccgagatgccctgtgtcccccagctctctgagccaaccactgtgccccaacctgagccagaaacctgggagcagatcctccgccgaaatgtcctccagcatggggcagctgcagcccccgtctcggcccccaccagtggctatcaggagtttgtacatgcggtggagcagggtggcacccaggccagtgcggtggtgggcttgggtcccccaggagaggctggttacaaggccttctcaagcctgcttgccagcagtgctgtgtccccagagaaatgtgggtttggggctagcagtggggaagaggggtataagcctttccaagacctcattcctggctgccctggggaccctgccccagtccctgtccccttgttcacctttggactggacagggagccacctcgcagtccgcagagctcacatctcccaagcagctccccagagcacctgggtctggagccgggggaaaaggtagaggacatgccaaagcccccacttccccaggagcaggccacagacccccttgtggacagcctgggcagtggcattgtctactcagcccttacctgccacctgtgcggccacctgaaacagtgtcatggccaggaggatggtggccagacccctgtcatggccagtccttgctgtggctgctgctgtggagacaggtcctcgccccctacaacccccctgagggccccagacccctctccaggtggggttccactggaggccagtctgtgtccggcctccctggcaccctcgggcatctcagagaagagtaaatcctcatcatccttccatcctgcccctggcaatgctcagagctcaagccagacccccaaaatcgtgaactttgtctccgtgggacccacatacatgagggtctcttaggtgcatgtcctcttgttgctgagtctgcagatgaggactagggcttatccatgcctgggaaatgccacctcctggaaggcagccaggctggcagatttccaaaagacttgaagaaccatggtatgaaggtgattggccccactgacgttggcctaacactgggctgcagagactggaccccgcccagcattgggctgggctcgccacatcccatgagagtagagggcactgggtcgccgtgccccacggcaggcccctgcaggaaaactgaggcccttgggcacctcgacttgtgaacgagttgttggctgctccctccacagcttctgcagcagactgtccctgttgtaactgcccaaggcatgttttgcccaccagatcatggcccacatggaggcccacctgcctctgtctcactgaactagaagccgagcctagaaactaacacagccatcaagggaatgacttgggcggccttgggaaatcgatgagaaattgaacttcagggagggtggtcattgcctagaggtgctcattcatttaacagagcttccttaggttgatgctggaggcagaatcccggctgtcaaggggtgttcagttaaggggagcaacagaggacatgaaaaattgctgtgactaaagcagggacaatttgctgccaaacacccatgcccagctgtatggctgggggctcctcgtatgcatggaacccccagaataaatatgctcagccaccctgtgggccgggcaatccagacagcaggcataaggcaccagttaccctgcatgttggcccagacctcaggtgctagggaaggcgggaaccttgggttgagtaatgctcgtctgtgtgttttagtttcatcacctgttatctgtgtttgctgaggagagtggaacagaaggggtggagttttgtataaataaagtttctttgtctctttattttttatgtattaaccaaacatacctccagacactgctgtgagtgctgtgtctctgttaactcctggaattcacccatccagaggaaccaggatgcaagaggttaagaaacttgccgtctgggtttgggttccccatacaaggattcaaatagttgatttaggaagtaatcccgggaaaccctgctaaggtagtggggaactgaggcagggaaggacacaaaccaagaaagtgttacctgaaaggggtccagatgcagaccccaaaagagggttcttgaatctcatgcaagaaagaattcagagcgagtccatagagtcagtgaaagcaagttaatgaggaaagtaaaggaataaaagaatggctactccgtagacagagcagccctgagggttgctggctgcctatttttatggttattgattaattatattccaaacaaggggtggattattatgcctcccttttagaccatatagggtaacttcctgatgttgccatggcatttgtaaactgtcatggcgctgttgggagtgtagcagtgaggacaaccagaggtcactcttgttgccatcttggttttggtgggttagagccatcttctttactgcaacctgttttatcagcaaggtctttatgacttgtatcggtgacgacctcctgtctcattctatgactaagaatgccctaacctcccaggaatgcagcccagtaagtctcagcctcattttacccagcccctcttcaaagctccagtttaaataaacctctgacaaaagggtgagttattcaacagattaccagcatgagtaactgatgcttacctgccggggatctctggaagaccatgcatggcacatgcccagttatgcctgcaaaggagagggagctggggtatttgtccaccagctcccatctgtcattggctgagagctgcttccaggagcattaattctccagcacttccagctactccaggaaaaaaaaaattcttcaactgagagttggaggtgttgagagactctggcacaccaagaagacaggaacaggacaccaacagtggctgatgatacactgccaaggtcacacagctagttagcaacagatctatagtggaatccagacagtgtctccatcacccaggctctctgtagtgatctgcgcttcacatccgaggcaggcagagggatggtgtgggccttagatgggaaggctgggaacctgaagctcctatgtctgtatcacttttgcttctctgagtagctgccctgatttcacacttgaggggcttggccattttagattccttcctgctctaggagcctacatactacactggaaatgatggggagctctctacctcacatgcagcctgatgtttgttagaaacacctccttgcgccaggcatgatggctcatggctgtaatcccagcaatttgggaggctgaggcgggtgtatcacttgaggtgaggagttcaagaccagcctggccaatatggtgaaaccctatctctaccaaaaaataaaaaattagccgggtgtggtggtgggtgcctgtaatctcagctacttgggaggctgagttggtagaattgcttcaacctgggacgcggaggttgcagtgagctgagattgtgccattgcactccagcttggatgacagagtgagaccctgtctcaggaaaaaaaaaaaaaaacaaaaaaaaccttgttctaagccaaaatcaatccctttagctgcccaaatcacacagtttacagatggagaaacagttttagagaggaaaagggacttgcccaaagtcacccagagaatggcagagcctgaactagccttctggacttcttgcctccaaaagctctttataataaaatataattttaaataaaaatagttatctgtttagggccaagcaatatgctaagtgccgtccagccactgtgtcatttacgtctccaaacagctctagttgggaggctcaatgattatcccaattttacagataaggaaacaggtccagagaggttgaggattagcctagaaccacacagctaggaaatcctggagccaggatttgaacccgggtctgacctaagagctcccagccgccgtgatatatcagcttatgtcatcctgacacctacgcagatgtcggctcgaatccactttgcctgagcattgtctcagagaaatctaatttaaaaattaggcagcaaatagaaaatatatttgactgctagagatgcaatgggactgggagcccaacaaaggatcttaggcaaaagaaatccaagttgttggcctcagcaactattactgaactggctgggctttgggaagctacagagggatgagaagacctggtggatcaggtgggcccaactcaggctggcccccaccctgcaggaagtaggaaaagtccagggtcataggcccagtgagatgccggctgcgggagtttcagcctccggggctggaccagagggcaggaggggacgcccctgggtagcagcgccagagtgggctgagtggcctgggcccctgcgggggagctttcagagatgttgatttgggggtactccctcagccctgcctttacacagaatttgtgggggatgaggggagggggaaaggggggaggaaggcagtgagtgcatctgaattttttttttttttttacaaaaagtggcttattgcatttttctgattactctatcagcacgtgcagaccttttcctattcagagaaagcctgaagatataaagaggaaagtgaagaaaaaccaccggaaatcccatccccgccccagcatctggcactgtgtgggcgatcacgaaatgagcgcttgtttttgaaggcgtagtatctccgtgaacatccggttgaacaacctttctgactttatttttcccacgaaagttattaattaaaaaacaaaaagcaaaacaccgaaaaaacaaaaaacccagcaagtgtttgagctcccaccacgagggaggcctgacgtcactggatcctcccggcagccgatgaggctgcatgggacttgcccacgatgtgctgttaccgagtggcatagccaggcttcaaaccagagtcctagctaaccgccctgtatataccatgggctcatcatcttccctggttccagctcagaacagagactcagaggaacaagggctctgcgctcaccctgcctggttaggtccagcctttccaattccaagctgtgtgaccatgggaaaagtgtttgcccactctgggcctaaatttcctccttggtaaaaggcacacaagagcagtactctgcacgccacagtggtggggtgagcagcagatgacgtggtgggtggaggccaggtgacaccaggctgctctcaagcttaacttgcctgtgatggtggcgggaccgtgtcagttcttccaccaaatcccacctgtttccacgacgtttattgacaagtcaggggcaccgccccgggtggagggggtgtgaagaggaagtcagctccctggtccctgctgccctctggtgaccacatcagcatcagcacctgctccatcccagcagctccaggtccaggccgtgcccagaaaacttggcctgggagattccccacccgccctgccccgatcccacctctcttccatctctgcattttccagaaattcccccagcaccagacaaaagagcctaatgtccattagatatgctgtgtggcgccaggccagcgtgtaacctctctgtgcttgattcgttatctgtaaaatgggaatcattataatatctgcctcatgtagctattgtgagaattaaatatgttagtacctgtgaggtccttagaactatgcctgcggctgggcacagtggctcacgcctgtaatcccagcactatgggaggccaaggtgggcagattgcctgaggtaggcgtttgagaccagcctggccaacatggtgaaaccctgtctctattaaaaatacaaaaatcagccagacatggtggcgggtgcctgtaatcccagctactcgggaggatgaggcaggagaattgcctgaacccaggaggcagaggttgcagcaagcggagattgtgccactgcactccagcctgggcaacaagtgggactctgtctcaaaaaaaaagaactatgcctgcaaatagttaatgccttaaaagtatttgctaacattcttcttcttcttcttttttttttttttttgagacagggtctttctctgtcacccaggctggagcgcagtggcccaatcccggctcactgcagccttgaacacctgggctcatgtgattctcccacttcagcctctcaagtagctgtgaccacaggtgcacacaccactaagcctggctaatttgttttttaattttttgtagagacagggaatcactatgttgcctaggctagtcccagactcctagggttcaagcaatccatccacctcggcctcccaaagtgctaggattacagatgtgagccaccatgcctagtctgctaacattatccttaatattacactgaatatgtctgtggattttgtgggaggtgagggtataaaacataattagaggaaataatgacattctaaatttaatttgactttattacaaaaagggcagaatggagcaacagtaatccaggacaaaaaattgtcccaatcccatcattcaacccacttgtgtttgtatctgtttgtgccacttctgtgtgttgtttacatgcagagtcagtgtttgcgtatttgcggttttatatcattcatttctcatcatacatacatatatttatattcctgacatttttctagggaatatctttatattcctgacatttttctctttttcccttatgttcttccataccgggacttataggaccttgcccagactcaacttccctcttccccatggacccaagttgctgagcttccaacaggtgtttacagcaaaggagaatgagacagagagaagcagagatgcagagagaaagacagacagagaagactaaactgattgatcccaactccattatgatatctgactccaaccacagaatgaccctgatccagccacagactgacttctgatcctggccacagtccacctcctgtcctcagccacagaacagctctgactcaagccaggaactgagtcccgacccatgttactgacttactcatgatcctggttgcaggctggccccagccacatgctgacccctgaccctcaccacagatggatctttgatcccagctataggctgatctctgattctggctgccctgaaccaccactcctatatactgatgacccaccttagcgtgatcccacccaggaactggcatttcctgggacaggctcttggccacctgctgctctgccctgggcacaccaggccctacgcatcctcccccttccaccaccatccatgatttcctgatttctagcagcaaatttagcttgagttggtcaacatagctgggctgcctgaccttcctctctgccatggaaccacagagcaagtcagcagttctccttcctaatcaaaaagcagcatggaggagaaggctcctttgccaccttcctttctgctttggatggtgcttttgcaatcatgaggagacaagcctggagatgaaaggaggcattctgaatatggtggagtggaagaagaagaaggcctgcctggggctttgattacatcaccaagtgatcaaaccaaccttaaattcttaaataaactgtaagtgtgcttttctttaaaccactgtgagttttcttttgcagtcataaagcaaccttaaaaattgtagtaggtacaataatgaaccccccaagatgtccatgtcccaatccctggaacctgtgaacatgttacattacatggcaagggggggattaaggttacagatggaagcagggttgctaatcaactgaacctgagatgtagagggagattatccttaattatccagacaggcccaatataatcccaaggatcttcataagtgagagatgcaggagaagccaagtcagagagagatttcaaaatattatgctgctggctttgaagatggagggaagggccatgggctaaggaatgcaggtgaccacttgaaactggaaaagtcaaggaacagacttccctagagtttctggaatgaacacagccttgttaacaccctgattttgagctcagtgagaccagtttcagacttctgacctctggaattgcaagatcataaatttcagttttaggccactaaacttgtggaaatttgtcagagaagcaatgggaaatgaacgtgcaggtgcattcacgcatccaactttaggctctggactcttcctcaagctccttccccaatccccatcctctccctctttattggcactcaatcttcacttccagaggatcctgccaaattcctgcccattccatatcggcatccaccctttcttgttagagtggacgtagggcaggctggctccacagctgtgcgccaggcagcagcccgtacccccctgctcggaggacccctactcttcagtgtcatgctctgaagtcccagttttgaaattcttggccaggcgcagtggcccacacctgtaatcccagcactttgggaggccaaggtgggcggatcactcgaagtcaagagtttgagaccagcctggccaatatggtgaaaccccgtctctactaaaaatacaaaaattagccaggcatggtggtgcatgcctgtaatcccagctactcagggaggctgaggcaggagaatcacttgaacccgggaggtggaggttgcagtgagccaagactgtgccactgcactccagcctgagcaacagagcgagactttgtttcaaaaaaaaataaaaaaagaaaaagaaattcttaaaaattttatctctgaagttgtgttttatagggaggtttaatgggaccaaggagcacccattgagggcttggagcctcagctcacacagggtcccacctcctgcctgcttccctgggacatctgccacctgcctgcttccctggtacaggctcctggccacctgctgctctgtccccagcacaccaggccctactcatcctccccattccaccaccatccatgaccattgctgccttctgcccttgaaggaggcctgggcacaggtgcaaaggatcatcaaggtcagtagctcacctcacgggaccttggggtggagcatggtgacagccattcctaccccagaggtatctgctgggcagccagaagccacaactcagcccacttctaatccaggaaccaagagtgaccatcttgatttctcagcccttttgttttttctttttgagacggagtctcgctcttgtcccctaggctggagtgcagtggctcaatctcggctcactgcaacctctgcctcccgagtacaagcaattctcctgcctcagcctcccaagtagctgggattgcaggcatgagccaccatgcccagctaattttttatttttagtagagacggggtttcaccatgttggccaggctggtctcaaactgctggactcaagtgatccgcccgccttggcctcccaaagtgctgggattacaagcgtgaaccaccgcgcctggccaaattatcagccctttttgaataagaagacctgcatttttattttgcacagtgcccctccaatgatgcagccattcctgatgcggggtcattccctctctcccaggctgagctctcttctccctctggaccctaaaacaccatcactcccctgtgtcttcacctgcctccctctgctggcctttcctcattgccacacatatctactcaagtctttccatcttcaaacagcccaagcttccctccaccccggctcctatttctctctcgccttctctcccccagccacagtgcttgtgctcaaaagctgtctcctctcttgggcttcacttccttcctctgcacccactcctctaccctctctgtgcagagtcggcctgactctgctactaaactactttcactgaagccagctccaccacccaagccaagtctcagtttcaatccctactactctgtggcactagcatctccctcactcctgaaactcggcccctcttggttctctgacactggctgtttgttcctgtccagtctctttttctttttttctgaggcagagtcttgctctatcacccaggctggagtgcagtggcgcagtctcagctcactacaacctccatctcccaggttcaaacgattctcctgcctcagcctcccaagtagctgggattacaggcacccaccaccaccacacctggataatttttttgtatttttagtagagacggggtttcaccatgttggccatgctggtcttgagctcttgatcttgtgattcgcctgcctcggtctcccaaagtgctgggattacaggcatgagccaccgcacctggctccagtctctttttccaaggtcttctcctctgccctctcttacacgttaggggtccgcagggcccatctggggccctccccatctcctctcctctttccacagagttaattacaaccttcactaaatctgtactggagtcgcatggatcaggaactgtgtggtccacagcccagcactgtgcttggcacatagagcatactcaataaacatttactaagtgaatgaatgaatgaatgaatgatgtcttctaaatatatctccccagctgagatctcttgcctgaactccagagttatacattcaactgcagttgggtatgtctcagtttccacatctcccacccaaacattttgcatgtcctagctagtagccattcctatctcgtgtgacatatgttattatatattgtatatattattaagtcttttatttcttatttctcaccaggtctcccatatctcccccaaagaaagtagactcatggtgggcagagatttcagtttggttggctcattgccttatcccagggcctagaacagtgcctggcacatagtaggtgctcaataaatacttcttggctgggcaccatggctcacgcctgtcatcccagcactttgggaggccaaggcaggtggactgcttgagcccaggagtttgagaccagcctgggcaacatggcaaaactccatctctacaaaaaatacaaaaagtagccaggcatggcggtgcataactgtagtctcatctactggggaggcttaggtgagaggatcgcttgagcccaggaggtcgaggttggagtgagccacgatcacgccactgcactccagcctgggcgacagagaccctgtctctaaataaatacacaaaaataagtaaataaataaatacttcttgaacagatgaatggatctccacagagacatccccacatctcagattcagtatatccaaacgagctctttctcatcctcgccaaacctcctccttctggttcctggttttgattgctaaagcaagagagcgggtgctcctcaattgactacctccttcctccctgcagaacttccggtactgtgagtctgtccctgggaccctgctctccagctcctctgttcagccatgtcagcctccctattgtaacccctgggtttatgccggtagtgtctttatcaaacactcccccatgccaggaccaggaccatctttgtgactgcgtccttccctgctccctggggtccctaagatgattttaggtggcatgtgggcatagtgagctgagaaaacaattcctttttcagttctctttctcttctccagattagcctaccacaggctgcagcatctagctggaagttaatcactcggttttggtttcaatgggcttgtttttacagttcccttctatttacagtaaaggatcctgatctttcatgtgtgatggtgacaatgtttcatttgacaataaagtgatttaaacaaagcgaggaggccaatatgaagaaaatgtaatgatggagaaaaaatgtaaatacggcagaa

SEQ ID NO: 522 - DNA, 4058 bp, Homo sapiens
ggttgcagtgagccgacatcacgccactgctctccagcttggggaacagagcaaacctccgtctcaaaaaaaaaaaaaaaaatctagggaagttgaaaacattttgcagtcaaagctatctttgctatctgcatcttgaaataaaataaacattcatacatgtaacctcattaatctgattagagatagtgataagtactgggacagacataaacagggtgctgtgataagaagtcacagggagggcccgcattagttgaggggggtcagagaaggcttctgaagtgtttctggtgcaaatgcttggaaaagggagagctgggagtgtatcccagggctgaggccaatggaggattgcagaagagggagaggggataggaggggaatgttagagggataagcaggggaattggctcttttcttcattttcttaaattaaactttttattttcagataattaaagatttacacacagctggaagaaatcatagagaagccgggcgtggtggctcatgcctataatcccagcacttttggaggctgaggcgggcagatcacttgagatcaggagttcgagaccagcctggtgccttggcatctcccaatggggtggctttgctctgggctcctgttccctgtgagctgcctggtcctgctgcaggtggcaagctctgggaacatgaaggtcttgcaggagcccacctgcgtctccgactacatgagcatctctacttgcgagtggaagatgaatggtcccaccaattgcagcaccgagctccgcctgttgtaccagctggtttttctgctctccgaagcccacacgtgtgtccctgagaacaacggaggcgcggggtgcgtgtgccacctgctcatggatgacgtggtcagtgcggataactatacactggacctgtgggctgggcagcagctgctgtggaagggctccttcaagcccagcgagcatgtgaaacccagggccccaggaaacctgacagttcacaccaatgtctccgacactctgctgctgacctggagcaacccgtatccccctgacaattacctgtataatcatctcacctatgcagtcaacatttggagtgaaaacgacccggcagatttcagaatctataacgtgacctacctagaaccctccctccgcatcgcagccagcaccctgaagtctgggatttcctacagggcacgggtgagggcctgggctcagtgctataacaccacctggagtgagtggagccccagcaccaagtggcacaactcctacagggagcccttcgagcagcacctcctgctgggcgtcagcgtttcctgcattgtcatcctggccgtctgcctgttgtgctatgtcagcatcaccaagattaagaaagaatggtgggatcagattcccaacccagcccgcagccgcctcgtggctataataatccaggatgctcaggggtcacagtgggagaagcggtcccgaggccaggaaccagccaagtgcccacactggaagaattgtcttaccaagctcttgccctgttttctggagcacaacatgaaaagggatgaagatcctcacaaggctgccaaagagatgcctttccagggctctggaaaatcagcatggtgcccagtggagatcagcaagacagtcctctggccagagagcatcagcgtggtgcgatgtgtggagttgtttgaggccccggtggagtgtgaggaggaggaggaggtagaggaagaaaaagggagcttctgtgcatcgcctgagagcagcagggatgacttccaggagggaagggagggcattgtggcccggctaacagagagcctgttcctggacctgctcggagaggagaatgggggcttttgccagcaggacatgggggagtcatgccttcttccaccttcgggaagtacgagtgctcacatgccctgggatgagttcccaagtgcagggcccaaggaggcacctccctggggcaaggagcagcctctccacctggagccaagtcctcctgccagcccgacccagagtccagacaacctgacttgcacagagacgcccctcgtcatcgcaggcaaccctgcttaccgcagcttcagcaactccctgagccagtcaccgtgtcccagagagctgggtccagacccactgctggccagacacctggaggaagtagaacccgagatgccctgtgtcccccagctctctgagccaaccactgtgccccaacctgagccagaaacctgggagcagatcctccgccgaaatgtcctccagcatggggcagctgcagcccccgtctcggcccccaccagtggctatcaggagtttgtacatgcggtggagcagggtggcacccaggccagtgcggtggtgggcttgggtcccccaggagaggctggttacaaggccttctcaagcctgcttgccagcagtgctgtgtccccagagaaatgtgggtttggggctagcagtggggaagaggggtataagcctttccaagacctcattcctggctgccctggggaccctgccccagtccctgtccccttgttcacctttggactggacagggagccacctcgcagtccgcagagctcacatctcccaagcagctccccagagcacctgggtctggagccgggggaaaaggtagaggacatgccaaagcccccacttccccaggagcaggccacagacccccttgtggacagcctgggcagtggcattgtctactcagcccttacctgccacctgtgcggccacctgaaacagtgtcatggccaggaggatggtggccagacccctgtcatggccagtccttgctgtggctgctgctgtggagacaggtcctcgccccctacaacccccctgagggccccagacccctctccaggtggggttccactggaggccagtctgtgtccggcctccctggcaccctcgggcatctcagagaagagtaaatcctcatcatccttccatcctgcccctggcaatgctcagagctcaagccagacccccaaaatcgtgaactttgtctccgtgggacccacatacatgagggtctcttaggtgcatgtcctcttgttgctgagtctgcagatgaggactagggcttatccatgcctgggaaatgccacctcctggaaggcagccaggctggcagatttccaaaagacttgaagaaccatggtatgaaggtgattggccccactgacgttggcctaacactgggctgcagagactggaccccgcccagcattgggctgggctcgccacatcccatgagagtagagggcactgggtcgccgtgccccacggcaggcccctgcaggaaaactgaggcccttgggcacctcgacttgtgaacgagttgttggctgctccctccacagcttctgcagcagactgtccctgttgtaactgcccaaggcatgttttgcccaccagatcatggcccacatggaggcccacctgcctctgtctcactgaactagaagccgagcctagaaactaacacagccatcaagggaatgacttgggcggccttgggaaatcgatgagaaattgaacttcagggagggtggtcattgcctagaggtgctcattcatttaacagagcttccttaggttgatgctggaggcagaatcccggctgtcaaggggtgttcagttaaggggagcaacagaggacatgaaaaattgctgtgactaaagcagggacaatttgctgccaaacacccatgcccagctgtatggctgggggctcctcgtatgcatggaacccccagaataaatatgctcagccaccctgtgggccgggcaatccagacagcaggcataaggcaccagttaccctgcatgttggcccagacctcaggtgctagggaaggcgggaaccttgggttgagtaatgctcgtctgtgtgttttagtttcatcacctgttatctgtgtttgctgaggagagtggaacagaaggggtggagttttgtataaataaagtttctttgtctctttattttttatgtattaaccaaacatacct

SEQ ID NO: 523 - protein, 819 aa, Homo sapiens
MGWLCSGLLFPVSCLVLLQVASSGNMKVLQEPTCVSDYMSISTCEWKMNGPTNCSTELRLLYQLVFLLSEAHTCVPENNGGAGCVCHLLMDDVVSADNYTLDLWAGQQLLWKGSFKPSEHVKPRAPGNLTVHTNVSDTLLLTWSNPYPPDNYLYNHLTYAVNIWSENDPADFRIYNVTYLEPSLRIAASTLKSGISYRARVRAWAQCYNTTWSEWSPSTKWHNSYREPFEQHLLLGVSVSCIVILAVCLLCYVSITKIKKEWWDQIPNPARSRLVAIIIQDAQGSQWEKRSRGQEPAKCPHWKNCLTKLLPCFLEHNMKRDEDPHKAAKEMPFQGSGKSAWCPVEISKTVLWPESISVVRCVELFEAPVECEEEEEVEEEKGSFCDESSRDDFQEGREGIVARLTESLFLDLLGEENGGFCQQDMGESCLLPPSGSTSAHMPWDEFPSAGPKEAPPWGKEQPLHLEPSPPDTQSPDNLTCTETPLVIAGNPAYRSFSNSLSQSPCPRELGPDPLLARHLEEVEPEMPCVPQLSEPTTVPQPEPETWEQILRRNVLQHGAAAAPVSAPTSGYQEFVHAVEQGGTQASAVVGLGPPGEAGYKAFSSLLASSAVSPEKCGFGASSGEEGYKPFQDLIPGCPGDPAPVPVPLFTFGLDREPPRSPQSSHLPSSSPEHLGLEPGEKVEDMPKPPLPQEQATDPLVDSLGSGIVYSALTCHLCGHLKQCHGQEDGGQTPVMDCCGCCCGDRSSPPTTPLRAPDPSPGGVPLEASLCPASLAPSGISEKSKSSSSFHPAPGNAQSSSQTPKIVNFVSVGPTYMRVS

SEQ ID NO: 524 - DNA, 165799 bp, Mus musculus
  misc_feature (1)...(165799): n = A,T,C or G
agtcaaagcccatggtcgattttaaaacactgcttatgctggctcttaaacaccataagtctgccacatactttaacttaattattcacttgtcaataaaccagataggtacaactcaagcccaactgccgatacaatggtttagactccaaagataacaagataattggagccatgagtctgaaaacataataaacaccttcaaaattatgagttagtccaatgatagcctcacttgggactttgaagggactagttttgaatggctgtttggcccaaatgtagaatggtgtgtcttacccatggcctgccattcccattctaactgggtggtcatttaccttcaaagtttttgtccagatcttgaaggccttcattcaactcttgagcactcgtaccacggaagagcccataggtaataacaatggtaccgttggagatagcatctgtaaagaaaatcctgctggtgatccatgcctgagtcgcaagaatggagcagatgacaacaactgagcccaggcttgtgagaaagccagacaggaacatcaacgttttctgtgtggttggcattttctcaggaagaaagctccccgcgataaaacaacagcaaccttagaatatttgggggccttatcatttgggatccagtatttagaaaggacgtctagcacttggttgtaaatgtaaaacctgcgtcttcctgggaagttttatgcttactgaacgttgacctgtgaacaaagccataaagacgtgcagaagctgaactttggtcttgcagaaacggttgttatggttgcagccaaccagcatgaagaagggctaggcaatcctttcaggtcttcctcaatcacatgactagtttatagcctttatcatgctgtggaagccaggttaatctacagtgtaacttgaattctcaaatcatgagaatagagacttagaccccaaagggatagcatagggatccccaaagcaaacctcaaggctttgtcaaggtcctgtgaagtggaaagagaaaggctcactcttccttctgggttatatacctccttattctcagatcatattagggaggagtgcccatcaaattctctcttccaaatggcattctatttgaatctgatttaaatgataatctttatcagtttttagtactttgttaaaagtggttctaaacattcctgcttagatctgtgtcctagttactttcctattgctgtgacactatgaccgaggcaacttacaaaacgaagcatttaactggaagcttgttttggtttcagtttcagaagcttagtccatgttcattgttcattgtgacagtgagtatggcaggcctgggacatggcattggaggaatagctaagagcttatatcctgacctgcaggcaggaggcaaagtgaaaacccagggctgggcccagcataggcctttgaaacctcaaagtccatcccccatgtgacacacctcctccaacaagaccacacctcttaatccttcctaaacaatccatcaagtgccaaccaaacatttaaataagtgagcctatggggggggggcatcctcattctaaccaccatactctctaactcctgccttatggccttgcagctagcttggcctagcagttagtccttggtggtacttacccactcatttcttgagattacagacagtcacaaactattctttcatttttctttttcttgtgttctttgattacagaacaatattgaacatgtatatcagaaccctgtcctcttagataacctacttacctgtgggatgagggctctcctcttgtaaatgtagaaaagggactgaagacacagaaatcactagactcagtcaattcacttctgggggaaagagacacatatagataattatagaataataatgttgaaagacaaggcaggcatcaagctgaagtcagaacaggggacataccacacttctgtcaccacatagatagatagatagatagatagatagatagatagatgacagacagaaagacaaatgatagattatagaaagacacaggatagatagatagatagatagatagatagatagatagatagatagatagatagatagatgacagacagacaaatgatagatagattatagaaagacacaggatagatagatagatagatagatagatagatagatagatagatagatgacagacagaaagacaaatgatagatagattatagaaagacacaggatagatagatagatagatagatagatagatagatagatgatagatagatagatagatagagcaaaaaaatcaagtcaccacattaggctctctttatctctgtctctctgtctctttatctgtctctttgtgtttatgtgtgtgtctctctctgtctctctctgcctctctgtctctctttgtctctatctctgtctttctctgtctctctgtctctctctctgtctctctctgtctctctgtctctctctgtctctctctgtctctctctgtctctctctctctgtctctctctctctctctctctctccctccctccctcttctcttcccctgggggaacttcttaaactgttgctaaagggaagcagaagcagaaggacttttgtatccagctgaaaaaacccaaacaaggtttgtggcttctggagcatttggagcatatggaacaggattccagtcacagacaagcatggctcaagaagcaattccaagccctcttaaaacttcagcctaaggctttgctgcccactgatagggtgagactctctcaggccagctgtggaacatccagggagggctgtggtcatcatgaagattccagaggttggattgtgctgaaactcttcaaaggtccagtcaaccagggtatccaactcttgggggatgcttcagtcattcaggtcaggaagcagaatgatcatgccttaagcctgggctggctttttcctggaggaatggcttctacagacacatcttaacaaggctaaaactcatctagaacactcaaagacattgccttcagtcaacagcaagaaatcgcaagcgttgcagtaaaatgaaaacaaggcaggaaaggaacaaggagcccttagtcccaccaccatcaatagaagcacactcaaagataatataggtgtttaaagtaggagacaagaattaccaatgctattatagaaaaaaatgctcaatgatttaagagtaaagatgatataatgcacaaacaaaggtgtcagtcaggtttagttatcaacttgacatacctgggaagagggaatttcgattcaggagttatctccattggattgaccagtgtgggcatgcctgtgaggcattttcctaattgctaattaatgcgggagaacccagcccaataggggcggtgctatccctagacaagtaggcctgtgctgtataagagaggtagctgaggcagccagagaaacagtccagagagtagagggcatccatggtttctcccttcggtcctgtcttgagtttctgctttactccccacaatgatgaactaagcctccctccaccccacatccaatctcaatgcttatcacagcaaaagaaatactcatagaacagtaggaaacctctgaagaacaataaaaattatttttttaaataaccaaatgaaaaaaaactatgatctaaacataaaataaccgaaacagaaagttcactgaatggatttaacagaatccaaagcactataggggaaagagcagtggtcactcatcacaataaaaaccatccaaactcattggcttagtggcccagtcaacagctaggaggaagcaggtacgtatcaccagagtttggaaagtgggtggcaagggaaacatttttgaagattaacattattcatttttattttatgtatttgagtgttttggctgtgtgtccatttgtgtatcatcaagagggagtcagattccttggaaatagagttctagataatagtgagctgccatatggatgctgagaaaggaacacagaccctttgcaagagcagaaggtgctctaaactgctgagcaattttttccagcacaacactgaattaaaagaaaaaaagtttttttttttttgctttaaaccaataagacttagaaagtcacaatgaaacattttaaatcacatttctttttgtttcgtgatataaattatatttataaagtaaataagtatcaacattcaacacacatccaaaaccagccaccagccttgggactgagaaacaggtggtcgacttccttcaggatgctcatcagaaaggctatgatggcacctgtgcggcacacacggcagtggccagtggcttcgtaacgcgtgtagccagtaacagggccatgagctggatgagctttggggggagggggcccagtggctactggggtggggcctcagtcagaggctgcttgctttctgcaacagaatcactggcctttaaatcacattgaaaacccatgataaagagaaaaattagaaaatgaaactagggggaaaaaaatctatgttacctaaccatggccaggcaataaagggcgaatctcaaaatgattttgctgtgtgcaagaaactagaaataacatagtgtgtggaagagccatctgcctatatataacatactctaatcacattcctataaagagcaagaggggccgacactatctgtggcaacagacatcagaataatggctgtccttttggaatgtgttattttctgaaaagggaagggggtttataaggaccaaaatgctagtgtgtgtgtgtgtgtgtgtgtgtgtgtgtgtgtgtgtatgcaggtgtatgtatatgtgtgtatgtgtgagtacaggtgtatatgtgtgtctttgtgtgcaggtgagtatgtgtgtgcaggtatgtatgtgtgtgcaggcatgttatgtgggaaagttttttcttagaagccatcaaacttgttttattgagacaatgtctctcattagtaccagagtatcactgatttggctagactagcaagtcaatgaaccccagggatacatttgtttccatctgtcagtaatgcgattataagctagcacactacctctggctttttacctgggtggtgagtcaactcaggtcctcatacttgtggggacaggctctctaccagctgagcgatttccccttatctaaaatgtcagtatctcagtaagggcatgcctattactaacgtgcatggctctattcactgcactgtgttcataggatctgcacattgcatgcatatggttcatcagtaaaaagaaactcaaaattagcatattgtgaggacccagactaggatcaactttctgtttatttggaattcttttctggccaagtagagagacaggaactattagtatttgagcctaacctgggaaaagagggggtagagggaataatattgagatactagaaatgaaaagcatcttctagaggtcattagagccatccttctttgtatggacaggttttgaatgtcactgcaaagcagtgaatgctctcttctttttctcttgctcctcacaccctatggcgaatcactaaagcccaatatctctcctaaagtcagatagttttatattaatctttctgcattttgtttagaagcgaattttattttcttttttattaacaccaattttgcccccttttctgcttattctccaagagtatatctctggactcaacatatgaattctgctggaaatttttaatctgaataagccctagcaagataccgtggtgagaaagtgaggatgtggtctgatggcagaatgcttgtgcagcatgcacaaagtcaagttctggattttatccccaggatggacattgtataaaggcaggcatggtggcctaggacacctaggcctaggtagtactctaggacgatcaggagttcacaaccatccttggttacatattgagtttaaagtcatcctgggatacaggaggccatgtgtccaaaaaagaaaaaaaagttactgcagaactggagaaaggagtcagtggtaaagaatgcttgttatttgtgcagaggacctaagttcagttcccagaacccacatcgagtggttcacaagcacctgtaactatagctccaggtgatctagccccctcttctggactccataggcacctatactcaagnnnnnnnnnnnnnnnnnnnnacacacacacacacacacacacacacacacacacacacacacacacacacacacatgatttctttaaatcataaaaataagtttttaaattactgaagaaaattccagtggtcaagttcttggggacaatggaagacagaacacatggtctagtgatggtacagttctgggaatcctgcctggatggggccgtgttccaaaggagaaattacacagccagaaatggaggggaactcaggaggcagagggtgcatggaaagtgtcagagatgctcagtcaggcagagtagactatggggagagagacactatgtctctgacactaaagggcaggagtaatggggcagggaggtctttgccgtctaggatgaggggaagagaattaactgatgctaatgggaatcatgagctcaaatgaggagcaaagatgatgaaggatagcccatgtctgaatgacaggatgtctgtagacttcagtagatgttaaggaataccacttaattcctagaataacatttagggtctaacagggcagatattactgggagaaaagagccatctgcctcctcatcatgttcccaaggctgtcactttccaagaacagatgtctgactaaggcgacacattttcctcctggtggataacagcctctgcctccccacccctgcagtgctaacaagcttatcggggctttgaaactgtcactatcttaatcattagtttggatctgcagttgcagcaacaataaagtccagaggtaggtgatggttattgggccacttggccacacccaacctgggctgtcccctgagggcacacacactcagaggaaacttcctgcctgccccactgagctctggacaggtatcagggctacctgctgctgcctgctggggactgccctgctttgctctgccagcccacatgttcactgtgggttctgactgttgggtgtgtctcctgctgcaagaatacaaggtgggtagagcacagcctgggctgatggcatttccaaccctggggcaaatgaagagaggggaaccaaaagagcaaaaatgcctgtacttgggatgcagaggcagggggctctctgtgaattcaaaactgacctggtatacatagtgagatccgggacagccaaagccacatagtgagacccactgtagagatttgaataggtttgactcctatagactcatgtctttgaatgcttggttcacagggagtgacactattaggaagtgtgtccttgttgaaataggagtggccttgttggaggaagtttgtcactgtaggcatggattttaagaccctcgtcctagctgccaggaagccagacttctcctagctgccttcagaacaagaggtggaactctcagctcctccagccccatgcctgcctggatactgccatgctcccaccttgatgatactggactgaacctctgaacctgtaagccagccacaattaaatgtcatccttataagaactgccttggtcatgatatctattcatagcagcaaaaccttaactaagatagtgggctttgccagtcttttcccatctgccttcagaacaagatgtagaactctcagctccttctccagagccatgcctgcctggacactgccaggcttcttgccttgctgacaatggattgaacctctgaacctgtaattaaattacaggttccaattgaatattgctccttataagagttgccttggtcatggtgtctgttcacagcaatggaaaccctagctaagacaccctgtcttaaaataaccaccacaacaaaaccacctgattcagtcagaaatgtcggtgaagagggctacaagagagaagaggggtttgagggcactgggatgacaattgataggaaggtagcaaagggggcgggaccaaggcaggaagtagcttttctagagcactgagaaaaaggatccatggctgcattagataagcaagggctcaggagtcactggggaagttgggcacagcatcactgcagtcaggtttacttgggggtgagggatgtctgagatcagaggacagtgctgtcagaggagaggcaagcacagcgaggaagagaaggaactttattcaagatgcacagaggcagagtcaaggcccagaaagcaagagcaagagctggggctagactggcaggaggtgcctgaagaactgagcttgctggttggtgtctggaaggccgaatgcttctgaatgatgtgcacgtgaaaggtgttacagctctggagaagcccccggaagcaggggtgagtgaggcaggaaaggaagaagacccaatttcccaattcaggtcttcagagacagaggtgcgtggggcagagaaggaagacctgagcttgggtcctggaacatgggcaaggaagagcattcttagcattctggagggttccacagttcttcaggcttccagtctacagctctgtccagtacaggctccagccaacttaggagttgactgatggccctttgaaactgtcaccttataagtcagcttggctctgcagctctaacagcagtaaactgaagggtgaggtaatatcccacgcatgcctttcttgccattcatttacttattccctccttcatttataagctctgcaagcaaggtccccaacacagaaacagcatccccatgaggctatgccctggcccaaccaaacaggttcagaaccaagatagacaccatggctttgttgtgctttctgccttccagtcaggatgttttatttctgttgctgagaaaaaatatcggggggggggggagtaaactctggaagagaggatttctttgattcacaacttcaagctacagttcactatttcagggaagtccagaaggaaacttcagacatcacctacaaagtcaagagcaaatggattaaacccacccttgcgtgcccaatgccatttagccttctcccttatactgttcaggaccccggtcttagggaatggtgctgcccacagtggaatgagattccctttatcaattaacaatccaaacaacctccaatgggcatgtctgaagcccaacctgatctagatgatttccccatgagtctcaattctaggttgtgtcaagctggacttcgtttatagtccaaactaaaccactatgaaataattccccagagcagcagatctggtccctgtactgcgctctgctccatgtgtgtttaattttgccagacatttcttactaattgtatacccccagcacccaccatggggcgcccgcacactctttttctgggagggagtgtctaacatttctcagctctgccgacttctctgaagcagggctgttaccacgggtcccagccctgctttaccagttgcgaaaccttaagtgccacactactttgtggtgtccagagctaaggctaaatagaagggacgttgagttttctctatggctcgtctgagtgccatcaccttttaggatcctccctgatagagtgtccagtcagagtgccaggagagagggcatgttcctgcatcctcccagtgtaaaggccaaagctccaggagggtgagcgcccgcggtgcgctcccagagccaggcaccaggcgtcgccgtcgcccctcgcagctccacggccccgcccccgccgcggagctggagctggagccggagccggagccctagcccagagctggaggcggccggaccgggccagacagatttcctgctctcctgtagggctgagggctgccggctgcgggctacgggctgcgggctacaggctacgggctacggactgcgggctgcgagagaagtcaccggcggcgcaggtacctcactgcctacgcgcgtccccacgaccctccctcgcgccggcggggacagcggacgccccggagcggagcgcgtcgggcgggcgcccgggagatgcggagtcgccgcggcggagcgatcggggctacagcaccggtccctgggaggtgagtggcgcggtgagggtgggtggcagtacgtccggagatggccgtgctccccgtgcacattgagcagaccgggatatcctgggccactgccagggagaaacgggtcgttgtacgggagctgcgtccgagccaggtccttgccatcctcctagtgtacaggatgctagcgactgtagaccctgcgaccccagctacctgctcgagacgcggtccgaacttggctaccacctaggcagctctctcggtgaatagctacacagagggcgtgtgtctgtgggtggcgactgtaggaagaggacaacaacctggggatgtgtgtgaacgcagtggaaacgggagtgggttccaaccggtgtgttgggggctgcgcacgcagggcttaagactggagcttttccagaaagtgactcgagttgcgccaactcccggcgcagcgggggcgctgcggggatgctggcgcccggtctagggccgggagccttccccggcaggcgtcagttggggattcagggtcaaggtggaacctggcaggtagctcaggtatgacgccacgaattgcagtccgtagggggacctgaggaggtcctgaagccaaaggccagcggtacccatcttggtgcttcctgggaccatctggggaaggcttggagacccacagggtgatgaggtagagccaagcctgaggactagggactggatctgacctaaattcctttcagtcatgaagtattgttctagagaggttagagtgtgatgcctgtaggtttatattgatttataacgactctgtaagtgttggaacctcagcaactacaggaagaaaatggagccttgactgtgtcggagagtttgaaggaagaccagcaaagggtgctcatgtgttctagaaatgattgtgtctcttgcctagtcactaatgtccttgcacctaagtgcctcgtgacccaaggtgcctggacacctttgcaacaatgtttatgcatttattttcctacaatgtaaaaacctatgcttagttaaagtggagctgggaaatgggggtgggaatgtttttccaaagctgagggactaagccaaagggggcatgaaacagtaggttgctggtggctgccaaggtccctcagctttcaggacatggacaaaaggctgggtctctcagtgcaagttcaaggtcctggggaaacaaaaggccaggtgttggttagcctaaaaggtggggtccacattgtcagggagagggtttctgtctcctgaatgccaggtttgggcccaggtcctagtttcttgggatcaatgttgcctgtggatcatcatcaacacaacccaacagttttctggttcggaagttggtagcattgtttgtcttcctgaaaggccaggtcattgggcaagctggatctgataatccaggacctctcaggcaaatcagccctgaagtttcagtaagggagttgttgtccttgaatgcttcctggagcccctgtctggtcacaaggttagaacaaggctggccattggttcccagcctggaaacacatttgtctctgctgtggaggcaaagttggcccagcagagctcctgggtcagcagtcctgccacttcagagatggcctggaggaggacttgaaactctgcccttgaaactatcctgggagtgatctcctcagccctaggcattcctgctcacaaatcctttcaccccgaggaagcgcagggaggtgtgggaaaggccattacagttgtcaagttgtgcttctgagcctggttgtccctcattgatcctcacggctccatctctgaggacatttattgaaaccacgcccctgctagtcagagacaaattggtaggctgaggcatgttctgcagtgcacctggtattttcttccagggcaacaaccttaccgccaacatgtcccaaatcaaaggtgtgccttcattgcccccgactccacacactcacctaacttctctcaatgctttcttcacccttccgaatgcactagcctcctttctgcatctaaaagggatgctgaacaggggcttaggttaggacaggactgtgagctcagcgcttggaagtagtttcttgctggctgctgttgggtggagaaactggtgatgaagtaggcctctctggaacatgtgtgcttatatgtaaggctctctggaacatgtgtgcttatgtgtagggctctctggagcatgtgtgtttgtgtgaaagagcttctgtgctttccacagatgtctgttgcaatgtatattgaagtgtactggatcatggaaagaggagacaaaccataaaggagatacagggccagttcttaaggggacactaaatcaaagagaccctacaggattccccaaggaggcaggtttgggggcagtagggggacaggaactacaggagttctcttccctcactggtgcattttcttattcatggtgtttgggtctcacctaggaaggctctgctccaaaacagaagggaatgcggctgttggaggagagtcgggcctcttagcccctgagagtcacttgagaaggccctgtgcaatgtaggttatcgttggcttgctgtttcctaacaaacagtgctgtggcctggtcttccagcaggcccccaactctctagaccataagacatggagcctgttatcaagtgatttagccttcctaaaacctctgtggaccctctgccagagagtactttctcttcctcttggttctatggacggacatttggccttattctaaagtacttgttcaagtctattttagggtaatagttgatttgttttaacagttcagctcttccacgagaaagggaaggtctctgagaccttggactttgttgggtttagacttggattcgaatcctgcctctggtgtggtcttgcttaaatgacttaaattcagacaatatgcttactcctcaggagtggaatgctcgtcactactttgtatggctacagagatggggtcaggggatgcatatacattagaaagcatgtgatcaacacccaagaaagcatgtatgtttcctaaaataccaaaggctatatgcatcatacatggtaaaaaaaaaaaatccaacataggacaagggagatggctcagtgagaaaagtgtttgcctaataagcaagaggacccaagttcaagaccaagaacatacataaaacatgccaggtgtggtgctgtccagcacaccttgtaaccccagctctggggaggcagaaacaggagtatctctgcgacttgctggatttgatagtctagcctatttggtgagccatgtcaacaaacgacactgtttctaaaaaggtagatggtatctgagaaatggctcttcaggttgtccagcaagtgaacaaaatcatgctagtggatagagtctttctttgtgtgcaacctgaaagaatggttgggatcaatatgacgtggcatattattaggcaactttaattttttcacaatgagctgaactattatgtaaattttgcataacttggctatttaatctcatgatgctgtcacttatggtgcaccaggagtgaatttattcctcatcgtgcaccaccgactctggtgttagtgatccgtgaggcaaaactacaacttgctgtagacattaatttgggcttgtcgcctgaattaagctaggctgggtgtgaagccaggcagaaacaaggtaactgtagtaccaagaggcagtgtagcccagaaggaagcatgcagaattggggcataaggtcagctttgcaaccattaacattagaacaatgaagctgtggatggctcccaaacgccctgggcttaactgttctcctccagagaatagggcagctctggaacatctctgaacctctccaggtgctaggggagtggttctcaacctgtaggttgtggcccctttccagttgcatatcagatatcctttatatcagatacttacattacaattcgtatcagtagcaaaactatggttatgaagtagcaacggaataattttatggtaggctgtcaccacaatatgagaaactatagaaaaaggtcacagcattaggaaggttgagaaccactgctctgggggatctctgattagattccacctgccctccagatggctggattgtataaaccacgcctaaggtgataggaatatacaatgtttccaattctccaggagaggcagatggtgggagctgatgctggatgcaggctgggaaggtcctccttggagaattacctgcctagccccctttttcttttctcaggtcctgttgctgttccacaaatctcaccagttgaggtccgccccatccaggtgtgccacacagggacttttgatgtggttcacagcctctgtactcactgtgtctggctctctgccagaaatatgggtttctttctttcagctacataaatgaatacttcaaagggtttggtgaagcttatgaaatagaaaaaatctcttagccacgtaattcagaaaaacaaattaacatatccttttatattgattcccaatgaaggggaggccatataaagtagttttaaagaatgctcacctatttcaaaatcattttaaatacaaccaagagtgcatttaatctagcttgtcacagaattggtatcaagtattgataacaatagggactctctctctctctctctctctctctctctctctctctctctcctcaaacagatagaaactccatcaagaggaaggaaactcaattaaaaattggtccttagctgtgctgggctgtagtcggatgtttgggtgtcagtagactggggtgaagagtggcgtattgattggggagtttgggcttctggtctgagtgtgggaagcacacactctgatcccttagatggtccagtgtaggcataatagtttggccacaagctcctgctgcagatgtgtgattctgcatctactcagggatggccagactattacagggtacctgggactgaggatgtatggtgtgtgatgagaaggaatgcatgggcaaagggagcagaggcattggtgtgggagtctgtgcaggaacggtgtaggaggccaagcacagagggctcttcagccatgtcaccctgcctggaacagagccaccaatagaacaaacaggtctttgtttcctgagggagatggcacaaactggggctctgtgcaagcactttgaggtggatgatgatgtcggaaagatgtggtcctctggtatgagcctgagcaggtgtgattcttctgccctgtctctttctctcccacccctcccgtgtgtgtgtgtgtgtgtgtgtgtgtgtgtgtgtgtgtgtgtgtgtgtgtgtatgtacgctcacatgtgcaaactcacaggaatacttacccacattatgtccttgtcacaggttcgaaggtttctggtgtagttcctccatcttcgttttaaaaagatgtttattttatattatgtatatgagtattttgcctacatatttgttgtatgcacactgcatacttgcctcatacccactagagtcagatctctggaatcggagttaaaggtggttgtaagctgccaaatgagtgctgggaatggaacccaggtttctacaagagcagcgagtgctcttagccactgagccatctctctagccctctccatcttgtgtattgagccatggcctctcactggcctggagctcactgttttgtctggactgatgggctagggagacccaaggatccccttgtctctatctatcccagtgtttgggttgcaggtacatggcgccacacttggctttgtacatgtgtgctgggatctgaatccaagtagatttactcatacgccgagcatctccggagccatctccacagcccagtgattccagtctttacaaacaggaaggagatggacctagatacaaaggttctggtgcagcaaaggcgaggtgacacagagcaaagacttggcttatgcttacagatcattcaggggtctcctcatttgaaccaagagcttgagaatgtccaagtctctgtcacgatgtccttggggcaggtgctgggtttctagtcaagaaactgatatcatctttgttaggacttggatctatttggatacttccagctggacattagtcaccatttgtactgaagaagaaaattagttccatttttttttcctctactagctttctggattcttgtttggatagaagcttgattgcagtatattatgacaagtggcctttagaatgtgtcattttattttgtctcgcactccaaggacctggagttttcgggctgtgtctcccaagccagcctctaagcagtttcttctgagggctgcgtgctctccgtacacaaggccctgaccttgactcaaggccaacaagcctaagtgctgtcccaagagcaagatgccccctctgtggggcctggaagtggggagttctatctgccacgggtatcttgtgaaactttgccagcgttgaccttcctttcttctccagctcaaagagaccaacctcaaagctggacacccacctgcaggatttgatgcctggcctggaggcctccctctttacctccacccatctgtctgaaattcccatcatgggaaccagcttttctttaattctgttgttaggattccccacacaggtggacttccacccatagggagggtttggtgaagcagatgctgatcttcaagtcttggaggcagcccactttcctgtgggtagggaagggtacatacatgcaggcaggcacggccaggggctctggtcaggctttgaggataccaacaggccattttctcatggcataatttcctacagctggccttgctctagcccagtgcttcccaaccttcccaatactgtggtcctttaatatagttcctcatgttgtggtgacctccaaccctaaaattattttcattgctactttacagcttgggactcttaatgtaaatatctgtgtttttcaattgtattaggtaatatctcttcgaaagggtcttttgacccccaaaagggtcaaacgcacatgtccaggatgattgtaacaattccatatcggtcatgtgttctagaacatgaggggagaagggatgggtcattagaagtgggaaagcctctagcttcctccatggataaagtgctcccttccttccacagaatgccctagactgctttccaggtcccttagagacccaaggtgtcccctctgggggaacaagtccagctgagagcacttcttgtgcaagttcctctccagtctttctccctttgccccattgtccctgcatcatgatcatcatgccttctacaaacagggaggagagaggaaaagagggaagcagttgctgtaggcaaagaaggagtgagctagacttgctgccaccaagctgctggttttccttctggcacgtgctctttcagagggagtgtggcgtcatatcttgggcacacctgagcagaagataggagtgagggccttgcctgaatcagttctagaaagcatggtggcacaaggttgtatcaggtatagaatccagacccaagcaccttagtcctctgacagagaagctctctcccagttacaggggaggcagtcagtgtgatttaataagcagccagaaggtatacgccctttctgttgcgttcaagggtgcacagacgctcagtctgggccagcaaatcgttgctgtagggtacttcctttaatgaacacaaagcttgcaaatgttctctcaaagagcataaaatatttagctgcgtagataaaactcctccgtagtcctggttgtactgtgccattcaccgataaaacaaaaaaaaaaaccaaaaaacaaaaaaaaacatcccggtctccagccacattatcctgcattgttacaaatggaaggaatccttgtccccgactgctttcctccttgagtggtttcgctggacctaaaagcagcctacacaaacagaagacgcttaagtgcgagatgggggtgctctgacacagccagtcactctgtccttaacttccagcctctgttgacttagtgctctttgcctgagctcctagtggctcttgaccaagcgcatcagtaattcaatacatttctttctgcccacattaacaggctttaacatagcagtcctctgtgggtgacgtcatcagccactcatttaaacatttttttaaagcaaagttccaacttgggctcaaatataatataaaagtgcaagaatcagaaacttaataattttgtactgtgctgaggggagttagggctattcttagcaatctagaaatatttcaaaggcactttctgagtttttcccccaaatgctagcagtgtttgatggtctgtaagaagaggcaaatagaatgcttaaatctgtattgaattcttagtactatgcacacacatgcatttatgacggcgactgtcctatggatgtcccaggtcctcagggataaggaaactaccaccccaagagaggcataggggggatccaatgcagaggtggggcaggcttgggtgtgaacgttttcttggcagccaacagctctgaagtatgtcagacagagagatgcttctgtaagcttgcctcccggcaggaagtgggctctcctgcctggggaacagcaggtgtctagatgcagctagctggagcagggtcagagaggactaggaaaagacagtgctttggggctcagccatcacagggacacaagagtctggacctgcctgagggaccagtgcctcccttggagattctgaggcacgctggcagctccttctgtagagacacgtgtttacgaactgctttttcataggtttgagagtcttgagtgtcccctctcctatcatgaaacctgggaatttggggatgaagttgttaagtgaaacgtttgctgtgcatggttttaaaaggttgactgtgttggcttatgtttgcagtgtggttggagactaaggaaagagctgacagctataggtgtgaccctgagcagaggttagtttagggagactgagccttcaggctatgtcataacaccagtcagaggtaccctaagaaccaaggcctagaggttctggccagcgtgactgggttccctggagcagatgctggctcagaggccaaggatgaggccaggatgtgggatgtggggtacgcagtacaagcacttgactctcctacatgggggttgggtctgttcaacagaagcaaagagcttttaattcaaaactgcctctttgggctaacctgttcatcttattaagattcagcaaaacttgtcttattagagacacgttataggctcctcagagtcacggtgcctgcctacttctacaggcaaagctgctatgaataggcccgtaaagtttctagtggtgaactttgacctctctgggggacaaacctggaattttcatttgccctagcatccgtgactttcatccaaggacctcagcctatacaggagcccacatcttaagtttcctttaaatctgaaggaaatctgtgtagtaggaatgagacctcccagaaaggcataaaggagggtgtcacggcgctcacaacaccctggctggtctcaccttgcaggacctggaaaagagacacaatcccagcaggaggaggaggaagcccacgagaagaggttttggcctgtggtgtgagcatgagtgtacatttctcaagaactgaccaaatagagaaatgcaggcccaggagactggaagctctctgaaggcccctttgtccaaagtcatggtggtcagcaccgatgcctctaggttcttcttcagtccttgctctcccagaccaccctgacccaagtgcctgcccatccacacagggtagtctctaggtcagaaacacagacatagcctggcatctgtgcatatgagtttgaattcattgcatgttaatgaagcagtccccaaaagacgtcattaccaaataaaaggagaaaaaaaagagacaccactctctagttattttctcagtgactttcctcatgtattttaacgtcaccagaaatagatctttctgtaccagtctttctgtttgccaacagctgaagtcacctcctgccttcctccgtctaggctgcagtgtgtttcatctccctatttagaggtggggtgtgacaccagaggcagttaagaaaaataagtcttacctgagaccccgtggtacacttcaggaatcaggaattcaatgtctgcctccccattctgagttgggtagactgatccctcatcccttgcttcctgaacctgaagctgctgggcctaagaaaatgaggcccaacctgtgtccagctgaggcaaactgaggtccatccttgagcaggacctgaaggtgggatcctagggattcaagctctgtatccaacctccatctgctctgttctgcctaagtgatgctcagcctattccccgggggatattttctacgcagcatattgcctccaggaggagtctcgacagcagcctgggtgtgtgtctcaagcacagtgggctttgtttggcaaatgatttattgtttgttttattcaaatgcacatcctgaatggatagggttgcgctgggcagagatcgatgagatggatcccagctactttgcttagcctcagcttcttttccatttgcagggtaacagggattgatagctgctgaaacagtggcgtcctttccttatggcttaagggtcgtggaagctggagcgggcaggctcaatttaccaattggctttttaacctggaaggtggggagagcggcaatgccagggtaactgctctgagctcattgctagaatgcttgactgttcaactgtaaggggcttagagggcatactggcaatggagtgactagtttctagtaactaggttaggatgcaatggttagagccagaaactccctgcaggagtccaggacaccctggaaagagagatcctggccttgactgctctgcctctgcgtggaatctctgctggggtctcacttgaggtgccatctgttggttctggtcctcatcctcaaagccaggttcccagagacctagtagaggtgtgactgtccacgtgggcaagtacctccctctgctctacccagacaagaatttggggagcaagaagtgaaccccaagtctggctaagtgaggatcaggacaaagtgccacgtggggaggtctatccccgagaatagcaggcagctgccttctctcctgggcctcagcctcagcaggcaggtgtgtgatgtcacctcagcggctgggagagtgaggactcctttgtactcctgtgttagaactcacatcacacacgaagaaccagcccagaaaggtgttgccttcaaatagaaaaggaaagacagttgcccttctgtcccccactctccttccacagatgtcctgacataatgagaagcgcattttctgtgcaagccttttcaggcaaccgacaaatgaagtcacctcctacccttatgagcggtctgcccaacagtgtcatctggctatctagaaccagagtctgtcaccagctttatgtcagagtgccaaggcaggtgagaggtgaagcctggccaagttcctcgcacatcatgatcaggctcactcactggctgagggagctgagagctcagaaacagcagggcctaagcccacacagagccatccaggccctgttgcctctcacctcagtccctggtgtcacagtggtctccagcagactcccactcagacctccctatagaaggagacagcatatcccaatagaaagtcgacctacagttgaatctagactaaccccaatgagagacttcttgctctgaaaggccaggctggggggactgtgggccctctttaaagtttcctctatgtgcagggctaactgatatttttctgatattttcaaggctcacatgtcctccttgtggtcaggaatgaaatcaaccccacccaaaccatgtctgtcacccactggcaggtgacccttcaggggctacgctcaaacccacagcagtggagtgagagcagatgatagatggctcccacaggacaccccacagtctgcattctcctcaggtggtgttgttcaccgatacagtggggggtgggggtggggggagcacagggaactgccctcagacccaggggagctaaacccagagtgaggcctctggagatgacagtgtggccagaggactgtacccgtccgccatctgtacgctgccaaaggagcccccatgtagtgggatttgcttatttttcctatggtttcatgtcattttaaaaattcagactgaaaaagtctgttgagttgttcaattcaagtctccagggtgtttccctgtcccccggcatgcgctgtggattttcacaagaaggaggggaagttgcaggcttcacaaagctcccatgggaatctcaacacgtggccagggctggaactctgggggcttttgcagggtcgcaagaatgaggtgagactcttgctatagaggaggacaggagggtaggcaggaggataggagggcacagctaatgagcccagagagatgttcactatgggcaatcccaaagtgccatctatctgtgctcctttccctagtccaggaagcactggaggcaagcagctggatagagccagccaggacgcactgtctgtggtgtggcagggtccaatttcaagggtactctttgcagaaaaaaaaaaagaagaaagaaagaaaacaactggggttttgcaggactgagctggctgatagcagtgtgccgggcagctgagtgacggagcagtctcataaacctttgccatgttccccttcagtcttgttcacctaagaaacaggggggcttctatactacactctcaaacaccccactcctgctgtcctcatctgatgtggagtctagctgtcacatctgtctgccctctgggatgccatgaaggtctgtcccctaagtggctagccctgtggagttcagccctgctttgcaacctcctgtaggaaggagctggctatgttgaagcccttggccatccccatggacttgaggtctctctttccaggtaccctgatttcttttttttttttttctgtgtattgtaggagctgcactgttcattagggtccatctctggcattttggctgggtagttgtcccaactctgcccctagactacctctgccacacatggtaagactgccctgggtttgtttttaaagagctccactttgccatcagagatctgtattcctgatcactgtttctccctgtcacctatagaggagacaaaagcaggtggcaaggtggatggtttccccaatagccacttgccctggttcccctccccaccttctccccacatcccccaactattccatctctgcttcaccactcagaacttcacagctagggcttcttagcctctagctgaggacactggagttggccaagtgaatgtgctgaccctgagccagcagctctatgggcagctgcggctgcctggaacctttggtagctttcccttccagcacccctgccctggggcagaggcctggagagtgggtccttgagctggctggaatggcatgccattcctttggcatgagtaatggcaaagccccaaaatccctagtgttttctccctgttgttgtctagtgccagggatggccttaccctatgtggagggcagagcaggtggccttcctggaactgagcaccacctaggggcacagtgcagggacatggtggaaacaccctgacttagacctcaggaagcaaagctatctttagctccctgctaggagtcagggagaatcccaattatgaaaggttttgccactcagcttctgatttgaaagtcactttaaattcattttagggatccacggagagttttgctttgagaagaatcttatcaaagtaacctcatgttggagtgtgtgtgtctgtgtgtgtgtgtctgtgtgtgtgtgtgtctgtgtgagtgtgtatgtctgtgtgtgtgcgtgtatgtgtgtgtgcgtgtggtgtgtgtgtgtgtgcatgtatgtgtgtgtgagtgtgtggtgtgtgtgtgtggtatgtgtgtgtgtgagtgagtgtgtgtgtgcgtgtatgtgtgtgtgtgtgagtgtatgtgtgtgtgagtgattgagtgtgtgtgtgtagtgtgtgtgcgtgtgtgtgtgtgtgtgtgtgtgtgcatgtatgtgtgtgagtgtgtgtgtctgtgtgtgagtgtgtgtgtgcgtgtctgtgtgtgagtgtgtgtgtgtttgtgtgtgtgtgtgtgtgtgtgtttgtgtgtggtcaaaggacaatgtcaagtattattattcctcaaattttttggaggcagggtgtgccagttgacccagaattccctgctttggtcagactggctggccagagtagtcccagaatcctcctgtctcctcagcactggctttacaatcatagtttaccaccccctgatttttacaaatgttctgtggctcaagctcacgtctccatgcttgtgtggccaatactttaacctaagccattgtcccagcctctccattttcctttcacagaggctccatatcacacacaacttatgcttctgtttctctgcaggatctcagatgaatttggaatctgaggtaaacattcagaaggggccctaattgcttgcctttgtttcccattgcctgagttttgatgaattcccccataggatcaacatgtatccagcagtcaggtcagtgttggatctggctccaggaggggacatccctgtaggaagcttacactggaaaacacccataacgagtacaaggcacatttgggtggagtttaaacactgtgtcaagatgcgtgaaaatagatttagtcgcggtgtcaggcagaagatgtcttcggaaagtgagtgtctgcacaaattaaaagagcatgtgaggacagactttcaattttctctatgcagtctgtggagacacttataggaatatgggcatggctgctttcaataggaaggatagggaaggagggtaagacatgcgataaggaggactgggagaggctcagtgcctaaagtgctttctttgcaagcatgagggcctgagttcaaatccccatcatctatgtaagaagccaaacatggcaacatgtgtctgtaaccccaatgcagggagatggaaacaggatggtcactgggtcttgctatcctggtctttctaggctaatttgagagctccaggtttagtgagagaccctgtttctgaaacataaacgggaagcccagcaggacagatcgttgggtagaggtatttcttacgtactattcaattgctgtgaagtgacaccatgaccaaggcaacttacaaaagaaagcacttaattgggaaggttagtccatgctcatcatggtgggaaacatggcagcaggcatgcaggcaggcagagtgctggagcagtagctgagagctttaatcttatccacatgtatgaggtagaaagagactgtgtctggtatgagcttttgaaaccccagccacccccagtgaaacactttcctcaacaaagccacacctccacctcctaatccttccttaaaagctcagccactagggaccaagcattcaaacatatgggatgggcctatgagggcgattctcactcaaaccacaaggtgctcgatgccaaagctgctgatcttagttcaatcctgggtgccgcaaggtggaggatgagaactgactctcttaagttgtcctctggccttgaagcctcacacacatacacaggtatgcaaaagtagataatgaaagttattatatacataatacataaacaaaggcgagctaaaaacaagtggaaagtgctagaggaagactcctgacattgacctctgggttccacatgtgcacaaataggtaggtgcacacacctacccacacatgtggacacacatgaacacaatacacaaatacaacatgagatcaagcaaacaggagaatagcagacatttttaccatgaagcacggtctgtttctttctgctcgcttttcttagcactgtttatgtaggatttgatgttgtactggggtgtccagcctctgcacattgcaatgcaatgttgtcatctatgttgtcaaatgtgttatacttcattcttgcatgtcttaagatgcatgtgttcctcaggcagcaatgtgaatatgtctataagccatataaacacccacaggactatccaggcaaatttttgataccatcccctgaatcgtagaacatcaaaaagtgtgcatggatccatggagctcagcacttccatctttgtgcttgctaatgtacaattttaaaacccagaaagtatgagcactgaatactggtagctaagcagggtaaatggtggtcatcattgcaaacggcaaagcaggagaacctgtgacaaccataccgtttctgccttaagcagaggcattgaaaaagtagatagtgcttaggagagagacgtggaagcacacatgcccgggtactatgtgcttgtgtgatcttcagcacttctctccttttctgtattctagaatgtgactggcacatttatcccatcttagctgaaggctggggcggggctctaaggtctccttccagagccggcaagctgatgtcgggtatgcacagtgggctttgcttacttgcctcctgcatgcagacaccattctaaggtcttgatggctgtcctggttagatcttatcagcttgacacaaaccaagagtcatctgaaaggggaaactcaattgagaaaatgcctctatcagagtgcctgtggcaagtatgtagggcattttcttgattaatgatcaacgtgggggagcccagctcactggttgaggcactacccttgggcaggtggtcctgggtcatataaaaaagcaggctgagcaagccttggggagcaaagccagtatgcagcatcctttcacaggctctgcttcagtttctgcctccagggttctgtgttgaatcctgccttgacttcctttcagtgggctttgcaatggaaggtaaattaaccccttccctccccaggttatcttggtcatcatgttttgttgcaggcaaggaaagacaatgaccaacagctgccttcctcctagaaagcaggatccacgagaaagcaagaaaccaccatgtctttaggatctagcctctgaagtcacatcctgtcatttctgtgatctacacatagtgacttgcgttagccatattcaggcatgaaagagaagccagcccattccaaagtgtaggtattgacaaagatttcttaggttaaattctgggtgcatgagtcctggatcttggcaacacatgacccagtgtgattctggttagcacaatgagaaaagaaatggtcagagcaagtttctggacagctctcagaaccaacgctgacgctggcaaacaaggttaagagaatgaacaggggtccaagaagccacagcttgagcttcagtcaagatgaggccacaggaagcttcaagtaaggatgtggccatcagtcctcagcctctaaggccagaagacacttaccatgttaaaatagcttagaacatcccaggacccacatgtcatactgcagacttcaatgctagggtagaacatataggagtcttgtgtctcctgctctgatgtcaggctctggaggacccaaaaggatagggagaccccccaacccccactccgggaagaaagcatttttgatcacccattgtacaggtgatctctccctgaaactggaggattcaggctgctgaaaacctccccctgtctgttcttcactgagcttaagtgttctttcagctgtgctgtagcttgtgcgatgatattaataaatttcgtgattccttatatgcattggtgtggcatagcctttagagttggtagataaccctgctgaaaaagagctaatcctttcagagaacaaatacacttcaacttttctttaagattagaactccctaaagcaggtcttctcaaggcagaataaggaatcttctgtttctttcacccacagtaaggaactcaagggcatagcttgccatattccatgccgagagcgggggacaatgcttctgccagtgcataagtgcctttgggaagaatgaaggatgtagaggttgttagcaaaatattttaaagggtttgggtttactttaatcagttacctacaaggctgtttaaatatgagtctcattaagagctaagcataggtgcccacgaatgaggaaaaggcaggtgtctttcttatacctggcaaggcatacttgagcattccctttcagcatgaagttttgcttctgttcagggcttctgttcagagctccttcaatcatatgtggcagagatggaaatctcttcctgtctgtcctgaaattgctttcaacctttcccaggagatgagcaggctgagcatttgagatgctgggctctactgtggggactagccacaggctgtgcaggtctaaagtagtcctgaggttaccacaaaaggaggactagcaggtaaggagctagacagggacatgagctgggaggctgctgtcattatccaaggaggcaagaaggagggaggaaggggggaggggaaatagatagggaaagaaaggggaaggagggggagaggggagcactctgaagccacaagtaaccatgtccaaaaatagtgtagagcaagccccacagtctcagacctctttaaggaagtggccgcttgagttccttagcatatttcttgatgaggatggggctcatttggtgtttcgttctctggcacctgaacacacaattgtcacatgctggtgttagatgaaatactggcttgtattttctggagagtggctcttcaaaaacactagaacctactcattgcagcaaggtgccccctacccactgggtgtccagtggattcctaggaccatagttgcaacttctgacatttaattaaatgtgtgtgagctaaccagaccatttgatgcatagaggaactgactgttagacatacagtatgttgcaacctgagagtggtactcctgggaatcaatgtcaaattcaacagctcccaaaccagggcatcttgagagacctgaagtcgctactgagatgtcaaggcatcccaggggaagcctggagtccctcacagcttttgtcccattttctgttatcatgactatgtttcagggacatttacatcttgcaattaaacacagtcttggggatgggttgtctcagtcattgggatcagaatgagatgactgactgcagggagagcgtagagtgagtcacttcctgaatcgattgaactttcagaagaaaagcaatctctctttccccggagcatggcggaggactctttattattggttacagttgcctgtggtgagctaaaaccttctccttcatacatggctttctctatggtttatattttgtttagacataaggtacagagagcaccgccatcgtttggctaagataatggatgctcctttcaaatctgctagagaatattgacttggagtggcctccatcttgattggctttctcgatcaacttcgtatccccgcatctgtggtggccttcagatgtccggttcaggcacacttcagagatgattaatgcgagtaattctcagcccttcgaacctctccagcctatctcacatgcttctgagtattgttttaactgataaatcataccattcctttgactgacgagtctgtgatttgtttatgtagctgtcttccagaccctggttccaggcttgcaccctctttcagtaaaccttggctactgacaagcctatgtttgtttcttcagtgcttaaaatttctgagtgggaaagagaagaaggaaatttgatgtgtattcagcagttcttgaactgttttaaaatgcatacgtgggcaccggttgtatcgatccggccctcctatggggaaagttttcagtgccaaagcccatttcctctttttcacatcctcaatggtttttctctgtccactggcaatgtgacaaatttactgttctgttctggattaagcaggatacctgtcgacagataccctgagcccagctgctgtgcagactgatcaaagagcaagtgtcttgttgtgggcaggaacttggaggccttcactttgaatgcacacctcccttcaaaggagtattttagaaaccacggtgtttgatagactggggctatactcataatgtcacatcaaaacatagcattctcttttatatagttctggtggtggtggtagtggtgatggtggttgttggttgtggtgagtgtgtgcacaagtatgtacatgtatggaagtcagaggacaacttacagaagttggtttctcctttccatgtaaacttcaagaatcaaactccggtcatcatcagtcctggtggcaaatgccctaacctattaagctgtctctctggtccttctcagcctaactctctcccaacccccatcccctgttttagctgataattaaaattttggaaaaaaatattgatttttttaatgtgtatgagtgtcttgtcttcatgtttctatgtataccacgggtacctggtacccaaggagactgaaggagggcatcatattcctgaaactgggcttacagatggttgtgaggcaccacgtgggtgctgggaactgaacctgagtcttttgcaagagcactcttaactgctaagacatctttgtagtcccaaggtataagctaggctgtctagtttgtgatcttcttgcctctgcctctgcctctgcctctgcctctgcctctgcctctgcctctgcctctgcctctgcctctgcctctgcctctgcctctgcctctgcctctgcctctgcctctgcctctgcctctgcctctgcctctgcctctgcctctgcctctgcctctgcctctgcctctgcctctgcctctgcctctgcctctttggcatagcttatggtaatgagccaccaacaaccagtagtcagccaaataacattgaacaaatatgtcagaggttaaggcattggtaaatcagcttttgtacaaaaattagctgtgtggctgtgccaagggaaatgcctgttacatacagaggtggctgtgaggagacttatgtgctctgtttacacctgttagtacctcaacaaatgtgagcccagctacattactctctgttcacgctttcaaatgacacatgtgctacttgatgttaaaagggaaatgaagcctggtattagtgcagcccaccccattaaagcattgtatttgggaaagggagcttaatgtttgttgtaaaatgaaattagaaggtgatttgcattcatggctacatatgcaatttgcttctgtcaactgcaattctttcagattaatttcttccatgatgtgtgtgctgtgcaaataataaacttataaatctccttatacatctagattattatccaaatctttaatattaatgcaatgcagtgttacttgtatgagttcaatgaaaagtaggtaaattttttttactttagagatcagagaaaggagaggtttaaaaggatgatgatgatgatgatggcgatgataaataaagttactattgggtgtctttgtgggtcagggacacaaaactctgaaaatcacagttattgccctagagcatctgctattcagacatgttatttctacagggttccttgaaagacttgcccccagtctctgctgggcctgggtagaagaactgtttcagctacagcctcagcaggtgtccttgcgaagtcacaaggacagtcatgcccagagctgtatggagcagagggaccttgatcctcacaatgtgaacgtgtcaggctcaggttgtatatgaggacagacttcaaagagctagtaactcagcttgggatccatatttgagcctttgtttccttgctaaagataacaaaaaaatgttcgtgtactttctaatttttttagaaaccttttttttttttttagtttgttcacagaacaagcccctctttttgatgtacaacttcatgagttttgaaaaaaattgtagagttgtgtagcctctactgattcttgacatattttatcacctcaaacttctctcttgtttaatcaccctccaatcccatccctacccaggcagccactggggaatctcccaccctgtctccctgcctttcttgtaacagcagaaaaagggactcactttgtatacaggcttgtgtctggctttcctcacttagtataagggtttctgactcaagctgtgtgtacgtaccagtagctcattccactccattgctgagtgacattccacagtgtagttgtgcctcctttgtgcatttcccaattggagacatctggattgtttccatttgcaagcatgttatgaatagggtggctctaatgtgcacatatagatttgagaagacatgggatttcatttctgatggatgaataaggctgagctttcaggcttccacatttaaataaggtagtgacatacacctttaattccagccctcaaaagacagagacaggcacagctctgagttcaaggtcagcctggtctacagagtgagttccaggacagctagggctacatgaagaaatcctgtcttggagggtaggggtggggagatgagacctctgaactattattcctagaggacataccatttaccttcccatgaggtttctatggctctgatctgccttagttggccttaactatgttagtttgacacagcctagagtcatctgagagaagatgctacaattgtgggattatgtcggccatcttggcttgtgggcatgtctatggtggggctgtttttatcagtaattaggaaattgaagcccactgtgagcagcgccattccatttgcaggtggtcctggaactataagctcctgaatgagcaagcaagcagtaccccccccatcagttctagcttcaagttcctgcttgtgttcgggccttgatatccccaatgatagactgtgacctgaaagtgtaaggcaaatcacaccgtttcctctcttaagttgctttcagtcctgagtgttttattacagcaaccgaaaggatgttggaacagcatgtgtgccaacaactgaagctcacttttccttctccgactcctgccctcctcctcgggtgggtggaagggtttcagggcagtttgcatttgtgttttccctagcggtttccctagcaatgcttgttccaatcttttgcctgtttttttttttttttccattttttattagtttttagctcatttacatttccaatgctataccaaaaagtccccccttacccacccacccccactcccctacccacccactcccccatgggctttctgaccctgtagattgaattttttattattcaaagcattgttctgatgatgaggtttacagaatggcaaaaggaatgcatgctacccagaagacaatgaaatccatgggactgagcaaatggctcagagactaacagcattggctgctctttaagaggacccctgttttggtcccagaacctacatgctgtcttacaaccatctgtaactccagttccagggggtccaacaccttcttctgacttcttctggaaccagacatgtatgtagtgcatatagatacatggggaagctcacacatacacataaaataaaccttaaaagcgattaagaacttttgaaagacccgaggcttaaagcccctttgttgctgtttttcctttttgctggtaccctgctgatgttacctcatatgcctttgcagcagtggcttgacagtgatggagtatgccccagttcattgttcgatcctgttctgtgaatgtaaatggtgactttaagcctttgcccttcaggctggagcctccccgtggttctgtcttactcagtgaatgggaaagagtggctactttaacttaggatattctatagccatgcttgttcgtttgaactcatagtggaattcttctgttttcttcctgtctggtaaaagcagtgaactaatactgtctaggaacctaacactgataccttgaattgggagccatttcttaatgcagtaatgagcatgcaagcttgtgatttaccattataatcgaaacctctacagccccgtgggcctggtgtattattctgccttattctgctttttcagcatggctttcttgagagaattcatctctttagtcccctgagatgattcttttaaaaacttgtcatggactcttaagtgagcagatacgtcttgatttagtcacaactgaaccagtgacttggactgtaacaccattttcaatggctaagtatttaggaatcataaagtgtgaactgcattaagtgtcatcatgttgctttgtggttcttctattatggaatgaaagacatagatgactgtggtataatattttaattccagctcaacgaaaacatgtacttaccattctcttcctttctgttaaaaagagacacattgagggactagaacaatgcctcagcagttaagaaccctggctgctcttgaagaggacccggcttcagtctccagcacctacaaggccacaccactgtccatagctacagttccagggcattcaatgccctcttcttaccctcattcgtactgcatgtacatagtgcatatctatacatgcaagtaaacgttcatatacataaaataaaaataagtaaatctttttctagaaaattgagaaggaagcaaatgtgatgcatatattgagcattaacaagctatgatttaattgttgcttccccatgagatttcctgactgatgggcatccttcattttatatttatcatattgtggccaaacatagatatgtcaggagctcatggtttgcagtgcaagaatatgagatggacttctctcctgaaggtgtacatagcagagctggctgtgtttgtatggggccatgatgagcctcataaagaagtgccagtaccaggtcaaatttgagtccttgtgggtgggtggagcaagaagactctttcatcagttcgcacttgggtctaactcaccttcctgtcctaccctcaccagatttttatggtgggctgtgacaaatgagcacactcagtaagttcagatatacagacaagatcagtttcttcgtcccttaggctctgtgggtcagaacccagagcatggcttccggtcctggctgcttctctacttctgatcttgacggatgaagttgctgtgttcctgggctgtgttcctttctaggaggactctccttggactcagctggcagaattcagctcctggtggtggaaagatggaggctctcactttccagacggctgtcatcggggcctctcctcatgttcctgctcactggcatttcaaatctggccatggactggggaatttctctcctggtcctctggctctctgatccccttctgcctcctgtctctagctcatttgttcctcctctgcttttttataaatagtttatcacagggacttgtttgcttgtggctatggggagagagaaacacacatgtcggggtacgtgtgtggatgctgtggttggctctttccttcccactacgaggtcctggggatagaactcagggcgtgagtcttgaccatgtgtgccatcatctgctgactgacctcaccagccccttcgtctgctttcaaggacttgtctcgtggcagctgatccactcaggtaccagagaacaatctccctgttttatagccatcttattagcaaagaccattccatctgcagggttccttcccagcaatccctaaatcagtacttgatgaagaaaaaaataaacggaagggtggacatctggggaacatttttagaattctgcctactacttcccccccatctccctccccaccccccgaatcttacccacataaacagcaaaaagtgacaaaatccaaggttctcctgcctgcctgcccgtcgcagagggatttgtttcctctccaagtcaatatgtgctgtgatcgttctgtggtgtttacacgcttggtgcctgaacctcgtggaatgcattatgcatctcttcaggaatactctttacataaattaggatggttttatctttcctgaaaacattgcagcacactatgaattcggtgtagaagttgggaactgctcacaccatgagccccattcaactctgggagaagtctgatgtactgaggggctgggagagggggtgtgtgtgagatataatccactgtgtgtttgaagtttcctaggggttttcttgtaaacatgatcacaatttaatattaagcagctatttagttctgccatcaaaaatacttctgaggtgccttggcagtcagtggaaaataataacccccagtattcattgttctctgtgtgctctactggaggagatacccctcccctgggatagaccaatgtcctctcatgtacagaagaggacttgaggttgggcatagtcctgtggctctccaggctgggccactgggatttcttaaaagtgttcccatcatgagtaatagcgaaagggaactaagttttttgatacagaatcttatgttgcccaggatagcttcaggtttgatctgctgtggatgaccttgaacctggtcctcctgccttaatctccgaagcactgggattctaggcctgcaccactgtgcctggtttacaagatactgaaggttaagcttacggattttatgtatgctacggaagcattctaccagataagctacatcctctgcccaccaacaatcatccggactttaatagttaatgaaggatgtctaagaacgtgctgtgtagctttcatggccctagacacttgccagttgtacacacacacacacacacacacacacacccctcactcctcagccctcacccctctagcagttaactcagtcttgtttgagaaacacgcagaagttaccaagtagaggggacctccgagataaaggctgtgtgctaagggcatcttggaaattaaaacagaagggacagagcgtctcggcttgggaacaagttcaccacggttgtactgaccttgctggttgtacttgacccacgtcacaaacatgcattctatgctttgcagccaggatcctgagtgtgagggttatcatgtgaagggggacactcttgtcttttaagattggcttttgacaaggtcttacagagcccaggcccacccccagctcactgtgtacccgatggtaaccttgaatgcttgctcttcctgccttcatacccaaagtgctgagatgacagctgtgagccaccacagttggctcttctctcatcctgaaagtgtcaggccatttatttaccttcttgagagagccacacctctggcttttgggagatgccctttgataatttaaagactgtcttctttatggatctgttcatcttctctatagacctgtccatctttaaaattatgggtctacatgctgggccttagatgatcagcctggttcaaatctagctcaggaaacttggaacctgacagtagacacgaagtcggaatcgctggccctgtatagccaaaatggcctccttctgtctgttacaagctcccctatgtgggaaggaagaaactcaagtctgtcactttgggccagtgctctattgagtatttagacaggagaccaaggccgtgctttctttcctctgtgcttaagtggcatcaggcatatgactggagagacttctgaaagagtatagtcatctctctagcctcggactgttggccctaggaggtggagtcctctacttctgtggtgtctgaggcagtgcctgtaagagtcttcctgctttagccctgtggggaggtgggctacaggtgtctggagtcccattctcaaagagaatttttcacacacccctgcctctctccaccactgtccctgactccctcgcaaccatgtacccctgtggcatttgcaaactatgtagtcagtcagtggtcccatctgtctgcctctctctcgttcagtttccatggagaggctggcactgggacacatgactgatggtatgctccccgctgcagtcccctctgagtgcctgggccttgggatatccttgttctttccttagccgtccgtctatacatactgcctgggctgccttgcttctccctaatcctgtgaaccaaaagtgaccctggctcccagatagaaagcagctaggccttgagggaagccccgaagataactcagtattgaccttgtgtgagatctctgcaggcaggtgtactacccaagcttgaatctgcttcctgaggcttcctggtcttctcattctttcccttaattgtgtccactgtgtccccagccacactgtccttacagcccatggtggtatctggtgtctacagtcctgctctttgctttcagtaccataccaggagacacttatttccctggcaggaccctgtctctatgagggtaacttctctgctctgctctgcctttaggcccctgcaagtcctgctgactctctccctggtggtgtaggtctcctctaggctccgcccagggtcaacagtgcagttagatattctgagattctgtccaggaccattgctaaggcagaagcttcaggaagggctaacacttggaggagaagaagtacagattccaagcctgcccaggtgtccctctcttgatgggctgctggtggtggcctgaaagactgaggtttgcagtttctgagggactggcacactcacctttaagacctatcgtttggtatcaagaaggcagttcccaaatctatagcatagctattcactttccattgaacctaagcacattgtgtgcgtgtgcgtgtgcgtgtgtgtgttgctgaaggtagaacccacccaaggacttgcatatactgggcaagtattcttccagtgagctacattcttaatcttcattttacttttaatttgagacaaggtcatgtgagtggtgaaggtactgtttatttattcccttataaacagccacaagccaataaccacgacctccatcaccacaggtgacaggaccccatgctctactgtgcctagactatctcttaaatgagcatgggtttggacattgcattaaaacaaaagcctccctgggcttgcttgacacagcttgtgcttttatgaaatgctaatggtattgaatcaactgtgggacgtttatatattgggctggctttgatcaggactcctcactttccattctaacactgagtcccgggggcctaagaaccatccacctgtactgagcctgcatactgctcagaggtcttggttgggattggaggcagcatcctaggtgttctctgttgagaattactctggcatctgtgcatctgatcatattcctctgatttcacttttgtagtaatcctagcagggagcatggggctgtgtgatgtgcaggatatcctaactgtagtgatctgggtgagggaagagttgaaacctgggccccaggaacatcatgacacctcccccacctccagtcatcctgactcatgactgtgaaccaccacactgggcagacactcagtggaatcctactttctgtatagctatgacccactgcctgttgctgtccttctttaaatgatatcattaaggattcttggcacagtgatgtagcttaagagtcactgtgggtattgagggcccacacttaagaccggcatctctccacactctgtgagtggtcccaaccttttgcaggcctaactgatatttttatctctaagatacttggctggtgagcaaagcagaggggaaggaagagctggactccctgctgtaccttgtactaatgagtttccggtcttaagcatggaggttagtgtgaatctagccacatgatggggccttttaaaagtctgcaccactagaagaaaaaaagagctagctgccttcccgtgaaccactggattcccgctctgtccatcactctgagcatctggcttctctcagaaagacgggggatcaagtgattcacatcatttgcccaaattaagccatgagtggaatgtataagcatcctgcccttttttcatgcagagaagaaataggagcaattagccacactggcagggggcactttgtagatgaggaaacagaagcccccaggtgttgtttgtgatccaggtggaataaatatctctagaggagaaagaaaaggggacatgtcctaggttatgcttttaaagtgagctgtttgcagtgtgtttgtgcacgtgtgtgcacttgcgcacatgcgcatgtatgtgccctaattcctgacttacatgtattagtaaagacatttagaagatgaagtgggtagttccttctcacgtatccttggagagagagaaagaaagaggggcttttattctgtgttttacccgacaacagtgacagcctgcccagatatgatgctttttaaaggtcaggcagctggaggtttgagatctgccacaactggctttgaggagagctgcctgtttagggcccatttggggactggattgtgaaaggagctgatgaactgagaagatgcctggatgagatggttgtgaaggacttggcaagcagaccttgagtggggaaatgtgctgtgcagcccagacatagatttcccagacctggagctctgctcaatggtgactctaattgttaattaagtggacactaaaaagtgagcacatatattaatataataattataatatatgtattactacaattgatactgcatttttgtagcttgaaggtatggcatgttggtttacctgtctgtgtgccttgtgcctatgtgcatgcatgtgtgtgcctctatgtgtacgtctgtacgtgtgtgtgtgtgtgtgtgtgtgtgtgtgtgtgtgtgtgtgtgtgtgtgtagaagcctgagttcaacatatgctgtcttcctcagtcactttccccattatcttttaagttgggatctctcacttaacctgaaactcacagatttgcctctgctggctgaccaagggctcctcctgtctcctccaccttccctgcctctaactagtgctctggttacaggtgcacagtactatgtgcagcttgaactcaggtgtcatgtttacaggacagacacttaactgaaccatcttcccaggtcttaatgctcctttttaatattcagtttttgcaacatatgcagagtgcacattgcttaggtagcatccatgccactgtaactgcttggggcagtcacctaatattacagcagatctcatcagaagtctctaagtctgtcatctccaaccctagctggaccctgaaaaatgtcaaggtgctccatgttggactccattaccattttttttatcagatcttccctggagaatgtcaagaactcagcatgtaaaagactggctgccatgaggttttccctccctttgagcaaagtttcacaaatgtcgttttgaacaagggctgtagaccagtccacaccggccgttcatcatatttaagtagcacaaaaagtaccaccaaaatcattttaaagacatatccttctagatatgtcataggagagccatttgtttatggcttgcacaatagcctttttctgtaagatgtgttttcagaactttttcctctcagtcataaaaaggaaatgtatctatccacagatacagaatttaccatcaggacatttagttttttttcattattctttattttaaagaattcccagctttctgaaggataacatctgttaaccttctactttggaagatgtgaatgtaacctgtggttctctaactagggctcccacatttgaagtcttgttattgcaggaaagaaaaccatgctgagatgtaaacatggggttcctccttgtcgggagcaatcacagcacactgctcaaccaagtacagtttaccagggttcttaagcagatggtgaacacatcaatgactgggatctgtgactgggatggactctgaatcgccttagggagcctgcaccaacacaacccacctatctttctttgcagcccctatttctgcccacctggatccctgtggaacctcattgaccttgaaatcctttcccacagccttaaactggcctaagaacctggtctgaccttggcattctctgatgagatggtcaggaagctcctggccagccctacacatggattcagtctacatagccagtttgtggcatgccgcaccttgtcttagctattgttctattgctgtgagcagatgccgtgaccaaagcaactctttaaaagcaaaatatttaattgggggcttgtttataacatttcagaatgttagtctattattatcatggtggggaacaggcaggcatgttcgctggagcaggaactaatacacaagcagcaggcagagatacagagagagacagagagggaaaaacagacagagacagacagacagacagacagacagacagagacctcaaagctcattcccagcagcataccccctctaacaaggcctcatctattccaaggaggccacacctcttaatccttccaaactaggaaccaaggatgcaaatctatgagtctatgggaggtattctcattcgcacaccaccaccacatgctcttaaggaaccacaagatttaagccctcttggtggaccttatctacacactgtgcttttgtggaagcctagaatgctcatatcttgcctgtatccacatttaagccttgattgtgaggtaattctttcctcttttcctgagtgaagtgccacctgcttccccagcaaggaacatattccttccctgtgctagaggcatgggagacacagatgagccctcttcggagatagaataaactcctgcatagctaactgccctggtattgcggcccacagttgacttgtgtgtatcccatgtatacctgtgctatctctcctgtgaccttggcacctagcagtcttccctgggcattcaggagcacagcaagtgcttaggtgccagacaaaggaatggggaaccccaaaaggatgctcagaacagactgaggagggaggccagaggcatatgcccgaccaaagtggggtaatgtcccagaggctctccttgaactgcagtataaagtactgcctgtttgtaggcagggcaggatgggaaggggaaagtgggttggtgggctagtctgtccacttgtggaaaggagaaggctctgggagatctgaggtcaaggacagtcagcatcacagacagccagtaccacaaacaataaacatgccatcatctaataaagatttcctaccaacttaccctgcctgttcctccctcctgctgggggcttggacagttgacagttggcattcatagggacagcatgtgtttaaggaatgtccactctgtactgggctgtgacactgaagcctcaggagaggtcacagaaataattgccaaggtggggccattaacagaaaacagagccacatgggccttaaagaaggatggagcatgcctagccactgtatgcccagcttggacctcaaaatgataccacccctttgttttctcagaaaagccaggaatctaaaatttttatgtgaaatttctaccaggtaaactaacaacacagatttcctggcagannnnnnnnnnnnnnnnnnnnnnnnnnnnnnnnnnnnnnnnnnnnnnnnnnnnnnnnnnnnnnnnnnnnnnnnnnnnnnnnnnnnnnnnnnnnnnnnnnnnnnnnnnnnnnnnnnnnnnnnnnnnnnnnnnnnnnnnnnnnnnnnnnccccacccccccccgctatgtgttcatgcattcttgggtttgtttactttttcttttgactccagatattcatccctgcccctttagtaaacagcttccccctcttccgtcttgcttaaaccataataagtcaagtccccatctggaaagctctgttgtcatcctagcaagtgaacacaggccccagacctttgcccagggcctagtgccaagtgattgacagactagaggacaggtaaggactggtccttccagcaccccccaccccagtcccaccacaccctcggaggccaagttcagaggcacgatccagaatgtgggcacacgttgatctcattagcacagactgtagcccgtggggaatagctgaagaaaacaggcaaaacgcagacgtgtctctgaaaagctgagtggctttttatatcatctcacccagagaaagtaggtcagcatcccaggagatgcaggccaagtctccggcagaccaatcaggagcacttagagtgccctcctcatgcctggaagctagggatcatgtgtcagagtcatgcacgtgaggagggatggagagagcttggaggtccaggaagggattttataagcaaggaagaccaagggatgctgccccatctgccatcgatcagagctagttaaaatcatcaggctgcaagaatgcaggagaaaccaggaggctgtgcgtcctgggccccaggcagcctaatgtagatttgttttaaaaaaaaaaaaaaagttctcttacattacctgacattcttcatttacaaaaccaaaccaaaacataatgaaacataaactaaatctatgcctttgggggcacatggtttgattctttgtctttagaattaaaagcaaacatggcatgtcataaacatggcatggaatattatccaatcataaaaatgaagtcctacgggatgagccttgaagacattattatcctaagggtgttaaggcaggtttctgaaactttcagctcatgtcaccttgcaccttgggaattgttgctcaccctgggtgtacgcgtatcttagtttctttttctgtcactgtgataaaataccttgacacaaacaagttagagagagagggtacattttggctcttagttccacggtaaggtccatcgtggctgggagggaaggacagcaggagcctgagccacttgttcacatggttcccttagttaggaaacggccatgggcgtgcagtgctgctcagccccattctccactgggatagtttaaatccctgcctagggatgatgctgtcttctcacctccatgaacacaaccagccctcaaaggactggaaagacagttcagcagtaagaacactcgctgctcttttagaagataagaatttgatttacagtacccacatggggcagcttacaactacctgtaactctagctcccagggatctgataacctcttctgacctccaaggacctacgcatggtatacatacatatactcaggcacatgtaacataaaactaaattatttctttaaaatccaataatcccttacaaacaggcccagagagccatctacctgattttgctagattccatcaagttgacaacatcaaatatcactataaattctggtggtgtgaatgacaaatgtctcctacagtctctggcatttggatgcttggtccccaggtggtgctgtttggggaggcttaggaggtgtgggcctgggtggaggaattatgtcactgctgacaggctttgagagtttatacactcacatcatgtcaagtccactctctcagcttcctgcttgcagatggtctgagccttcagcttcctgcttccggcttccggctctaaccattatgcctgcctcccattatgctatcctcaccattatgaccccagcctcctgggactgtaagcttcaaataaactttccgtacgttggattggtcatggtgttttatcacagcaatagaaaccctaactaagccccacatcaaacatttactggtaataagtcataatgaatttcattctaaaataatgctttagcatccatcactttccctgttttatagagatgaacgcggatttgcatgctaaggaggctgtgtgcttgtttgttttcacacggggaattcagtccccactgaatattcggttcagaagaggagcttctgcagtgttttatggagctgattgacgtttttatttcataattgctaatgctgagaatgtcactgttttagtcagtgttggtattgctaggatgaaacacagtgacaaagagcaactggagggggcagggttaacttctctcccagttccatatcacagttcatcatcaaagctctgcgagcaggatctcaaacaggacaggaacctggaggcaggagctgacgcagaagtcatggaggggtgccgggcttagtggcttgttcttggcttgctcagcttccctccctccctccctcccttccttccttcctccctccctcccttccttccttccttccttccttccttccttccttcctctctctctctctctctctctctctctctctctctctctctctctnnnnnnnnnnnnnnnnnnnnnnnnnnnnnnnnnnnnnnnnnnnnnnnnnnnnnnnnnnnnnnnnnnnnnnnnnnnnnnnnnnnnnnnnnnnnnnnnnnnnnnnnnnnnnnnnnnnccacctacacattcctgcctcccccaccctcaaatttccctacactggggcattgagccttcacaggaccaagggcctctcctcccattgatgcctgacaaggccatcctctgctacatatgcagctggagccaaggattcctctgtgtgtactccttggttggtggtttagtctctggcgagccagttttcttatagaaactaggaccaccagcccagggatggcaccacccacaatgggctggaccctccttcatcaatcactaattaagaaaagggtcagaggcttgcctgcagtctgatcctacggaggcattttcttaattgagatttctgcctctcaggtggctttaacttgtatagagttgacataaaacttggcagtacagccctttgcataagggtagaaatgtgtttagagtcattttggaggtattctcttctaatcaaaagttaaaaaagaaaatcatcgaacatttttttcaagtaaaacttctttcagtaatcctgaaagcaacgtttacattcaagcattctaacacaacacgatccaaagatattacatgttgagcagtgaccataggaaaatacttaacgtttttcttttctgtcattggaccattgtgttttcctaacggcagaaaattctgtgtgtccagtaaaaatactgtaggctctaacatattctaatctctaatcgaagctatcttagtcaggatttctattcctgcacaaacatcatgaccaagaagcaagttggggaggaaagggtttattcggcttacacttccatactgctgttcatcaccaaaggaagtcaggactggaactcaagcaggtcaggaagcaggagctgatgcagacgccatggaggtatgttctttactggcttgcttcccctggcttgctcaccctgctcacttatagagcccaagattaccagcccagagatggtcccacccacaaggggcctttgccccttgatcactaattgagaaaatgccttacagttggatctcatggaggcatttccccaactgaagctcctttctctgtgataacttcagctgtgtcaagttgacacaaaactagccagtatacaagccaggatctttcaggcagcatttattggtactgtgtggtgtagtggtatgttcaggacaaaatgcatgtgttgtgtgttcacaagcaaggctgtggtgaagctgggtactaagataaataaacagaccacaggcaatgtgacgttatgtatacgaagtccctaatcaactgcaaagataggaagcagaatatggtggtgtcagaggatggaaggaagagaggcgaagtggtgcttagcacagatagagcttcatctgggaagattaaaatctactggacagggacgatggtgttggttgcaaactgtaacaacttctaaatgcctctcgctgatctcagacaaaatgagttaaaatagagagttttgtgttgaatgactatcagcacagaatagtttgctggcagttttgattgagatctgacacgttttacatttccttattcatgacatctctctgctttctgagctcctgactttgtagtaaagtgtcctaactctcgcactgatctcatgcctaccttcaagcttattggtggatgtttaaatgtgggatgctaatgtcaacagtactgtgtttttaaattttcaaacatcacttgtttacttcttgatataacttttaaaataatggaaattttatatttacctcatgcgctgaaaatcttgcagccatcaagtaaattttagaagactcattggttaattaattgtttcaatttctacatttttgtatttttaaattcgctctccccttgcagtatctagaactttttggcatggtgttgaaatggagtactgagacacaggacagtcttatcttgttcctgttttcataagcaaacatctgttttcttataggcaagcatgtcttttgtcagcatcaagtgtaatgtcaggtttaggttctttgtgtgtgtgtgccttgtctgttcctctgccccttagctgggggttttccttatgggtcagtcaacatgctgtcagatgttcttcgatgtcacttgaaggaccctgaggtttctcttctttagcctgtcagtatgatgagttgtattcattggctttaaaatgtgcagccaggtttttggacctggactgagtcctgctcagctgtgccaacttctttctcattgttggattcaacttgctaacattttgctgagaattccacatttctgatcttgggagacgatagcttattgtttccttgaaatgccttggttcttttagtacgacactggcctgggggatcatgaagtagaccctcttctcccatcatttgggagagattatggggaattttaacttttccacaaaggtttgctaatctgctcatgctgctttccatctcaaaaaaattgattgttacttattttttctttaataagtatatttctgttcaaagggtcaaattctctattgtgaaggtcagaattctaggttggttctaggttaaggcttggagagggttgggagggacagtgagtgtttgcttaaaggttgtccttcacaccttaactggtcatctgcttgcttacacacccattctttcttcagtagctgtcttctcaagctatctgctatgaataaccccggccccaagaaggtggtgtgcctctgtctcacgccttcctgtgcatttggtcgagctgctgggcttttgtctttaatgtataattacagctctttggtttcatcctggcactctagagctgaggcagaaggattgttgtgagtttctagccagcctgagctacagggtgaggccctatctcaaacaacaataaaacaaacaaaaccaaaaaagcaagaaacacaaaaaggataataatcacacattctgattcatgtagactctgctaatttttattttatagaaatcattgaaatgagtgtgacagaagttacctctcagcatctgaaatgattgccaagcagattaaaagtgcaaacccagtgcgaacggtggtgggggaggatgcctttaatttcagcacctgaaaggcagaggcaggcaaatctctgagtttgaggccagcctggtctacagagcaaattccagactggccagtgctatccagagaaactctgttgagaatcacagacaaagccaagataaaacaaagcaaaaaagtaccaatccaccactgtttggaaggcggtatttagagtgactcacttttgagtatcagaatgtggtttggggacatcaggtacagagcacagctgtagagtcagacctgcccctgtggtcctggctctgccaatagatcttcctcctaatgtgaagaataactcaacccttcctggttacctgtgaggtttaggggtaggtgggtgatgctacaaagtgtctagcggcatgcttgccaggccatcgatggtgttgcttctatttattcattcattcattcattcaaaggttgatatgttgggaatgtccacagtgctgtgggggatgaaaggatgtaggagtggtgcctgtccttatagagaactcagtctcttgggaggctctggctgatgcagacaagatggaatgtaatgagaggtagggaagctagtgactgtcagaagcgggtcagaaaggggacccgctccttgtacaagcttgtgggtccctggggactcagggtctcatcactgaagagtcagggtagcatatgacatgctgtttgtcatgtcgtagggctaggcaggccctcttgactgttgtctgctctgtaccctgcacccccatactgaagatatccatagacaactgcagaaaggtgcagtagtaggagggtggcatctactggctccctggtgagacggctcacacctaggatgcccttgctgtccctttccagttgcttggtcagcatctctggccataatccctttgggaacatttttgccttggacccatggatctgacctggtctttgacactcagcttcccagactctgtgcttccccagtttctgtctgcctctgtactccatctgggccctggaaacctggataccccacacctctcttcctgaagcccttgctcctgtgagctcagtaataaacttgatgttgtgtatgttctgtcccccccccccaccggttgcttatcccagcttgtccaaactgtgggactttttcttgcccagaaacgagccatcccacgcagcctctcctctgattgttccgggaaccctcagcctagccaggggcggccatctcagtgcagagctatgggtttccaagagcctagagcattttttccccacgtgtccctcacgcatgtggccttctttggaggcccagatgggcttccttcggccctcacaaatgaaaaccattagacattcagcaagatgctccagctgcaatctgattctttagcatcgttactgaggacagtgtcctctttttggatgggggctggcggaggtaagatgagaacagtgttggcttgttggggagctgcttggaatgctcccagcgtggagaattgaaaatgcatctttacaggcttctccggggggtgtagctgggtacggcgggtgagggctggtagggaccgtcagctggcaatgccctccagacgatgatttctcttctgacactgggcaacaaaatggggtgccaaggaccaaaggtctcctggggggcttccaggagagccttgaacttgaaactgtcccgtgttgctaagcacaagagtgttgttggtatactcaccaaggtagatactcagttgttattgaatggtcaagtggctggtcatttggggtgagatggaccttcttgactgttttgtatgggggtccaaactgcaggtgaacagcccatacctaaacattgtacactccaggtatcagacatggctaggactagaagagccactggttgtcctttgcagtggtgagtgtaactctctccgtgcctggtgtcacctgggtcccttgctagctatcactgcacttggtagtccacacactttaagtgccactgacctgaaaacccaaaatgctcccaaattccaaacattctgaattcagacaagatgctttgtgtggaaaactcacactcacacgatgtagcatcctggtcatgatgcaggtgcactaaagaaacagatgaaaaggtgccttctggggctggatggaagcccagtcaagcacttgtcatgttatcgtgacaacctgagttcttgggtctccagactcccccccccccccccgcgccataaaaagctgtgtgtgatggttcttgcttgtaatcacacaccaaggtcgcagagctaggcagatccctggggctcactagcctagttggcaagctccagactagttagagaccctgtgctaaacaaataaacaaaacatcaaaaaaggttgaggctcctgagaaatcaacacctgagactgacatctggctcatgggcacgtcatgttgtgtgtgcactcacacatgcgcgcgtgcacacacacacacacacatgctgttgtacaaaagcatctagatacctgtgtattctgtatttgtgagacataaatgaatgtcacgcttagccttcggttctatccccaagccaactcattagataaactcaaatatttcagaaatcctgggggaagaacaaaagctggaacatctatggccccaagcattttggacgagagatgccgaagctgtttttattttaccttaatgtatttcttctcgtctcctacaagtctatcagcagcattagggggaagctgagctgtctccctgatactctggcagggccaggcatgtggtgggtgcttggcagacatggatggatgagtgggtgagtgtgtgtgagagtggggagggaacctgctggattcttggcataaacagcttctcggagatgatggtgggggagactctgtggtccagtgtgtatccctgggatgtttttaatactgaatgatgagaaatacaggaaaggtttgggtctttccttcactggagcccaggagtcaaggagaaagctaccccttagaactgtgtagtcatttggtagggggaagaagatgaacagaggtatctcaccactctatctatgtagataaaccatgtaaatgaaatgcccccgcccccaagtttggtagaccaggccagggagctctttcttaaaactgtcatatcactgtgtgaagtgagaaagtttgccctacccagaggggcaagtcacgtgttcttagaggttctgctaccggatggtgacattcagtggcatcccctagtgaggaagaggccaactcccttgtgggtggggttgggtagattggagtgtgccttgctgggtagggacctatagggcaggggtggggacaggatggggtagatgatgttgtcctgatgtccaaggctctgcagggcaggggtggggacaaaaaggattatcctgttgaaagcatagtatctagctcaagaatccctgggctatggtaaggcccagctatgtcagaagtccgtctgtcagcaggatccaaggactaagggacagcagagtgtgttagaaacgttaaatacaatgaatttggggaagatagaactggggccccaggttgcaaaacaccaatggagaggaaatgtagctctgagaaccagttgtggaggaagccacagatggcatctgcggccagagatacgggaacaagcagttaatctgaatgtcctgggccttcttcctgtagggtgcatcaggggcaggtgaactgcaccatctaaggctgtgctgagtgtggttccttctctatacctgtcacacaacagcagaaatgcctggatggactcaggtcctgcgggaaaccttccctgactgctggccaggccagggggcatcttccctaagacagatgtctaagtaaatatcatctcctagtgtgataacatgatcagccagagtaggtgctcagcaatgctttttaaatgagtgcacggtgtctttgataaatgagtcgcctgcagtgagaaaggcacttgctgagggctggatcagcatttggacggtggcattcgtggaacagcccacctgtaattccagcccattgggtgatggaatcaggatccccggagggagctgcacagttagattagcccaataagtggagggtaattgaggaagacagtcgacattgacctctggcctccatctgcgcatgtgcaggtacattcatgtgagcatgcacacatacgcgggagtaaagtatagtttaaagacagtaataatagttgtctgtgtctggatgggatgacagaatggagctggcagattcacagaggcagaaaaggatgcctttgaccctggggtgcttaattacgggggatgagtctgacctcacctggagtggcattttgtgagggagaggtgtgtgtgtgtaggagaggagatgagagagagggggtgggagtgtgtgagagtttgaatgtgtgggtaagagtgtgtgtgggaggtggcagtgtgaacatgtaggtgggtgtgggtgtaggtgtgactgtaggtgtgagcatgaatgcatgaatgagcatgagtaacggtgcaagggtatacaaatgtgggaggtgatggtgaacatgtgtgagtgtgtgcatatgtaggagtgtgtgtgtttgcaagtgtggaaacgacaagctggggtggtctgctatggacctcagagtatctttacaatcctggtaccaatacagctcatgtatggctcctggaaaagccagggccctaggcagttctatctagaaaaacaaaaatgtcctggtcaggaaaagagtggggtagggtgaggtgtgtgtgtgcacctagagcaacctgcatctaaaccctggctttagcgtcccctgtggaagggaatccaagtgccatctcttggaggtctcctctctcgtatcttttgcaaagctcctcagttactctgaaagcaaatgccagggtcatttaaagtcttacatatttttccttctggaatcttcctacctccttgccgtgcagcctgctctgaaaagctgaacgtgtctgcagttgaacccagagaatcacagcccacgactcacctcagccagcaggaaattattagcttcaaacttctaggaaatgtatttccagagacaacgtttctagctgtctctaagaatgaatgaaaggcttcacttcatttgttttaatcccttgcctacccatggacagtttgaaattttgggggaaggattttcatcgttattaataaacagcgttgcctgggcaatccacttcacagccaaaggcactgtgttagactgcagtcgtgagcaactttcgcatccctgtgaatgaaatacttgagagaataatttcagaagaggggaggtttgttttgctcacagtttgggagggtacagtatgtggccccatggttctgtggctccgtgagtctccatctgtggcagggagaatgcaccaggggatgacagaggcacaccactggtggcacacttcctctagccagacctaatcttctatagtttctaccaactcccaagacagtgccaccagctgatatccatggtatagcacatataccatgagggacagcttacatcctgcataacataacagatccttgtcactgagctgaggccgatggcaactgtgactttgagaacacagaatctactaatttcttaacaatttctttattatctacatgagggttttgtctgcatgtatgtctgtataccaaatgtgtgtctggtgcccacagagaccagaggagattttcagatacactgagactgggatgacagacagtcatgagctgctgtgtgggtgctgggaattaaacctagatgctctggaaaaacagcaagctctgttaaccactgagccatctctctagagcctgtaatgattcttttaaaagctctttatactagctaaggccatgctacttcattcttggcaagggcttgtattcacctggaactttgtagtacacagtgatcagaggctccaggacaccggccttctgctgaaaggacacagtactgctgtctctgagtgacaggagccagccagccatccttcatggatgatggatttgggccgatgagcccctttcccagagtttctcagacccctttggagagtgcgccttgacctctgaaggtctgcccaggtcagattccttaaatgagagcttcatggctatggtaagtggtgtctgcccctttagccgcatcttcaactcaaaagttccttgatgatatttttgtgactatcaaatggcaggaaatagatgctgccttccttaattttatcattccaaatgtcacgaggatagcaaggatctttacaagacagaagaagaacctcattagtaactcccatggtaaccaacccagctcgatctcttccttccctgtctgtggctattttcagttcttaaattgattggcaaccctgtggaaatggaggggggggggcacggaatgtacacgcccacttcaccaggggctgaagagcctttttgaatcttgctccttcaatgccatccctggtgttcgcagaaggtgacagccagctcataatgggaagtgattgtttctttctatgagaaagaaataatggtttcccttttttatcctcgtgtagcttatgttaagatatagctcataaatggttccatttttaattcagcttacagttgattttttttcaaaggcttaattgtcttttgtgtgtgtttgcctacctgtatgtctgttgtcatgttcatgcctggtgctagtaggggggcagaagatggtgttggatcccctggaactggagttacagattgccatatgggtgctaggaactaaacccgggtcctttgcaagagcatccagtgtatttaacagctaaactgtctctccagccccttatgtttcattcttgagcatggatgtgtaatgtactttagtggtttgtcattagaagatgagactggctatattttcactaagcatggagaccctcgagtgcagttaaggtttgaaactgtgtcctccagtccacctagctcctagcggactgtgtcagagctttgcaggatcaaggtcctgtcagtgtcccaccctgtcctatcacaggttatcagacattgagggtactggtgcctcagccagccctggacacctgggagctatgtctcttcactatccacacaagccctcctgcttctttaccttgctgtaaagtgccttgggtcccccagggcaccctggaagcctcagcaatgtcaccagtgctcacacgtgagcagatggctccagtgcacatgttgacagaccctcacttgctgtacaagagtagatctgctgatgttcaataaacatctcagccgccctgaaggagggcaccttcatttcactcctgaggctccagaagctccagggtctcacactgcacacttgggtggacaggtttctgcctgcaggacccaccacctcctaggcttcttgggctggtaataggaggaatgaaagcctagtggttatggcacacccagctccattatggctgtgagaggagctgtgagataaaaacttgtgaatcagagttcctcttttaaaaaatgaatatgatttaaatcagaaacctatctccaggcacacagtttgtgcctccagctaaaaatcttggtctagcagaaataaggctctgaggacaagtcagcacacactttatggtgacatccagggccacactgttttgtgacagccattaggtctcttgacactgatggtcatctgccacccagcggggaaaactcatatgcatggatgatgacagcagtaactctcagttgcccatattttgaaagtgagttttaagacaaactaaacaaatttattcatttgtttcctggtatgggcagaattaaaaaacaaatacctgttataatatactagaatatcaactcaaattaagatttggaaactttattgaaatacaacacatttacagaaaattgtgggcatacaaatgcatggaaacttatcaggaagccattgtggatctaacactcagaccaagaagttagggtgcccaggtcttactcccaacccccctgttgctataattaccacacctcccccctctctgtcagtggttgcctgaatttgaaattacatatatgatgtacttgttatgtttactgaacacctactatgtgcagggcattgcatggctttccaatggatttaaactactttccctggctgtatgccagtaggctgtggccacagttagtgtggacgtagctatgtgtaacgccaacagaaagtgtcctgccaacagtcttttttcattatataggggccagaaggcacaggtacccaagaattcaggcataggaagagggggttatgtgtatttgtgatatgtatgtgtgtatatgcatgtgatatatatacatatatatatatatatacatatatgtgtatatatacatatgtatatatattctatatatgtttataattctagtgccaggaacatggagacaagtggatcccttgggcttacaagccagccagactaatccacttgccaagttccagatcaacaagagaccctgtctcagaagaaaacaaggcagatagtagctgagaaatgacacccaagactggcctccgaactctatatgcacatgaaccaacacacatacacatacacatctacaaacactcgtccacatagacacacacacacacacacaattcatcttgtgtgacaagcaccataagagagacgatgcccagtgaaagcacagcccccaaagcagagagacaccttccagccctgtctctccacagctaaagtgcttttctccactcttcctgtgggccccacctctgatgcctggagtcaacagggagggctagagagggaaggaaaccccaccctgcccttccccacccccactatgacccccttccacgagcccagcctccatcctgctggctgttatttaggcgatttgtgttctcccccactaggcatgttagagaaagagagcccaattgtatcattcttggtctaaatggatttgggggtagatgctgcctccccaacttgctcctggcttcattccactgtgacataacccatgaggttataataaaagtaactgggtggctgagagcattaaattgaaacacttctttggaaacaccaggcaggttcggactcagcaagtgctgggtcccttcccctggagagagaagactgcaattgtgcctcagttgggtcctgagcttcctgactgaagtgaaacaaaggcttgtattgttctagtccctgtgaaagaacattcctagtctttcaggaaatgcaagcctttttttctggtactatgtactatatggtccaagacaacttttattctgtaagcagttaggatttgcaaccatgattcttatccttccattcccccactaaaaaggcagtatatctccttagcaactgtatagcaggtttgcatcagccctttgatgaaagcttctaacctgagatctgatactgtgatactcaaattggaaggctaatggagtcaagactgcactgggctagtccatcttttcaccttttattgccttacactaataacatgcatagagagatgggggatggaaggaggcctggaggaagggagaaagagagggggaggggannnnnnnnnnnnnnnnnnnnnnnnnnnnnnnnnnnnnnnnnnnnnnnnnnnnnnnnnnnnnnnnnnnnnnnnnnnnnnnnnnnnnnnnnnnnnnnnnnnnnnnnnnnnnnnnnnnnnnnnnnnnnnnnnnnnnnnnnnnnnnnnnnnnnnnnnnnnnnnnnnnnnnnnnnnnnnnnnnnnnnnnnnnnnnnnnnnnnnnnnnnnnnnnnnnnnnnnnnnnnnnnnnnnnnnnnnnnnnnnnnnnnnnnnnnnnnnnnnnnnnnnnnnnnnnnnnnnnnnnnnnnnnnnnnnnnnnnnnnnnnnnnnnnnnnnnnnnnnnnnnnnnnnnnnnnnnnnnnnnnnnnnnnnnnnnnnnnnnnnnnnnnnnnnnnnnnnnnnnnnnnnnnnnnnnnnnnnnnnnnnnnnnnnnnnnnnnnnnnnnnnnnnnnnnnnnnnnnnnnnnnnnnnnnnnnnnnnnnnnnnnnnnnnnnnnnnnnnnnnnnnnnnnnnnnnnnnnnnnnnnnnnnnnnnnnnnnnnnnnnnnnnnnnnnnnnnnnnnnnnnnnnnnnnnnnnnnnnnnnnnnnnnnnnnnnnnnnnnnnnnnnnnnnnnnnnnnnnnnnnnnnnnnnnnnnnnnnnnnnnnnnnnnnnnnnnnnnnnnnnnnnnnnnnnnnnnnnnnnnnnnnnnnnnnnnnnnnnnnnnnnnnnnnnnnnnnnnnnnnnnnnnnnnnnnnnnnnnnnnnnnnnnnnnnnnnnnnnnnnnnnnnnnnnnnnnnnnnnnnnnnnnnnnnnnnnnnnnnnnnnnnnnnnnnnnnnnnnnnnnnnnnnnnnnnnnnnnnnnnnnnnnnnnnnnnnnnnnnnnnnnnnnnnnnnnnnnnnnnnnnnnnnnnnnnnnnnnnnnnnnnnnnnnnnnnnnnnnnnnnnnnnnnnnnnnnnnnnnnnnnnnnnnnnnnnnnnnnnnnnnnnnnnnnnnnnnnnnnnnnnnnnnnnnnnnnnnnnnnnnnnnnnnnnnnnnnnnnnnnnnnnnnnnnnnnnnnnnnnnnnnnnnnnnnnnnacatacaggcacatatacatgcatatcacatgcacacatacacatataccatatgcatatatacccccacacatacatattatatccacatacaacatgcacactctcattcatacaaacacagtgtgtgcatgtacacacacacacacacacacacacacacacacactagcataagagcctgaatgtttctctctgacacatacaggcctccaccaggagaagcaaaggggaggaaccccagagagacacctcgctcaccacactggggctcaccacactggagctcaccacactggggctttctggaactgggttgctgggtgtccccagaagtacgctcagtccccgaagctggccagtggcaggcagttgctttgaggattcttgcatcacccacagctctgtgggggttggttggcgttttcagaattaatcagaagcacaactccaagctaagtgctctagtcacacagtctaagccaccacgaccgggtgcctgccctctgaggccagcccatctttcctcccacatcttctatcccaggggactgacttccctatcaccaccatcatcagtgcacaccctgcacatttttgcttagctgggagcagctcctcaaatccaccagtggagcagatggtgataggaagctgctggtgcatcagtggccacgccccaactggaagggtggctgggcactgctaacaaaaccacactcccccaactctgaagcttctgctattgactctgcttgtgttccccttactctgagctgaatttgctagaagtttgcagaccctcgttgtgactacattcacaaaagccaacctggtattgtcctcttgttcttaggtggataatggaccttttatggggaatatctattggagaagctctttgtgtgtctgtgtgttagatgtgtggtatatgcatctgtgtatatgttggattgtggtatatgcatttatgtgtatgtgtgtctgtgtgttagatgtgtggtatatgcatctgtgtatatgttggattgtggtatatgcatttatgtgtatgtgtgtctgtgtgttagatgtgtggtatatgcatctgtgtatatgttggattgtggtatatgcatttatgtatatgtgtgtcgtgggaggatgtgtggtatatgcgtctgtatgtgtgctggatgtgtgaaatatgcatttgtgtgtgtgttgactgtatggtataagcatttgtatatatgtatatatgtgtgtctctgttggatatgtggtgtatgcatgtgttcatgtggatgtgtgcggatgtgtgtgtacaggtatgcatatggaggccaaagttgaaactgcatgtctctctcactccctctcttgtcttatattttgagacagggtctctcattgaccctggagaccactgattcagataaactgcttggccagtgagctccagggacccttctatgtcctgctcctcagtgctggagttacaaacacacccaaccatgcttggtttttacatggattctgagggtatgtactcagatccttgtgtgctttacccactggtccacgactctgcccccggtccacgatcccgccccctgtacaatgtacctaaagctggggttggatgaacttctgtgtagttgcagtgacctcaggttgcagaattttctgtggtcatcaccctgtcctatacctgtaccagaaccttggaggtgtccccatctacacacagcaccttaagactctgtgtcctgtgtcacccacagaggtcctgcttatactgaattgaagtgttaagcaggatcttgacatgagtgtggactttattggtcgtgagtgtttgccatactaatgtgacactcacaggctgacaacacaagttcacgtccagtactcacatccaaatatgtgggcacagaccagtgaggggagggttgggacaggggttgacatacccgcggggacaccacccacacaacaggagttgcctttctaagttggagaaggtccttctcagctctccattccataacaagtaaccagcaagatggtgcctgcctggtgtttggcacatggtgcagacaagaggaacaggagcctggtgggtggtgcccaggccacgcagcggtcatggcttcaatgcctgacacgtcagtgcctaggtagattgagtacttagaggatggtggccatgacaaattcccatctagttctgtgatgcatttagacaccataccccatttcccatagggatgcattgtaagacctcctagcaaatactcgaacgctaggataatcgccacgacccacaagtactatgggttttgctcttatgcatccacatctatgatgaggctcactttttaattgggcataataagagatttaccaccatagctaataataaaatgtaacaattccaacaacatactgtgataaaaataccagtttcactgtggaatctgatcattaaaataagggtcaatccacaaagggaagtagctactaagtagccaatgagtgtctattgcacacagcagagatagcctgggcaaagatgttgattcaagcccctggtaggatagcaagagatttcctaactctcagaagggcaaggcatttaaaatgtatggagtcttttatttctggaaatttctatatgctgttagtcaaccacagttcactaactgatacctcagagagcaaaactactgatacagaaacactgtgcctgtcagtgtggctcatggggagactctcaagtacggcaaatgtgtagtagataaaggccggttctaatatagtgcccccagctttgtagtggctcaagatcccagccaggcaatgctcattcaaaccaggtaagtttctgtgggtggccagagaaatgtgtccattagcactctctgataacactcaaccatcctcaggcatagcactggacttcatgcagttgctcaaattcaactttcagaatttcatctttttttggagacccagctagggctctaggcctcagcagattctgcagaggattttccttgaattcggtcttgagtctttgatgagttgggggtgacttgggggtggcacttgtttgttttctttgggggtgccactggtagatggcttcttaaggatgtggtggcatttgaccacagagcattgtggggagggaagtgacacggccagagcccttcctctgactgctgggtactgaccacttcccctggctcttcctggaaaggagttctcccaacacagtctgtctctcaggaagtggttcctggccagccccagaggtctggtagggtctttctaaggtgggggtattttgcagagcagtagcatcacacccctttagtcccagtacttgggaagcagaggcaggctagtctctgagttcgaatccagcctggtctacagaatgagttccaggacagccaaggctaagcagagaaaccctgtctcaaacaaataaaacaaaacaacaaagaagattggggacttggcatgtatcctgggctgggtgtggattctggctagttctcttatcccagcaagtcacctcagacttgtccagaggatcaggtagaatactggataaaagtggtacgcccagcgttttgacatctgtgcagggcatttcgggagaactgcacagacgagctcctcaaatacactgcatgcgttcacagttctccctggcagcatgaaggccccaagctactgggacacacccgatagaattctagatcgttctagtaaatgtgctttggtttggtatctggccttgcccatgccacttgtgggcataagcactctgtttcccatctctgggcctcacccccctcagatcctgaattcacccccacaatcctgtcttgttgggttgtcagggtaaagctgcctccgtgacctcaggtacagagactgtggagcagtcaggcctctgctctgggccccagccttccctgtgtctgtgggcaagacaggttcttgatgctccatccttgttccctcggactatggaccatagaaggactcctagactcgtgggaggcaaacgaaagccaggcacacagcagcccagctctgcccgacctctgacgtctttgctttctgccaaggcctagaaccaccagctgtttatccagcagctcatgcacacgtgagatgattttctggcttaaaggagacgagtttctttgaaattatggctgtaccgcctgcccagggaagagggcagctgatctttctggtggtggaagcagaattcagtaaaaactcttcgcttgcattgcagcgtattgttccggcgtggagcagggcatacttttgtcataatgcagtttttgttgtcgatgaatatggcagtgttcttttctgtggaggaggaggaggaaggattcctgctgagttcacagaactttctcagtcggctttggagtgtaggtgcatgtcctgtgcaacacccatcaaggctggggatgcatttgctcacagccccgtgttttgtaaatgctctggaaacgtatgtttcattaggcactgtttaagcagagagacacagcttttcctccaaacgatgcggctgaagctcactgtgccttccttcagctccttctctccctctcttactgtgaggctcggttctgtgaattttagaatggactagttccatggcttgagtcaaacagttgttggaagatcactgcaccaaaatatttgagggtgctcttgctaaatgattacttgattggcagatcttcctcttaagtggtttcatcattgtcaaaatgtttctcagaaatgtcttacaaactgctttaggaaagttcaggttaccgtccccttttcttataacatgaatgtcttatctcagcccctgagtaatatccctgcacatcaataagaatgctgtaggccacgcaggtccctgtgcctctgaggcaggagcctgccaggtgcaagggaacgtaggtcctgtgcgtcactgtcatctcccaccctcgacctggcaccatctagtgttcaatgccacacaagaatgacatctgtaagtgtctcttttagacttaagaccatgagggtctgtgggtggtttctgttgttgttgttgttgttgttgttgttgttgttgttttttaacttctcaatccttaccagttggcctgtcactatcacacagcaggcatccagtatttgttaaatactggcctagccattttatccatttagtcttcagggtgctctgagctactagtatgcactcagaaacacttagacactaaaagagattctggcggttgcaggttcttctcagagacccaaaccaaccgaaacttctgtgtcagcgaatgactgactctcattcttgtcaactgtaaagtgtggctcacacacacacaccccatacagggtggctgctatgatgacaaagatggctttctctttattcactgtcttacagccagatgcagctagggagatactgttgaaaaacaaaaccacagagagagaaagagttaaagagataagaatgccaagagtggggggtccaggaagtctggaggacacagatgagatccagagaggggaagagaggagtctgacaggtcctggtgacatcgcacagcgtgaggacatccagacctgctgctgtactctgagagcagggttgtcttccctgtgagtggaggcctattgaggccctcactgtgacatcttccttccctgggagggtctagattctgataaggacctacacattatactcttcttatctgccccaattcatcacttagggaagacaatcagtttagtttagggtggccactggggcctggatgtactctattctgcccagtctgcagcttggttttagagaaacgcctaagcgtgagaccactctttaaggttgtaagggaagcagaagccatggacagttctcccaggccaagtgccatctcaccagtttcactaggagaagtctagctctttgagtcctttataaagcacctctccatgtgcatgtgtcccaggcaacaagctgaagagcccacttcagttgactgattcctagtgtgtctatgaatgttgaagtgtcttggggtcattttcatcccacacagcagtagaaagtagcagagagaagattgcattgtagatgatgtttttattggggtaaagatgttggggactgtagggcagaaaaccggagcctgcaagctgtcaatggagagacgagtgtgggaagggccttggctagcacaaccatgggagatgcctgagctctgcgctgcttcccactcttaaatggcatcaggggtaaagggagagatgggaactaacatccaggaagcaagacgtctatgggcagctgcaaggggcggggcttgggatgtaggggactgaggccctctttaatggagtgtggttggtgaagcaggcttggtcagaggtgtgtcactcaaacctaggagtaggggaaagggacaaattgacaaatgactccgttgtggaagggagtggtgggtatccagtgaagctgcgtgggtcagcccaaggacccatgggggttctgtatgagaagtgtttgcttgtctgcggctgcagagaaaatggggccattgtttgtaaagttggtgttatagttttttgttttcttgttgttgttggtttttttttaattctgaaacggtctttagtctttggatgctatctaagagtgcagggacaggtttgttttctctgctaattaaaaattaaaaggcaggaaagaagtgtccctgaggatcttgggagccatcatatactccctgggaaatgagggtcccctcttgggggttcttagtctcattaataacagaagttgagaatcctagaagctagaggacaaagaacagattcaaatggaagctcagggacaatttattggcctttaaaaggaaaagtccagggctagcaagctgtaaatcttgcagttgctggaaaagaggagaacaggggaggagaaaagacttacagcttgggggagagtgtcaggccagccacctgcagacaaaggtgccccagagaaggagctttaaaaaagaatcaaggaaatccgaagccttagggagttaggaagcatacttgggctctggccagcatccaaacgaaaaagaaacagttacacctttcagagtcagacctcagcaagaccaacagacctagccactcatagagactgccatagagaataggaattatgggaaggagaagtgcatggtcggggaaggtaggggaagccaccttttctggcctgccccacggcattaacccttaagggaggagacaggggcatgtctccacctagaggaggcttccattctttacacagtgggctggcagagttggggggggggtgcaccttctgagaaaaaaacacacgtaagcttcactggtcctgtcttcctaagtcacacttgcatcatgatgcttggaatctccctgcaggacccagagctcagctctgcattatcagaagtaaaaattgtgggtttgagaggtgatggggttggtccatgaagctgtgccttagctgtgtgtgttgtggtcagaaggcaactccctaggtgagcaaccgcataggtgagcttggggcatgagcaagcactgacagacagggagagggtccttctctttctaatgacctcatacagccagttctgtccaggacgagcccaaagaggcagcaaagtctgtaaaccagctctggagccactgccctgctcagcggtgggaccctttgtagcaaatgactctgtgttcggacctcagtttctctgtctgcagagcagctcttgtaatggattcctcctgagagtcctgagaggctgaagtggcccttgttgggatgcctctctaagaagcttgacaaagctgttcaaggacaggagcccacaaggaagcagctcctgggggtgggggggagagataaaaatgggaaaaaaacaacaaccaacaaccacacaggtccaagtcgtgacagtgactgccgctgtatcactaccgggaaagtctgtgtgccctgcaccaagaaatgagcgaatcattggcattcacctgaagctgagagcatcggtgcctctgaagagaatagaactgaactgccttgctcctgaattccagggcaatcacaacactgtggacagatgtagcaatatggaaaacaccgggcctgtgcttacaaacaagggttcccctagcttactaatatgcagagggggcaccccacagtgctccgttagagaagtgccacatgtacttgggtggagagcaagcaggtgtcttgcctgggcataattgctagaaattttccagcatttgcaaagtgtgcttgctagtctgtttgggttgacaaatggatagtgagatggtgttaccttggtgacaccgttgcaaaggttcacctccttgtctgggcagctggaacctgtgaggtaggcaggggagccatctcaccacactcctttgtgcggggagacttcgctcctctacattcagcttctcttccctgctcttccgtgcatcggaagatggagaagtagcagctctgctggtatctacaaggtaaacaagaaaactgtgagacttggcagtgtgagatctgtgcaatctgcagcctcgatgattaggaaacatgacacgctctcggcactccacagcccctgccagcaaagtgtggctgtctgatggaatgcaggcaagccctaggcatggctggggcaccgccatccccctattgcctgcctgcggttctcttgataggaccttggtttctattctatttctagcagtgccctgctgtttagccagtctgtacattcatggcaatagtgattaggtttgagggttgctacgactgacagtgaatagcaattcttactccccgagtggtcttgaatcattgaccactgccttctgggaaaaccggaatctcaagagaaggcagccagaatgcagccagaatggaggaacttggccagtctgattattcacagtaagatttgttcaaggccaaggtccctggtatttccccacatagagttctctgtgccttttgctatatggaatctccaactgtcataaaaatgttcacatttcagatatgaaaaatgtgcgcaagagttttaaaataaaaacgcaagcgcttcctcaatttttaaaatcttatcacccattcaaaagaaaagtctgtagctagataagctgcaggcagccaaacgctgcccacaggattgcccgagctgcacgtgggccactggtgtacggaaagacactttgcttttgtctgagttcagaatgattggctagctctggccacctcaacagcaactgtaactttatcctcagccagagtggttccgtggacttcgaacactaccctcgattgtcttttctatgaagcttggctgcacagtaactccattgctgggtccttctatcttgggaaccatcagggctaagcctagctgctggtcacttcctttgggagcgcttttcctgggcctgaccttgcctgaccttaggctttcctcagggtggatttccccttttctgatgctgacaccaccctctttcccagggtaagccaggcttcctccctccctgttctgaatggatgtgacgctgcactcaggcaccagcaaccccagctcttcttctggagcagatcagttcagaccactctaaaaagacttatccctccccagatgagggatgtggcctgtctggctctttccagggatttctagactaaagaggacagtggaactgggaggaatttggaggaataaatctgcctgtaacagaatgtcattccgggctgtggcaagcagcaccctgaacactaggaacttagagagggaaggcagtggtgccctaaagaaattacagctttgctttgctaggggacagagctcccacccaaaactatgagcacgcaaggccaggggagtcagccaagagtagcaggctggaggagcctcctattcccccacatcctcacaccacaggcagcagggtccccatctttagggaacacccccctccttgcctcataagctagctgtgaggtgtgaaggggaggaaacaacagaagctgtcccccagctccgtcctccctcctccctccttcccctttttggaggatgctggctttcaagataagagcaggaagcttctagattgtggaaggatgttgaacaaactgcccacatcaacggccacctcaaccctcaggttttaaatgtttcatgtgccgttttagaagttttgctcagcgaaatgaggactgtctacaaggcctcgggctaaaggaagtgtatagttggcaaacgtttattttagagcctgggttttttttggggggagggcatggttttgttgtagtcctgctttagagaaatagatagctattcaatcatgcatgaaacacagaccgagagtgctcagcccattgagctatctgaagttctggggagtcaaactctgttttaaaaacaaacaaacaaacaaacaaacaaaaccatgttacttcaaagttcacttttgagttatcatttgtgtttgattgtttatctagctattgaccaaacagcctatgcttctacaccaaactagctttttcctttgtggttttaatctgatttgacccagccttgtgcctccagctgtagtcctgtcccagaagcctctgtgtattactggacttcatttcatattggaacaagtcagcatagcattggaagatagttttgagctttcttatcaatttccctgggaatgtggagacagtgtccacctcagctttcctcattgcttgcctcctcgcaacactcctgcaagcatcgtctctgggtattttagggtgaaacaaaggggtgaagttttgtaataaactgttctacaaagaacagtttacctatccacattaaccattttctgcccagcactccgcctctgccttgcacttgggcattatgttatgtggggccttgtggcatgctgggaaccctttgcaactctatgtgactcaatatgctgcctcttcattatttttgattccttcgctagggaatgacacagtgtcagatgttacaaatagatcatgaatgctgttggtttgttgttaataaatgaactgtgatgctgggactgttggtttccctaagtatagaattactattgttcccgcatcagctttttgttagcctgtgtaacactgttgatattcttgggctctttgtcctatgagctaagtgcatgtcttagcgataggggctttttattccataggattctctacatagaccattataccacctcagacgtatgctttatacatctcttctttagttcatatgtcttgtattttttttctcgctttattccattggctaagattcccagagctaatgaccaaagcagatatcctttatgccattagaagtttgagtataaaatttcccaagcggatttaacagttcttagttgcctgaattagttttctgcttctgtgactttaagacgatcacatgagttcacttctaaatttgtaactatataataatttataataacttgttataatttgtactgcagagacattgttaaatttgttttaaagtaaccagccttgccaggactctcatcacaagcaatctggtaaaaggcagcgtggagtgagccagctattttaaaatagagacaactgaaaactgatcctaccctttagctgtgtaagtgagtaatcacaacccagccagatctccatccgcaggcagatgaaagtctgataagcctcatgtgaggttgcctgcaaaaccaacaggaacacagagctgtatccatcagctgacggatggataaacagactgtggggggggtgaaatatttgttagtaaaagcaagtgaggtactagagcattctatgggatggataggacttgggaaaattgttctcaatgaaagaatctcattgcaaaatgccatatatgctataagtctatttctacaaaatgccaggatagggaaatctacagaaagtagctgagtggttgtcacgggccagagagaggccagagtggtggacaatgaactcatgagtgtatattttctttttggatgatgaaaatgatcttatattagatgtgtgagtcttttttttttattaattttatttcagtgtgtatagagtgctttgcctgcatggtatgcctgtgtgccacatgtgtgcagaacgtgaggaaaacggaagatgatatatcccttggagctagagttacagagggttggaaatcatgctggtgctgggaatcaaaccctagcactctgcaagagcagcaagctcctagccgagccatctctctcgcctctaacatgagattttaatgaggttactaaattcttgaatatactaaaaaccaataaattgtacattcggagtgggcaaatcttacatatataaattatatcttaataattctttttaatgggaagaacacacagcttaagctaggtgacgatcagaggcgaccccaggggtgtagagtggaaaggtgcctctaccttgaaagaccatctccagggaaggtatggggactgcttcgggtgggacctttacacccctcactagggacagcaaccgattgaagtcaggcccttaagggctgggtgtcaaacacttcagaccctggggagccacattccaccctcaattggcttccagggagcacaagaaagtttggtgcaggtcatagatgttgaaagccaatgcatgtagcaaaaagaaactaccatcaagactaagcaagctcctgaagaccctgtgaagagtgtcagccaccagcactgttggaaattggagacccaagtgagagagaccaacagtgtcaccagaaaactaatgttcttttgttttctttctttctctttcagactatagccctcatttccccttggtgagtacataattttctaaaaattgtttctaatgtctgattggttagcttaagatgcctgggatttaattgttctgtaaggtttatcctgttgagaaacaggccatatggtcagagggtgacatgcaaatttagtgccttaacttactcaatgtctcacatcacacttctcgttattattattttttccctggcatttgaaatgtagctcagccactcgatgtcctgagatgcattgctgtgggcagttcccacgtgctttcctttctctgtcctgtttcttttacaaccttatctcagtggcacacattcaacacccattagggtgcatagcacagcggcacatggcggcctgatgggcgtttcttctcataagtggagctactgccctgggggaaacgggtgaggaggtgtttttctgaatgacatttctgaaagatgcatcaatgtcatggaattttgtgttgtacaccgacaggggctaggtaacagccaaattctacttctctgatgcctgtaagaaaatacattaaagactttaaacatcatgacccacatcttgttttgtcttgtttcaggcaagctctcactacgttgccagagctggcctcaaactcaaggtccttttgctttgacatccttagagatgagattccaggcctatactgccaccatccccttcatagcctttttcaaaaacatttaaatcaacttaatgatgttccccttttcagaagaaagggagagaggggtgtctaagagttttgttgttttgctttcttgcttacttgcttgttgaggccgtaggtctgactggcctaaaactcactgtgtagactaggctggcctcaacttcatgtgatcttactgcttctgcctcctaagtattgaggttcagggcacactccactaaaccccacagaatctgagtttagaaatggctgcagtgtggtcacaagaggaacacaaaatgctcagctgataatactgcccttaatgggcgtcaccagagtgcaaagtaggaagttccatttccgaatgcacggccacctttgaaatatttttactgttggggcagctaccacatgcctgtaatcccaggacttggaagacagagccaagaagtctcgagttaaaggctagcccggtttacatgagaccctatgtcaaataacaaaataaaagcaagaacaataaacttctactgtgttccagactttaaggctgttagattggctggcctcctctctgaggcaaggggtccttccttggtgtttctccattggaacgtaaatgtgtacagttgtgcttggtttgatcagattgctctttctctgttttggcaatgtgggatgatgataatccagaatttctcaagctaagaaagaatgaagccttcctttagcctttctgagttttatggtcctgctatctgttgcattgttgttagatgtaattgattatgagtggcatccaactctgcttgggtaaatgggggcagtggggacaaaggggaggctcactgggattgtttgtatgagataaagctttaattgccagtcagcaactcctattgtcctggaacaaaagccagaggtgttgatgggtgcatgttggcggggaatgcacatgaaacgtgacactgtggatttgagcggtttgcttttgtttcttaaagtgccttccatgctggagggaagtagtcataggttaggccccatggatttgtcttttgaaacacaggaacagattctggttggttctaaacatgtgacctttgtacttcttggcacttggtgctgggctggcttgtccagagccagccttccttcctcccattctagcatttccgagcctcttggtccactgccctgatgcccagcaatgatccagcagctgtccaaacgagtgatcctgtgacaacagctgctaacctggcctcagcttctcctctcccagagccctgtttaaaacccagcaacaggtctggaaggccagacctcctgcccagcaatgctaaactgacttctgtgtgtctttgtttcctgtgtggatctgtgatatccaggcagcagctccgatcctcttggccctgacttttgcctcagcatccattctgctttagtcagtcactcagttcctggctttaaatatatggggctgggagatggctctgtggtaaagtgtctgctgagcatgcttgagatcctgagttccaacccccagcacctacacaaaaagccaagcacagaagtgagtgcctgcaactgcggtactgatgctggctggcgtgggatgggcagggcaggagatcctgagggctaattggccagccagtgtgggagaaccccagtcaagttccaagtacagtgagagaccttgattcaaaaggtatgtggttgaggaagactttgggaatcattcactttgacatgaggcgtatttgaggagtggacagggtaacctagtctgccttcactgggactgtgctttctggccctcagcaagattctctggcctgtttggtttccgttagcaaacatttgaaatataggcacagagatttaggatttcagtgactggtcaacagaatgatttctaacttctgccctctgaaactggcttttggacgatttgggactttggacagtctgcttgggtagtgcaggtaagctccctgaaactggagaccatcacaagccctcgtccatgctttgtgtgatggctgtaaagaaaccaggccagcaaccctagcaaaatagacacaccagccccagcaaacctctttttttctgcccagctgtcaaaaggctttcagtttactggcatcattcttgaatttccactaaaaaataactatcttaatattggctttcttaaaaagattcaaaattattctcttttgtttgggaagtcctttaagcaagagtcaacccttttaattttgcatttaacaataaatttaataaagttcttgctatgcaacatgaagagttgagtttaattcccaacaaatgtataaacagctgggcatggaggtacacacttgtaatcccaacactggggaggcagaggcaagcccagtccctgggactcacgggtcagctgccctgggcaaattagtgagtttctggttcaatgagaaagtgggtctcaaagatatggcagagaacaatagagaaaaacatctgctgtggacctttggcctcttcacaggcacacaaacacacacacatacacacacatacacacagacacatacacacagacacacacatacacacacacatacacacagacacatacacacacacacacacacacacacacacacacacacacacaccacaagctaacacacaaaagacaaaacagtggacttggagaagtagtcctgtcatgcttatctgtggccaaaggtgtttcatctggagaatgtcacagttgagtgggttcctgtggtccagaatctaatgcaaagaaatgggagaatagaatttatggaagacagataactaaggtttaaatacattctccagcctcgaggagcatctccactttaaaacctaaaagtggccacagccaagaagaagcaaataacgctgtaaagtgatggtctcaccctggctcatggaaacaccaaagggattaaaaactgaacgaaagtgctaatagcaaacagcagccgggcgggcgttcaccagttcaccagcacagacctatggctccgcccttcacacttgcaaagcttgtttcgttttctcctctgagtcaatgctttttcagtggtgttggtatgaatgaccactcgagcaagacaaataatctgattttttcaaataatagttcctgcccctgctcttcgaggtgttggcatccttaagtggaaagtcactggggtgactttagtaggcggagcaggagctgcaagccctgaattagcctttggaatggcaggaaggggccagagtaagtcagcatagcacaggaagaggtgcacctctggagggtgtgtggcccaggccctctgtgaggccgttgcctgtgcctgggctttccctgagagcctgtggtctgcaatgcactctgggagctaagggtgactcatggccttccagtctcaaaccccagggagctgccaccttttttctagaagtgcttcccagaggagtctggtaggaagtctattgtcacacacagaggcaggcaatccccatcagtcactctttccacctgaagggaaaaaggaacttgggttttccatataaactcctgtctcgtcaccgcacccgaggcagaccttgacattcatctcaaaatccgtttcggctgacagagaagcatggattccccagggccaggatggctgccatgcgtcgtcccgattggacaagaggtaaagaggggacccgaggggagcctttcttgccatttttagatttctgtcatgcttgcttataatatttatcatttctaaagtacccaaaatttaggttaaagaatattatcaaggctttcactaaatgcaaattggcaagcacctctgctaactttgtccagccctgtgcaggaaacctgggtttgtcccagagccagtttggtcccacaacagcccagcccaggcagacagccacgcactgggcccagcaaggagctgctgtctgggcctagagagatctggagggccatcagaccaccaggaatcaaaggtgaagttatttttttctagtgacatggacaatttccacctattatttagtaggcattttatcatcaagagtgccctcttaatatcattctttgggatttggaaagtaattggaaatggcccactaagagaggaggaggagctacctacctgaagcaggtcattgggccaggtcttcacgacctgtgtctttggttcgagagccagcccccacctcccttgccctgtgaggttttcctgtctgtggagctcaaatggtaagacagatggtgtgagcaacaacagggcatcagcagctgactggagggtgccatcattcacaacgtagacacgaagtgtatgagtcccattgtgggtctgagttacagggagatttctcagacccactgacctctgaattaggagcaaggtcaggtgctaaatgcaaagacagatacatagcagggaactgactctcaatggcatctctaccaacaagagtatgtcccatggcagttgagacatcgagctacagattagacagcatctttgccaaacctgccaatctgaaccaacttctagaagccagtctggtgtgaagttcaatagaaggtacttagaatgctaggggaaggatccccgtggaattgctgaacaaagaggctccacgtcatgggttctctacacagcttaacagaaataggccaatgcaggaggaaagactgggtttgggctgttttgtggtgagagcgagtcggttctcagcaaccttttaagaatatgttggcgattccacatgttgatccacaatgagaaatggtgcggatcaatgaggcagggaagcttatgcctgtaaattctctccagaatttgggagactgagacaggaggattgctgtgaggtcaaggccggtctaggctacaccgtgagatgctgagatgtgtgtttgttaaagctgccatatcactgtgtgactgctgaagaccaacattctgatgttgatagcaatgattatttggagagcagggcttggtctgtttcctgttttgctcaatgatttaagttccttatgcctaaagcgcaaatttcatttattgtagggtgcatccaatataggacacttgacagtgtataaagcaggttcaaatttattgttatgtgtgcctcatacatgcttggaacagtctggggataccttgacacctctgccttgaagattaaaaatcaaaaccaggggctggagaaatatacaatgagaaagagcccttgctactcaagtgtgaagacctgagcttaaattcccatctacagtgtaaaaggtcagatagagtcacacatctgtaaccccaataacctcagggctatgcgggcagagacaggaggattcctacggtgtgctgaccgtaggctagttccacgttcaaagagggactgtctcagggaataaggcagagagatagaaccggacaactaaaggtcttctttggattctgctcctactttagacacatcacagagagagggagagagagagagacagagacagacagacagacagacagacagacagacccaagcaggctgaagaagtaagtcatcaccacaggcagtaaaatctgtaggggctagcaacatggtaacattatagtttgcatgccaatgtgtgtgtgtgtgtgtgtgtgtgtgtgtgtgtgtgtgtgtgtgtgtgtgtgtgaagcagagactataggcagttatgagacatctgacacagatgcttggaactatccaggtcttctgtaagaatggcatatgctctgaacaactgagccctttctccagtccctatagatattaccttgaatatgaactatgtgccattccctatagcagactaatagactgatcttggctgagttgtttgaaatccactaaagaaaaccaacaaatccttccaagtgtccctctaactggctgagtccttttcttccttaaatgccagccagctcttctgcccatcacccaaggtgaggtcatacatgccgaaagaagggactccatcatgaaaaatattttagagccctgcaatcccacagagcacaccgacaaatcaaagcattctatgggccgtgcacatggctggcgggtggatcattgtattttggaacaacctcatgaccatcaagttgatcttggctagccttcccagagatttcctcatgttatctgctaaccaaactcagccttccaatctcttttcacaccctcgatgggtttcctcccagcacagcctgtccactcccttgcccaatgtttatcagtatctcctgcagactcatagttgtatggtttttttttttttaaagttctctggggaaagtgggagacaacttagtcagtaagatgcctgccatgcaagcataagacctgagcttgtatccttggcactcacataaaaagctgggcttagtggcacacacttataatccaagtaccagggatgtggagacagaagactcctgagcctcgctggccagctggtctagataaaatggtgagccccaggttcagtgagagactcggcctcaaaaacagaaaaaacaagtaagggagactatcagcttctggtttccacccatgccttcatgtatgcgtgcgtgcgcacacacgcacgcgcacacgtacacatacacgcacagagagagagagagagagagagagagaaacaagcgttagaccctaggtctgctttagtttgcaaggctagcgtctgagcccttgttttagcaagaatgaacgtgaattttgtgcaggagtttagaggagacctggatagggacagatggcaagccagtggagaccagtaacctagtgatctgctggttttgtttgagaaaggccaaatgacttgggtgtgttccttcacctgagtcattcacatcttcctggtctgagacatgaaggactggataaggatttttacaaaggtctcatggagacaaaactttgtgatagctggatttgagctaaccacagcggtccccagcagataatgactgctgtatatcaacaaggctctggcccgtgaggttagtccttactgggatgggtttgcaaattattatctctgtgatgataatctctgttttgacagcagctgtcctgaggctctcatctctgtccacttctatttgctcttaatctgctaaaaaagaaaaaaaagccaccgtaggaaggttttgttaatggaaaacttttatttgaaaagcagtcagttttcttcccattctgctgctgacgggcgacaagaataaacaaacactggggttctgtgaactttgactttacagagtggctctaacacttatccagtgtgccggaggctcctttaatccccagagatgcagaccgagagggtggctctcccctgccctcagagccagtctacgggaccctttccaggagccacaaggtgcttcatttccctggtgggtgtgggtgtggttcactgcaaagaccagttaatatgcttagaaaccatggccaccccaatattgcccggccccacacttggggagtttggcagaggtcagattgaaaattgtatgtctttgagatgctagaggttcgccgtgcccaccgtcagtcccaggaatttctagttcacaaacctattttggcttccttccaatatgaagccagctctgacattcccttatgctgtttcctgttgtgggcggattgatttaatttttaatgagtgattcactgtccgtggctgtgtgttttcctcctgttgagctgagtattaagtcatgtttcctttaaaacattatttttgatatcaaccgagcaatgtggtgctcagctgtggagacaaagggacccagctatgtcccagaagggatggcatttaacctgccctgggaaatgacagttgtgtgctgtgctgttctcccaagaggagactgcctattaaacagccagagtgtttcttttatcatagtacagagctctgtaattttaagaagagttttcaggttttttagtgttaatcttgagccccttggaaagtctcgtgctaggcatccctgttggaaagcctgcctggaacatgagctgccccattgttgtgtcttccctcatgtctgttactcactccacgcagcttctgtctgctcagccaggtcatgaccaaaaaaaccagtatgagaaatacactgatcccccagagcagctcctcctctttggtcccctctcttgccaaactcaccaagtgcctctcctataggaggtatcaaaatgaggaccaccctggccttatgaggagactctcctcgatggcctgagcattaagccgggggcctgctggataagtggtcccggctttcccctataaccaactcagtgagaccccagtatcatattttacagtgaaacctgtgcacttgggaatccaggagggtgaaaaatgcagccaacaaacggctcacagaggcagcagcaaggtgagcagggtgagtggcctgctaggtgtgggaggtcatgattcaaaagtggcagttttaagaatgagggctaatgagatgactcagcaggtaaaggcacttgcctcaaacctgatgacaggagttcggtcctgtgtgattaaaggagggaaccaactccttcaacttgttcgtcctctgacctacacacacacacacacacacatacacacacacatacacacacacacacacacacacacacacacacacacacaccacaggcacatactatgcacatacacactacacactcactacaaacacacatatgcacacttgcactacatacacacataagcacacacacatacacacacacacacacatagacatgcacacacactaactgttaataagaatcccagagtaaatgtttttaataagacagttgaagagatacgacaaccatacttcaggggaagcggggctccagaaagcagtcttgctacaagtgaagactcctaaaactacagcagctgagagtgtcctgctttgaaaatgagctgctttttgtttatttggtaaggtagactgaaactagggcctaacataccctaggcaagagttctgtccttgagccccaccccctccactcccctccctccaatataccaatctcttcttaacctgacatcttgagccggggctcaggaggtgctggtgcagaccagaggagacaggtggccgtgcctggctctccagggcccactggagcccaggagaaacaaggatacactgagaggggttgggggagagagctggagcaacagccttcctcctattcctattcccattccctcttgggttttggatgctgatctacctgtatcgaagtctcaagaacctcattggaaatccagatgcctcgtcaggaaaccaaaccccaagttggaaacccaaggtcctcctcaaaagcctaggaaccaactgcgtctagatctgtaccacaagcccaagagacgattagaaaaccagccagcacgggcaggcagtcctcttccacagcccaaacccctggtcagagagccatggctccgttccaggcgttcgtaacagtcatgtggacagcagcctccatctttcacccaagagtgctgacctcctgaaacctcttagggtttagaaatgagacttgtcttattttagttgggttctagagcactttctggatgtgtctgccatgcatacagctgtgtccttgcgatttattttaatattttagttggaaagccagtaaccatgagaattaaaggaataaacaacctgctgctagttttggtgaaaaacagagtcttacaggagggggggtcttaagacactgggggtgattgtctgacgtcctcagaccaacagtcagaggtctccctccttgaagtccgttgctgaaagagaacaagataccacagcgagggagaaggaaaacccaggacggacactggcccactgacacagaaccagcagtctggctgaaggcaggacttagtttcctatttcccgtttcctactcgatctacattttctatatgtgactcataacttaaatcatgcttggtcggatcacagcgccgggcaggggaacatctattttatcccatccgactgtgcctcgaggccgcgagggacatcactggtgaatgaacctattgtcttggagtccccaggacttgcccagcacctagcagatctgagaaagcttggaaactaatctgtgactctgtgaacaaatgagcagacgggcacggggagagtgggttctttactcagctcagggcagcactcacggtgaacgagccagacgcatcaaattcggggtcacttgatcaaagggcacggaagaaaagctcctttcttctctcgtgcatccgctttggactggtcctagtcagtggtgcttacttctctctaatatcatgctccctcaggcggcagggtactctcgggccttggacttggccggaggagggtggccacacagccttcactttcctgtgcctgagccctgtcttctgcagggcagttagggggaagggcagacagtagcagatgaaccacggggagtgtggcagaatgtggacatggtgtgaatcacgacaccaagatcatgggatgtctgccacagcccattttacctgcaaaacacaaactcaaatggtaacagatttagaatgggtatcagagccacggttcagagccttaggcctcgagacagggctcccatgatcacactcctctggagctagccctaggggtgagtcgtgctcagcttgctgtgtgctcacccgtgggagtggtagaaacaagagcatgtgtccttcgcagttagagttgagtgatttctcatctgtttctctgtctgtcacacccaatacctaaggcttgcatatgccctgcctctcctctctgttctactgcgtggtgctatcatggaaacacactccactgtttaggcctgctgtaacttgcctatcctttcttaatgagaatcgtgggccttctggacagagctctctctctctctctctctctctctccctctccctctctctctcgctccctctccctctctctctctctctccctctctctctctctctctctctctctctctctctcacacacacacacacacacacacacacacacacacacacactggtggcaaaagtgtacccagagaacctgggtagaaagaaagactgacatcaactaacaccccacaggtctcaggaactcttcaggggtcctctttgccagccccactggctcctgtgacctctttgcaggatatggccaagtttattgtgctgttttgtgactgtgcaggcaggaatcaggtggacatgttggtacttccaggtatctctctgcttggtcacagggaagagccctgctctggttctgtggcggcttccaggccagccagctgtacacttttcagtccaacttggagttttgatgcctcttgtgttcccaacacccacttccacagtttcaaagagctgatagatgtgcccgctgatccgagccacttattaccattgagctcctctgtcttgatgtgtttagtcacctgtgtccaaaaacaaggctgtggaatcatgtgggggtttcatctaacaaagaggacgaacctgttctcagcatcagtgctgcgatgcctctttccacgcagacagcgtggcaagagaggcctccagggcaatatggctctaccattcaacatccagcaggctctcacatctctctcagggatgagaacccacaatgcatctcctgctttctggactcaagaatgagatgaaaggttatgactggcaaatggcacaaaccaaccaccacttcaaggtaggggaggccactcaagatctcctgagctctgatgtctagttcccccaccaccccatccatttccttgaagatcaaaatgtgtgtggcttcctgctaaacttgtccctaagccagagcaagctagaaggatgctttggctattgtcacaggggcagccaattcggaaatggctaacacagagcagaagagagagctacaccactgggaaacattgtgggggtaactgggggttaccccactttcctattagagggaggaacagggaagcagggaggctcagtttgcaaacacagtacccttgttaggtggctcagaaccgcctggaactctagatccccccttctggattccaaagctaactgcactcatgtaaaacacacacacacacacacacacacacacacacacgattgaaagtgagtttcaataaggctctcaaagtctgcatactctcagagtcatagatccatgatcatagagttgcccgtgatgatctaaagacttgacctgagttgttggactggatggggcccacagccttgtatgatttaattagcagcatctgcaggaggttgttttaaacaccttcatggaaaactagtttccaatgatgctgctctattcaattatttattttttgaagggatcacaggatagcttcactgagagcaccacctacacttactgagggcggaaggaaaacagcccacttatgaacctcatcatccctccttgcctcgttttgcattctgtccacgtttatcctattctcgcatgcacacactaaaaagttatctcagctcaccttgaaccaaatggatttgacctctatttataagatgtgccttagcgtgaaagacggagctttctttcagagttcattcagcaagccgtctgcctctggctgggtcctgtgttagatgtcagccttggggtgagcctcatttctcttggaaaattcatgtcgtggacatcttgttgccaggaatcggcgtgattgacttttcatttcagagtgatgtcaaggctcatgttattcccagtgtggacacggagtggtgaatgatgtctaattatttggaaaggagtaggtttcttgaaggatgtgctgtgttgggagcttctgttgcctggcaacatgtaactttgccggtgtgtcaccaaagacattttaaagggctagagacacacactgagacaactgcatgttaaggggagaacctggaagctgccctgttagaatcatggcttccaccgcagaaagtaaacactgaagagcaggtgtgggtggaggctgggtgcagagcgcatgcccaggcacaggtgtgaaagatgcaggctagccccgttcttccttgcatctttctatctgttgggttaaagtctattcaaaatccgtgtgtgtgtgtgtgtgtgtgtgtgtgtgtgtgtgtgtgtgtacactttatgcagatgcctgtgcatagacatgtgtgaaagccagttgtagacattgagggtcttcctctattgttctctttccttccttccttccttccttccttccttccttcctccctccctccctcccttcttcctccctccctccctttctttctttctttctttctttctttctttctttctttctttctttctttctttcactgaacctacagctcaccatttcagcctgaagatccaagtgtccccaccctcccagcactggagatacaggccagcactacatctggtctttcgacatgggtgttgggattcgaactcaggctctcctacttccacaacaagtacttcactcactaagccatctttccagatccctcatttccagcaatgctctatcagtctagggtctacttctgggtatatatgcctgtaggttccttttgccctctttgtacctctgcatcaggggatggttcaatccactcctggctgcccatcccaccacctaactgttcacttctgctctcagtctcattctctgacagaagctgtgctcacgaaaacacttctaatggggagggagcaggtcagctcggtactcaggcacagggctaacatgtccaggctgctgtgaattactgtaaatgtcgcaaccctcatttctttttgaggtgggtgttgtaagaagtatgtccatttgtgatggcagcctgcatctgaggtccccacagcattctttactatgtggagaatattgtctttgtgtccctaaaacaacaaaacttctcagcctgcagtcatgccatggggaggagacttgggaaggggatgtgaggggcacagagcaaaaatgagagagagagagagagagagagagagagagagagagagagagcccacactaaaatgattcaaacttggattagcttaatttcggtcaaacatagaaataaggatttaatgttttcccttgttggggtccagcttcataattagctttttttttttttttgcaaatagcagccactaatatctaggctatttctccctttgtaataacaacacacacacacacacacacacacacacacacacacccttgaagtggaagctgacaactgccttgagcatcctgattggcaggaacagtaaagggaagcttgcagtggcctctctcaaggcagctttcctgccctctgctgggctaagccatcagcactctactcagaagctgaatccttgggttagaccctcagaggatcaccatcctggagtccttgggttagaccctcagaggatcaccatcctggagtccttgggttagaccctcagaggatcaccatcctggagtccttgggttagaccctcagaggatcaccatcctggagtccttgggttagaccctcagaggatcaccatcctggagtccttgggttagaccctcagaggatcaccatcctggagtccttgggttagaccctcagaggatcaccatcctggagctcttgtccagttcagactttgagtggttcatctctcaggaagccagagcactaaaggtggagaaattcaataaccttcatatttcttaaggtagagttctcagacttggactaagtactctgtgtgtgtgtgtgtgtgtgtgtgtgtgtgtgtgtgtgtgtgcgcgcgcgcgctgggaaaccaagcttattcattgaagagtatgtggtggttagttttaataataacttaaccacagcttaaaatcacttaagaagagagcctccattgaggaattgcctagattaaattggcctgtgggcgtgtttacggggattgtcttgattcttaattgttgtaggaaaacccagcccattatgggtggcactattccctaggctatgtcctgaattgtgtaagaagagagaaagctatctgagcaaaagcaacaagcaggcagcataggtgtttgttcttctctgctattgactgtggatgttatgtggctagctgctttagtttctgccttaccttgcccttagtgatgggactgtaacctgggagtataagcctaataagccttttccttttctaagatgctttcggtcagggtgttttatcacagcaacaggaataaaactagatccaagtgaatatggcggactttccaacaagaaaacatgtagctctcctttctttcttcattattccccctgtttaaaaactattttgcacattatcgatagtggtaaggatattttccctagccgtttaacgccgggactgagttgatacattttcagacgttatatccttttccaagtcccactgtatccatcacattgataccagcatgcacacacggtcctctgagcagcccctcaacactgtgggatagagctaggagtccatttaatgatgttgtacatgacgagttgtttgttttcggaaaagcctgtaccatgtgaggcgaatggtttgatttaagtgtgagatgtgactgcgattgcaaactgaacacacagcagcaatactgcagccgtcaccatggcaaccagtggaaataatggcccccttcgggaataaaatagatctcagatcccttcccaatcagcagcgttggtggtttgcagtcgaggtggtttgcagtgattgcttcagactttttttatggacagaaaacgaatgggcaagaaaattttgagaaaataaatggatttacagacaactcatgtgataatataagccatgaaggaaagcaagacagcagttttggcagctgagagcaagtgcccagggcattccatccacaggattgtcccctggctattagaaacctggtccctgatcttgccacatagaatgactctggacaacccctgttgtcctatgtggccaccagactctggacgttttcttattggaggcagaaatgctactgagccaacggaaagagaacacgcaaacatgtaatgtcacctcagcacatggaaaacactcaatgcacagtacttcagattctcggggtaaaattaaaatgagcgcctagattgcgcacaagaacagtaatagtttttcaaaatataaagcatagggtgcttcagcaagcagctctcctggaagaatgaagtgcagctgtgggggtaccccctgttcctcctgcaggacctgatgctttgttagaactctctatacacattggggtgcgcctgcactactgccctgagacgcagaagaacagtttctttataaagttgtgctcccagggatatgatgaattctcactttgctgtggaatctggagtaaannnnnnnnnnnnnnnnnnnnnnnnnnnnnnnnnnnnnnnnnnnnntgattttgatatgagaagttatctctccaaggtcatgtctgaaatagaagtcttttctaagctgaggggagtgggagccattagtcaatggatggagagtttcagttttggcaaggtgcctcaagcccacgatacttcactgccttctattatccactcaagcatctgttaaaagggtgatcttgatttaaatgtgtgtgttgcaataaaagggaatttctctggatcacattcaaggagaaacgctaacccatgcacctaggatactcccagcctcctggcttctttgcttcgtgttgcagttcagtgagattggctcagagagagtcctttgtaagtgaactgattttcattcaagagctgaactgaaaccccaagggagcccatgacagagacttctcattgtgccttctcagtccctgtgggctgtgaattcaccttgacctgggcatggggccctcttgaggtccatgtctctctatgtttggtgagcagaaggcttctaaccaaggatactgctcactaggatggccttgtattttatcttatgccatcttttattaatttttttaaaaatcagtgtgatgctgtaatggttattcctggttgtcaatttaactacgtctggaataaactataatacagaaattgagggcacacctgtgatccagaccttgaggctggaagacgcaggtttctgacctgtatcttgacatgaggtgacacatacttttgatccatatctcgaggtatggtggccatgaaaagttagacccaggcaaggtactacatacctttaaacccaacagactgaggcaagcagatctctgagttcaaagtcagcctgggacagagcaagttccaaatcctagtgtggtggtccatacctttaatctgagccatacctgctgctggaggcttacataaggacaatcgaagaaggaaggctctctctctcttcttcacctgcttgtgcttacttgccagcatatctgttagaacctagtttttcaggattccagcttatacagaagaccagctaaaacaaccaacctatggtagtaggtcggagcagctactcgattcttggagttcccatttacagctgcccattgttgggttagttaaactgcagactgtccatcattaccataatttcccttagtatgtagagatatttatagcctgcttggagaccctcatgttataggccagcagcctctggtgctagagacatgggtttgaaggaattgattacctgctgtaatgccatagacgtgcaatacagatgagaaaggggatttccaggatgccgcttccatcactgctttacactgtgagacatacgaagtttccaaccatctttaatttactatctaacgttggcactcagtaactcagaaacgtcacagcagttctgtctccagtgtgtgcaggagttcaagctatcgctgaaaagaaacgcagcatccatgaagccgtcaggttctcggcacagcgcagatgaaacaagcctatgggtgccttcttgttttcgtagactcctaacacataagcaatttctcttgagctcaaaatataggagccagatgtcagtcgggccgtggggtgggggggcatgctgttaatcccaacccttggagagcagaggcaggcggatctgtggtctacagagtgagttccaggacagccagagctacacagagaaacctggtctcaaacaaacaaaacaaaacaacccacatatccagtaagctacgaggagaggcttaacatttggacatatgtgtttggacaaagataaaaatgttgcaggttgtttagaaactatccaacaggaagtggactgagccatgatttgacgttcccacactgggaagggaagttttttgttgttgtttatttgggttttgttgtttttgttttgttttgttttgttgttttccggagctgaattgcttctttcctctcctttttttttttttttgttttgttttgttttgttttttgtgttttgctttttaagcatactgctaatggcttaagcctatgtccttttgactgttttgcatatgttcagactgtctttaaattgctaatgctgctgctgtgtggttaagcaacacagactctggcttacctgtgaagagcttctggtatttatgagatcagccttcccactgagaataaataccaggcttcaccgttatgaggtaattcctttaagtccgtttatctgtaagcctcagtctttttaccgtacatagacaagaaagcattacaacctgactctccacccaacccaacggcttagctgctcccaggtgcactctaagaattctgttagaatccatggaggtcattgtccagaaatacagagcagcagtattcagagacatccatagtcagtgtccatatgtgacagtgtccaggcataggaagctgctgttcatgatctacaacttccctgggagccgtggatgatgggagggtccctgcacacgtgagcctccacatagcacatctctagccagatctgtagttcactgtagtttgtgccttgctgtgttgtctgtttggaaaggctggggaggacaacaggacaaagacaggacttctgttaccttcctgtcagcttgggatctgtgataaccgctctgcattaaagagaagcctccgggtgggtcctcatgtgtgtgagtgtagggctaggtgtgtgggtatgtgtgcatgcgcactctgtaggcagaacggacacaagaaaaggtgagagggtgttatgtggcgcttgaaaaggcttaagaaatgttggctttaagagcctgcttccaaacactggctcggtcactcagtgtgctaaagaaaagctcacagaaagagagactggagcactgctagactgccaggaatctctttgcgagatagtctagtgtgggggtggatctgggaggtttctccatttttttttttttttgatagccactcaaatctgtccactcccgaatctcttctctagaggctttccaacattgctgcatgaccctgggctgcatcccacccctgcactccaggcaggcttctcagactgggggctgctccacctgctctgtcaggcctggccctggaggaaatgccctcactatagaccatgcactctccatcctgatgctctgaacctcctgggggtgctgaggtgttccgggcagccataaccacaggggagttctcagattaggggaagcacgttaatggtcactcatgaagacgctccacgattgtctgtagtgagcttttgtaaacattgccagggctctgaaggtcctggctcctcttttctgtcctccataaaaaggctcatgctgtgctttatgtagaaggggcagtggcagtgttttctctgcaggctggagggcagccctgccccagcccctgtacccagcagggcctggcagtgctgaaggaggaactccagctcttagcagccaaatcctcaacagaatgcctctaaatccacagtggatgcaccctgggttggaagggccaagccatgactgtgtaatttgtagctaagcctggactgttcccaagtgctcagtttatcaacctcagggccatgggagatctaagaacagcaatcccatttgggggttgaagggtgagggtgggggtgggggaaggaaacttccagcgagtttgggctataaaggtggacactcaagtcttccttaagtaaggctgtgttctgcagggggaaagttggtagtgagcattacgttctagtcccaggagcctttgtgagtaggaacaggtgggatcacggcacatgcagggagagcaggcacccacacctgctcaccacctgccccactttgggcactcttttagttagggtcttactgctgtgaacagacaccatgaccaaggcaactctttttttttcccattttttattaggtatttagctcatttacatttccaatgctataccaaaagtcccccatacccacccacccccactcccctacccacccactccccctttttggccctggcgttcccctgtactggggcatataaagtttgcgtgtccaatgggcctctctttccagtgatggccgattaggccatcttttgatacatatgcagctagagtcaagagctccggggtactggttagttcataatgttgttccacctatagggttgcagatccctttagctccttgggtactttctctagctcctccattgggagccctgtgatccatccattagctgactgtgaacatccacttctgtgtttgctaggccccggcatagtctcacaagagagctatatctgggtcctttcagcgaaatcttgctagtgtatgcaatggtgtcagcatttggatgctgattatggggtggatccctggatatggcagtctctacatggtccatcctttcatctcagctccaaactttgtctctgtaactccttccatgggtgttttgttctcacttctaaggaggggcatagtgtccacacttcagtcttcattcttcttgagtttcatgtgtttagcaaattgtatcttatatcttgagtatcctaggttttgggctaatatccacttatcagtgagtacatattgtgtgagttcctttgtgaatgtgttacctcactcaggatgatgccctccaggtccatccatttggctaggaatttcataaattcattctttttaatatctgagtccaaggcaactcttataaggataacatttaattggggctgacttacaggttcagagattcagtccattatcatcaaggcgggaacatggcagcatccaggcagacgtgttgcaggaggggctgagagttctacatcttcatctgaaggctgctagcagaagactcacttccaggtagctaggataagggtcttaaagcacacagtgacacacctattgcaacaaagccacacctcctaatagtgccactccctgggccaagcttatgcaaaccatcactggtactttgtgcagcacagagttagacatgctcaagcagctgagtcagtggatgaaaatgggtggatgagtggcacttctgtggcagcctgggtctcacagagcatggttcatctcttagcacgcatttgtgcatgctatcctccacactcatgtatggagaagaacagtggccttctgtttgggtgcctggttcctgtcccagcttgtcactttcttgctgagaggtagaggtaactttagctctgtaaggtaccctgtacctccccgatgccccttacatggcactcagcagggcactgcctgtgagcaagctggcggcacacagctgagagcagtgtgggggggaggggggtacctgtcggtagtctctggctgataccagatgtaatcgcttcttatttaaggatcgtaatttcaagaacttttttctaacgcaccgcaaacatgagcacgggggatggggagatgaatcgtgggtgaaatgctagctctggaggctcaaggagctgagttccaatcccctgagcctatatcaaggtagagtgcagatgtagctggagtcagaagaaggaggcaggtaggtctcgagaactcagcggacagacagtgtagtcaaatcaatcagctccatattctgtaagatggcctgtgtcaaaaaataagacgtgaaaccattgaggaagacatctgatgatctctggcctccacatacatgtgcacacaaatgcacatgcccatgcacccgaatatacacacacttacacagacacatatgtataccatcacacgcatgcacacacacacacacacacacacacacacacacacacacacaaaatataagcacatacgagcactaagagttctgaaagtattctgagctcttttgtttgtgaaccatactatgctctatttatcctgagagtagtgtgagctaaacaaaaagaaaggaaatggccagaaacgtggcttacggcttataagcactgcctgctcttgcaaagaaccagggttccaatcctagcacccatatggtagctcatgaacacctgtaaatccagttccagggatctgatgccctctgctggcttctgcaggtattgcacacacaattaaaataatttttttaaaaaataggagaaagttgactcattatcatattagcaggcaggttatttttaatatatcattttaactatgtttatgtgtgtatatgtggcgggtgtatagacatggatgcagttgcctggggaggccagaaaaggctaattagctcccctggagctggggttacaggtggttctgaaccacacagcgtggatgctaggaactgaatttaggtcccctgcaagagcattatacgctctttaccactgatccactgttctggctctcttagcgagcagctctaaaggtaagatttgaagtgcttggaaatgcaaacctattgtcttccacccatttgtgtctgttcacaggcagacagagggctctggagtcctgccagcattttaaaattatagctaaagaaatgatccctacttaattagtatagatgttgctgggtaacttctaataatgactgcaatttgcaatacattctccccatgtaatttagcacaatggggccctcagaacgtaggactcatatttaatcaagactcaggattaatatagacaagaacaaagtttaggtccccagcctttgtaggggtgtaggggggctctgcgggtgctggaaggaagatcctgtaggtaccaccattctcaacagcccaatcatactccagagtgcatctctcatccctgaagaggaagcaatgtcaccactcagctcacaagggtctcagtgtttatgtgcctcaattttcctatctgaaaaatgaagacaatgtactagagatcataataatatatacttacataactatgtttctatagatatataatcataagtagtatatcaataagaaaagtaagttgtgagtagattggtggtgaaaggcacatagaaagtagcacgcagcacccaacagacctggctcattatcctaagtagcatcacctgggatatttttggatccttggctaaggagagcagccttcatgccagaacagagcatgtgtttgtaagaggcagcttttcgttgctgtgaggaaaaaccccaaggctgtataaagtaaagaggtttattttgtcttatggttctggaaataagatgtctgaacatcatggtatgagttggcaaagtcttttccaccctagaccccatattgtatcatatcatggcggggggtacctgaataccactctccgtgcgtgggctgtctctccctgtgctgcttttatccctgctgtgaccataggcaagggtttactctagatcctggtttgagggtacagtccaccatgggagggaggcgtgacagcatggggcctgctatgaactggtctccttagcaaccaactctttcttctatgagtcgctttggtcaaggtgttctatcacaccagcagaaggcaactgacagaatcccggaggtggtttgtctttcttgaggtaaacttggccatgctgaagtgtatacaccatttgcttgtaagtccaccccctgtgcccagttccaacatgtttgaatcagtccaaaaggaaattcccccatgaagcatccttccttccagtcctgggcaaccgccaatctgccatgtatacctatcaatttacacagtctggttattttatataaatgaaattatacaatatgtgaccttataagtctggtttctttccttttgcaatatattttttagttcatcttggtaacagggtgtatcataccattccgtcctgactggagactctaccaatgtctcctcctttttacccactaatcctcagctaggcgttcaactcttctctgtatcttaaaagatatggctaacaagtatttatgtacgctttttgtttgaacacctgttttcaattcgttgggggcacctacatacctcaggatgggctatatataactctgtatttaaaatttgccatctcttcagtccatgatgttcttgcaaaagcgctcagttcgatctcagcacccaccctgaatgactcaaaactgccacatctagaggctcacagccacctgtaactccaactccacggcagctaataacttcttttggcctccacagttacctgctctctcatgaacatgttcacatacagacacataatcaataataaaaataaatccctttttaaaaaaaaaaaaagaggagctctgcttcctgccgatgctaggctgaggactcccagctgtcttgggctttcctgggctgtgactgcattgctccatttgctgcctcaacctctatatgtgtctcctccccttcttcgaagacaagtcagtggacctgtcttgcccagctcatcgtgactttaactaactgctcacaactacagagtccctgtgtccaaacaagggcacagtgtgagtttccaggaagacatgaacttgggagactctacttagtagctcaccttttgcctgtcctcgtccttgaaggtcttaagcaaacccatcctggggaagggagggccttccaagaccagcttctgcctctgctctacagttatagccttaatccatgtctccagggcatttcacagacagaagaagggggagattttcagaggcaaggaaggctaaatctgagcactaagaattttatgcttaatcaacttctcgtccctcttaggtacttggctagcttagaaaatcactgcttaattgaagactattatttccttcagtctgatctaagcatgatccaggaggatggtggcatttaaagattcttggattgattgctatgatttccaatggaaagagagaataaacaatatttgggccatgtgaatgcaaggctacattttaaatgttattgctatcagtgtttgtgtgtgaatgcacagacgcagtcatgccacaacatacatatgaaggacagaggacaactttcaggagtccgttttctcctctcacccatgcaggtcctgaggaacgaactcaattacaaactcaattacagcgctggctgggagaacctttacgaaatgaactatctcaacacctctgaggctctatttctgtggaaaccttgaggacacagagtcggataatgtcagagggtggggcttgtgtcctttctcttctatctcacttaggagggcctgggtttgggagagaagtttggggttggcatatcatcatggctgacagaatgaagacagcttatgcagggaccattgagggggtctctcccaagccttgagatcatgtccagtcccagggacgtctgattctcaccagaaaacagtattctgtcttgccctgtcacggtgtcttctctgctcctcccggcctctccacctgcaccgtgtgacacgggaagaatgccatgctcatagaggcttgagtcacagcccctgcccgccctcctgaccctcacaggtcccaccctggtttgacaattgctaagcaccatggcctaaactctaagacgactgaagcctggtcctgcttctcttatgactcttcttcctagtgggttgtgacatctccttccactaaggtctcttccccttttaacagagcaaggagatgtctcttaaaggacataatattcttgagtctctgttgataaatatttgaggcgatggggctctgtgtttatagaaacattggttacaggggaagaaaactcaagttggcccttggagtggggagtaaaagctgtttcattcacccactgggcaaatatttattaagtacctattttaaggatgaggaggccttttccaggtagaagaggataaacgaagctttacatgcggatgtttagagtcccagacccacaaaatgctaacactggcttctgccaaaagaagcaatggattttttttcttgaggattgggggagtcagtaaatatttttcagttaatttttttggaatttacaaaatgtgtatccgtttgtcctaaaatgaaatgtttgtcaggttagatgtgcccccacactcatcatgacgaaaccgtacaaagttccgaagcagaagcatgcccacaactaacgaacttcattggtggccatgtggggggtctgtgttctgggcacttggcaggttgcccaagtctaaactcaggctttgtcgttttactaattgagtgtcagtggactgcttgcctgaccgctctgatccatagtgccctgtgaaaccggcactgtggaagccttgtgttgttccagagagcgaacagaggccaaaaagaatcaactctagccttgtaggggtggaggctaggtgctctctgctggccttacaggagccttcttagactggatttgtttagtatggaaggctcagaggctcggctacagtgtagcacctgctggatcctgtctctctgctcagagggaagagccccttctggcatctaggaggctctatgtcctgcttgttctgggagtttttgtccttggaactacaagtgtagatcctcccccaaatgtaggtcctccctcagcaccagcagacacaaaaagaaacaaaagtaaaatggatgacacagccttcactttggtcacctttgaggtgaattcgtttcaaagtgtttgtttacattccagaaaggtccatcgtcaacagcagggagcagtgtctcagttcattccagagagttggtgagctagttcctgagtagtgactctgtccacgtgaccatcctagcaggaatcagggctgctgcaccaagggcttccctcacctctctaacttcctggagacataagagtttaggctccacttgctcgctttacttatccagagagagacaacgctggtccaaggccactcagcttagggatggcagctggtatcttaaatttttgagatccacgaatctccaatgagcagctgcagagacagcagccatggtaggaagttgctggtttaaacttaggaatcctcaattccttaatcttctaactattattattgaagtagtaaaggttatttacttggtgggaaattttccctataaagacaacagaatttccctcccacttctctgacagcacatagtcaaagggaccctgtgtttggctccccaaacccttggtgaaacagagaaggttgggccatactcagccatagccatgagccaacagtccaagcaaacagggaagaccaaagtgtggatatttcgttccttcttagaatagggaacaaaatacccatggaaggagtttcagagacaaagttcggagctgagacggaaggatgggccatccagagactgccccacccggggatccatgccataaacaaccaccaaacccagacactattgcatatgccagcaagatttgctgacaggaccctaataaagctgtctcttgtgaggctatgccagtgcctggcaaacacagaagtggatgctcatagtcatctattggatggaacacagagcccccaatggaggagctagagaaagtacccaaggagttgaaggggtctgcaacccttaaggggaacaacaatatgaactaaccagtaccccccagagcttgtgtctctagctgcatatgtagcagaggatggcctagtcggccatcattgggaagagaggaccttggtcctgcaaagatgatatgccccagtacaggaatgccagggccaggaagcaggagtgggtgggttggggagcagggcggggagagggtataggggacttttgaaatataaatgaagaaaatatctaatgaaaaaagagaaagaaatgatcactctgttgatagcgcacattacagtacaggggcagggggggcattcattatttcattcattcattcacccattctgtaagtcctctggtcagtccccagatgtgaagtcccctgcaggctgacaatgtggcatgacgtccccagcccctttagcccctggcatttgctcagtacaactggcctcactcattcatgtcatcagtgttcccctagaccgagctccccaattcacagcatttgcccaagctgctcttgcagttgggaaatggaaaagccaagggacttggaatccaggttctcgccacgtgcctggctctgcagagaaggcttggctgggaactagccctttcccttggctgagaaataacaaggctgcccactcagtgaagaataggcaccatctccacatctgggaagaggctaggttgccaacagtttttctccccgtggctgtcggcgtgttaaatagccaatagcagattcattaagcagccggcaggtgaacgcaggtttccccagagccactgccacctcacctttagtgcttcccggatacatatgtgtgtgtgtgtgtgtgtgtgtgtgtgtgtgtgtgtgtgtgtgtatatgtatatgtatatgtatatgtatatgtatatgtatatgtatgcactgcgagttacagtctccaggataattgatttcaatatgtatggaagaatcgatgctgtgggaagagagccagtgtcctgaatgggccatgccgtttgatgggtaatttcctcccagctctttcagccaagggactttcactggactgttaaatttcttgactgagggagaaatgagggacccacggatcgtagaattgaattgaaagtgagaacatgaggggtgaggggcctgctagggggaattcagatgtgccttagaaggctaattcctaattaatcgcttcaccagtgtgtgaatggaggatttgagaagtttgtcacagcattgctgtggtcgttattcaggaagtgatgggccagaaaacacatttataaagtgaatctgctgaaatgctggtcagagggtgacctctggggacacactgagttaggaaggctgagctctgatctggcagcagcaggttgatgtgggtcaatatttctgtcactttccagtggcgccatctgctggtcatcttcagcatttgccctctagcttcaagtgttgagagtgcataaagagctcctgaatcccgaatctagaaggctttcaagttcaggtactaagctgagcagagaccataaaatgttaaccaataatgccttaatcacgtaaaatcaccttctcggacacccatcagtttcctctccaacagccagcactttcctatcatgtgtctggcccactgggcagtgagctttccgagtcccctctcccactcatgtgtcttcatgctggaacccagtttcaggaggttctcagctgtgggtgcccccagaagaactgggacagagatgtgccatgaccatgtgtgtaatatgcagggggactgtcctgttgctggctcagagcggatcatgaacagggctcacctgggttctcccatgcatcctaaggttggcacggggtctcagaccacagagcctcagattatggaaggtagtgtgtctgagagacaggcaacttacagagtgacaggtactgagcccaggtgtctgcctcacccatctgtctccctgtcctcggtgtactggcaggctgacttaagacactaagatgctcaaggctgcttgtacatcaaacctctctggagttcaacacctgcctcacaaggcaataacataacttctgcctgcccttggcttgcgagatccagaacagtatcaccctgtgatgaatagtaatagcattccatattgctgttcatcctggctcaacagcaaatagaacatcaaggacatcgttctgtcccccaaggtaggactggtgagggcccctgaccttaggaaggctttctccaggcaagccatctgttgaccatctgactctcggctcagctcgggagccatgcgggcatgcctccgacatgacagacttggaagagcagtatttcatgcacccaggagtgccttgaagctgaggatgcaaacgtaatcaccatggcttctccagcacccagtctatttaggtggtgcaagggggtggggcaggaatacctcatactcactgaagtcatctatcagagagcgcccccacctgtcccagttagaatagaaacatttaaagtgagcatgtttgtctagccttgccaggtaaactagactccttccatggtatggaaaacacctgttgaaccaatgaataaacacatcctgggcaaataaagaacaatccctattaccatctcctggtcacactaaaatcagcatttctttaaaaatgcatgagctccgtgatgcttcccagtgtgaaagccagccattttatgaaattggtgtgcattttctactaaagagtagagtgtctacttattaatattcccaaggggtagcttttgggttctctgctgtgctgctgttataattttctataattatatggtgctgattgtagtttgccaacagaacgtcaataaaatgaaatgtaaccctggaactaacacactctctcaccaccccacccccaatctcattctcaagaattctttttctccgactatgcagccttacaatggcctggggcccagggaggcaagaggacgtcctccccgaaatcctaatcactatgaccatgagtgcagagctgtcctgcagaattcaatttgtacaaataatagggaggatatctggtagaggactcgtgatcatctagaaatggagggagaattctgtttgtatttctttggtcttgcttttttttatgatgatggagaataaacctgggatcttgcacatatttggcaaatggtctacaactgggtacacacacaatccatggattctctgttagagcagcattatgagccagatccagaaaggagtttgacagaattcaaaattaggaggcagagccatctaagagccaggaaatagattctctctagacactgaacctgctgacagatttagggtttggaaatcctaaaactctaaggagtttctattgtttatctaccatgtgatctgatgtgccttgctcagtaacctgaattgtaaagggggtggagcaaccacactcggtgccattaaatagttgagtgacctcatatgaatgagtgagtgaatttatgaatgcatgaatgaatgaatgaatgagtgaagctaccacaaactgacttggattggactagaatgtgcccctccctcttccattttctagatgtgtgtcttgggccaaataagttgtggtctctctgggttgtggtcacctcaggagtaagaaggctgtagggagcacatggtccctctgtgcactgtgcaccaggcaggaaggtggtgaattggtgggattttaatactagaaataagagtgccctggtctgggcgtgggggctttagaacgggcatgggttcctcgagaggccggcatgggctagataggagaatcgggaggaattttcacggttgaacatgtgcgagggagtgtcccaagcacagactcagggctgttgagaggcagagggcaggctgctcctgaagtcggagctgatgaagatgctggaaaggcaagtatggggaaccacccaaattagcctctcccagaatcctctctgagctcaacccccgagcatgaggaggtggctacgtttgttttcctttttgacgcaattgttagagtagatgtaacctcttccttcctgatacattactcaaatacattagttctcataatttttttgttttatctttttatgaacaaaaccacctgaaacacctgggtccccgctttctgtggatgagtgtatttctacatttggaggtagcatctatgtgtggagacactgtaagaggttcttgcttaggttttgaagattttacgttaatttggaggatttgaaagcatatccatgcacataaggcctagagccttctttgaggagctcaggtgtggccggaatcactgtgcaacacaaaatgatcgagcttcaccccatttcttggcatatcatccctctccccccatctgcctctttacttacagcctacagccgctgctccacaggtggacgtgcaggctgggcttagaatagctctctgatggcagaaggcacatggcactctctggcaccctcgctggaattcccacaggacattgggaaagagagttgaagaaagggaaagcctaatttttattgcctgattgcaagcaacatcctttcataacttcaagtgaggtgtctcattttcagcacctcgccatgccaagttgtgggagaattttaattcagtttggtcttccttaatttgccgagaatacacgcgttttaatcttcttttattaaaaataaatccagcctcctcacttgggtctcttgtgtaaatatctaattagggcagaagcgtggcctggtccaacgggggtgtgtcattgtccctcaagaaagaactgacttcaaagaactccccctgccacgtgagcaatgttaattgagccaaacaacgtgcatgaattatttataactgctcccctggttatttggtgacaaaatctgattccaagttgcagctagatacacaatgtccccgaattataactcagactttctctagcacacccagtcgtgtgagcattgaacatgcacagcttctgtgttacctgggatactatggaggctcaacctgcccaagcctggactaatctgggcaacctctttccaacccagcctgagtgctcctggggaagggtataggaaattgagagctgctatctcacctcccccatttcatgagaaagagaaaccaggctgaggtttctactgctgagatgaccacatactctgagtagcatatagttggtggtcagggaatctgcaggcgtgagtttaccttgcgtgtgcttggatgagcatcactcctttttactaagccctttcttaaaaaagaaggacaggaaacatgacaatctccactaaaggtttagtgcagcccaccagcagggcaagatagagtcacagtaatgaattcataccagtagcatttggatagcaccttttctgcctgtagccttgaccccttcaagacacacagagagctgtttccctacctggcatggagggtgtcagggtgctgatctatgactgagaatacaccatagtatagaagctacacattggaacctgctgcctagaagggagccaggcactggctttggtctctttgtttttgagctggagtttcttgtaactcggcctgccttgggaccctgaatgagctacatagccaaggatgaccttgagctgcagaccagcttgctgccacctccagagtgcgtgggttacaggtgtgcatgtggcctcactgatcttctatctcatgccgtagatggtacccaggatctcatggatgctaccagcattctgcccactgagctacatgccccgttttccactgtgttctgaaagcagccctcttctaaaggtagaattacataataagggcaaatatgcacagacctcaagcctaaggtttgatggatttttgacaaaagcatgtctcttttatcacccgaacacctatcatgagggcagactgtttccctgagaactttgataagctgctcaagtcactgtcacagaaaataatgctcatcccttcacctctagaatatgctttctagaactttctactcctagtggctatggagggaataagtcagtccattgagccctacatgagggcacaaggaaattccccagcctgtttcctcttggtctcaattgggtgggaatcaccaggctgcttcctggtggtgctgggttccttgtgtgtgatttcttcccacaaagctttgcagcaggcaggtagatcgatgatgtctgtgcagcagcctctagctgtaagtcacatccctgtcatctctgtcacttaaatctcctggcttgtggtccaattaaaacaggtttcattgacccaaccgggctccatagtctgtggctctgttcgtgcagatggttcttgctacttctggaagctaagcagagttggctggaacctctgctgatgacaaccattccctggggatagtgggtctgacagatgaactaggcaggaggtagaagtggtgagatttgtcgttatatatgtaattagaggctctcgctggcctttaggaagtccccgaatggagacaggagagggagaaaggaataaaggaaaggaaagaaaaggaaaaggagacagaaggggatgaagagatacccagtggttaagagatcttactcttgctccttcagaggatctgaatttggttcccagcactcctgttgggcagttcacagcctcttacaactccagctccaggggactcagataccttcttctggccttcacacacacatttagttactgggcactggtagagctgggtgccgaggtgatgggcatgtttgctgaggcaattattctgagatgacagaagccgatttcagcatagagaacattagtctgtcgaaatgctcgtgagtctcccttggaagcagtaatgcgagtgttggtttatttatggatcttgatcgaagggcgtcactagctgatttattgtccagataaagtcaaataaaagtcatgagggggaggaagtgatctttccctgactcttccattgaaagtgtctgtacctggagggctcccaaaacactgcccgcattgcacagctgtctcttgccagcaccccaggtgcagctggcatgccagttccctgaacggtgctttctgaacagaacacaggatgtgaccagaggggaaatggagcagggccagggctacttgcagactcgtgaaagtaggggaactgcctctcacgccttcttgtccccccaaagcagaaccccacagcttagcttgggggctgtattcttgggtctctcataatgcaggttcagagaaaaggttgtctgcagcatgaggaccagcggcccgaaggaacagcacatattcgtcttgcccctccaagcacactggctccccagctacagataacctgcttccccatcttctgacaattttactaagtcctgttgggacccggcctttctttctcctccagccacctgtgtagctaacacaagacaaccaggtggctctgactcacagaaccacacattcaaatgcaaaaaggagctgctgacagggagcccaaggagtgggagacagatggatagctgccatcaatgatcaagtcagggtgatctgcatagtgcagagggctgatatgaagaacggggcatccatggtatggtgaggggctcaggaggctggtgagatgccagtgcaggtgatagtgaggcagctgctcaggagagccaagtgagcaagggacttgggaaacaagtgtgttggagcaagagcaccttcaatgcaaagccacacctcgtgtgcaaagccacacctcgtgtgcaaagccacacctcttgttggcataagttcaaagaatgttcatatctggacattcttattaatatgaagatacactggcggtgagagccaaaaccgttatggcttaaacatgacacccccccccccaacactcatgaaggtctgggtccagccccatgggctacgcgtagagtcataagagctctcattggttgattaatcaatccaccgatgggttcaaaacctggtagggtgtttggggtgaagctctccctaggttgttttcctcgtgtgtcttgtcacagcctcggaaggctgactagcatggagaataatgagacttcctttcccagtgaacgaacatcaccatcgccgttcccttacataattggcagtcccttctatcagtgccgtgagatttttctgattgaaaaaggaacagagactgagagggtgctgagggcagggtcctattggttatctctcatttttaaatctgtggatattgaacttactatctacagggtttctttttttttcttaatcaccaatatccactcactagtaaaaaaaaattgagctaagtaagatcaaaagatgatcccacaaatggcttgcctctatgtgacttttgaggaatgaagagttgaccgtggccacatttgctggtcttatgcagcctccatcctttaactttatgtgactctcattcactggtcttatggacacacacacccccattcactgctctctgtgacccccacccatgagtctaatgcactcttcatacacttgccacttgtaggttttcagggtcttcctggcttctctggttggaaacttccaggtccctcccccaaacagggagagtaaagtttatccccaaaagtctggctacatgtacctcattggtccccactgagagaaacgctgctagcctcctgctccctaaaccactaagcagactggaccagacacttgctgcttgttgatgaagtgagtccaaggatgctgagtggaagcctatgattttcatgctctggtcttgtagcctggatgaaagtgaatgagttcctacagaagagcctcttcacttcttactcgtcttcaagagggctcggtgaataattggaattatgcaaattagcatgcagcacatagggaattgaaattgttccctagcaggcctgctgacaggctcagagactcacaggtccttcnnnnnnnnnnnnnnnnnnnnnnnnnnnnnnnnnnnnnnnnnnnnnnnnnnnnnnnnnnnnnnnnnnnnnnnnnnnnnnnnnnnnnnnnnnnnnnnnnnnnnnnnnnnnnnnnnnnnnnnnnnnnnnnnnnnnnnnnnnnnnnnnnnnnnnnnnnnnnnnnnnnnnnnnnnnnnnnnnnnnnnnnnnnnnnnnnnnnnnnnnnnnnnnnnnnnnnnnnnnnnnnnnnnnnnnnnnnnnnnnnnnnnnnnnnnnnnnnnnnnnnnnnnnnnnnnnnnnnnnnnnnnnnnnnnnnnnnnnnnnnnnnnnnnnnnnnnnnnnnnnnnnnnnnnnnnnnnnnnnnnnnnnnnnnnnnnnnnnnnnnnnnnnnnnnnnnnnnnnnnnnnnnnnnnnnnnnnnnnnnnnnnnnnnnnnnnnnnnnnnnnnnnnnnnnnnnnnnnnnnnnnnnnnnnnnnnnnnnnnnnnnnnnnnnnnnnnnnnnnnnnnnnnnnnnnnnnnnnnnnnnnnnnnnnnnnnnnnnnnnnnnnnnnnnnnnnnnnnnnnnnnnnnnnnnnnnnnnnnnnnnnnnnnnnnnnnnnnnnnnnnnnnnnnnnnnnnnnnnnnnnnnnnnnnnnnnnnnnnnnnnnnnnnnnnnnnnnnnnnnnnnnnnnnnnnnnnnnnnnnnnnnnnnnnnnnnnnnnnnnnnnnnnnnnnnnnnnnnnnnnnnnnnnnnnnnnnnnnnnnnnnnnnnnnnnnnnnnnnnnnnnnnnnnnnnnnnnnnnnnnnnnnnnnnnnnnnnnnnnnnnnnnnnnnnnnnnnnnnnnnnnnnnnnnnnnnnnnnnnnnnnnnnnnnnnnnnnnnnnnnnnnnnnnnnnnnnnnnnnnnnnnnnnnnnnnnnnnnnnnnnnnnnnnnnnnnnnnnnnnnnnnnnnnnnnnnnnnnnnnnnnnnnnnnnnnnnnnnnnnnnnnnnnnnnnnnnnnnnnnnnnnnnnnnnnnnnnnnnnnnnnnnnnnnnnnnnnnnnnnnnnnnnnnnnnnnnnnnnnnnnnnnnnnnnnnnnnnnnnnnnnnnnnnnnnnnnnnnnnnnnnnnnnnnnnnnnnnnnnnnnnnnnnnnnnnnnnnnnnnnnnnnnnnnnnngggttgagggaaaggagtcacaatggtttgtaactctggttctgagggatctgacaccctctatggctccccaggtcactgcactcatatatatcacacacagacaaccaagccctcagagcttcagtttggatcctataaggtatagtaaagtcaggaagggccaagtctggggactctgctgtgctccacagggagtggctgatgttgctagccattatgccatagtgctgttgccttccttcccacatccggatgtcctacattgaactgcagcctatgggtgcagggtgaccagccttagctgcctagcacgcatgggtgtatgacatctgtgctgcaggtgagagggaaatacctgccagttgtcactcgggtgtctttagtcctcctaagttcacttctgctgtggggatttgtcacagatcaagttcagcctccccccagaacctttgctgtcccgcctcactaagacccatggataacgtgtgtgccaaagtgaagcaccctgagaatcggatagtggccctgggaaagatatcctggaaccttccatgtctatgtttgtgtttccctggtgtggagatggtcagcccaggaagctgaaagggaaactgtggccctcacacattggcatatataacctatcactctgcacaaaaggaggtttctgacatctgatattgagcccctatgtgatttcagtaatctgagttgttagaagaaagtgaacctgaacaaacaagtctcaggctaaggcatcattgcatggccttctccattcagccccaggcttcccaccctcactcttcaggtctccctaggaagcagagctcctgtgggctaaaacaaagattgccctgaccgtcggccacgcacagcttccttcaggctgcagtgtcatcccgcctgctgaaggttctggttgtgtgtttcctttctggggaacggtgaccgacaacctggtcactgcctttattccttggcaacatcacctccacagcttctcatggggccgctaggtctctacccttgaactgcccttccagctccgggggtggtgtggtgtgggggtgtggtgggggtggggggttcctgctcatggatggaacttgacgcatctttgcatgtccagatcctagcaggcttgttgatccttgtcatgggaagtactggagtagtattcagtggaataagaatgatagttttatagtcctattgagagatgggtggattttgagtagagtaaaaataaagtgtgcttttctgggaagagaaggctttgttcatcccagctctgcagactgcacaggctccccgggccgcctgtgcttagcacttggcaggcgcacagccaatactactcagctacaatccttggagctcggcgtagatttaattcctctttcacacattatttctgtgcagattccgtgcctgtgcttactaagtagcctgcgcaagtttttgagaggggatggccagggagcctccgacaggttgttactagccttagaattcaagtggaataataaagagacaccagatggctgggcaggtttgatgtctgcacactgtatctccctctactggtcccatcaggaagttcggctctaagaacttgcagacagacagccacacttaatgaggggaagcagttgagcttcgtcctccccaagggtgctggcctagcctcctcctagatcattgaatgcttggtggggaaggctattaatgcttgggatgaaacaatgtttcacccaggaattccgcatctctggagttggattaagccaattaataactcccaatcaattaccctgcagtttcctctagtgtatgtaaagtaccatggcagtgctcagtaacagattggagagggaaaaggcagtgtgtggcattgtgtgtgaagctgcctgtcaaatgagagcctgggcagcacggatcctgctgagggtgtgcgtcgccagcagccctgacctccaacatgggctttctaatcctgcagtctgacttaatctggtctctcatgctccaagaaccagtggtgtcatgccttgaggggttcctatgtacacaacacccatgcgagtggcaggctagagcagatgcacactcaaccacggagctattcgtgtctggtccactttataaatctacaacatgaatttgggaactaggaagaggagaggtcacacataccatgccagtggccgctgactaatttctgtgaggtcatttttataatgtgctttgggtcccattcgtcttggcagttctacctactgagaaacactgggattgcctggctccttccacgtcttcagtaattacaaacattagtgctccctgttggaacagcttgagtgctgagcatctatctactggcctcagttctgaggtctgggtccatttgcatccttcttggaggctttgggtagcaaaacttttctcagtagagatgggacagagcccctgggctggctgtggatgaggtttccttgacagggaccccatatctgcatgggcaggtgccattgcttgcctccattggttaggagtccttaagcaaggttttctacaccacagggtagtcaccatcactgtcatctctaaggatgattgaaggtgactgggcaaaatggggagccaagatctgaggacagattgattacctgtgggtggggtcttaatataaaagaactttctctgtgctgaaccccttgtcaatctgtctgtcccctgcatccattcaactcggtaaacacttagctctctcctgaggctgtagatgactctgtagagtagaaagttggtacagtcagaggcaaggccaggagagggctactgaggtggtctgggagagtgtattgccacagaatggaagagggtagagaaggacactgatgctggcctcaaggctgcttggtcagaagctcctgagccaggtatggagggcatggatttggctggcctagtgagaggggcccaaaaagcacacaggaaggcatgggcatctcaagacaccacagccaacatagattcaatttgtccagataatggctgtgtaagggaggcagaggaacagttggtattgggggatgtggtatctggggtgccaggtgactcatgcagatgcctcttggctggcaatatggataaagctggggtctgatcccactccatgctggctcaccctcagcaatgtaggagctgtgagccttgggtcatcagtctggacctgcagatgacagggactgcactactgtagtatggagacaccaaaagagacaatgaagtcagcaggcaaagttcttggtttcctgaaaaattacaatgaactactctcctatttcttcgtcctccctactgagtgacagccacgtccagagacttctattcggaaagattctgagcaggtccttttctcttcgtaggtgcaccatggagcccttctgtccactcctgctggcaagttttagcttgtcgctcgccagagctggccagggcaacgacaccaccccaacagagagcaactggaccagcacaactgcaggtaaggacccctaacctgtacccaactggccctgctgcctcacaaactgccatctcccaagcacctagcaccgctgggaaagatctccagtggttcttcctgtatgccaaccaggatactgtgtatgtacctagaaccagagccatctaagtgtgttcaagaaggatgttccacctgctggggtcagggtagggatcaatcttggaaatagggagtgagaaagtctgtagagggccatccaaatgtctaagtgagacaaagtgctggctgtcaggcctaataccctgagttcgattcctgggacccacacagtggaaagggagagaactgattcctgcaattgttctctgacttctacaagtacactgtggcatatgtggtcacacacacacacacacacacacacacacacacacacacacacactcacacacacatacactcacacacacacgcactcacacacactcacacactctctctctctctcacacacacacacacacacacacacacacacacacacaattggttaattcaacaatacattctgaaaagtttgtgtagagccctactaggagcagctatgaccaaacactgaccaagaggttgagcaaatgtgaatattggcttgaaggtttgttgtgtaacttttcctgaggagagatgagcaaacatctaattactcaacggaggacacccaccatagacccaagaaatgactgtgtccatgcctagcttggtgaaccagtaagttttgggagattacttagagaagcatgagtgactcagaggcagctgtttcactggaaaagcccactgcagcctgggtgacaactcacaaaagctatatcatcacagtctcctgcacagtttgtaggcagctccacttaagagtccctccaccccaaccacaccccaggcaatttgcctctggattgtaaaacttcagggccttatgagtcttgtagctttatgttttgcgagctccctgccttcctttcatgagaatatgtttgaatatggagcaaaaaaagccgtgtaacagggctaataatgttattacttgtcatttgttaatagtctgtaatattggtatgtggtaagttttcctcttttaaaagaacagctgttacttttctaggtaaatgtggagcattcttgggtgtgtcatggcttcaaggagatagagctgaaatggactgccatcgtcctagcctcactagaatgttaggacagatacaccccagggcaggcatagggattattcttagtctgttccctcaccttgtagtttaaatattaaagacaaaaaaaaaaaaaaggcatacagatgcccatgtgacatcaaggaggaacctcagagacatttccaccgatagaaggtagacgtagaaaccccatgatacagactaaggtaggattgcattgctgggaaatatccagcacctgaaaagcatggacaggaagagtagtgagcagttgctgggatgaggagggagacaggaggggtcttactggagacaaagaaatactctaaaggtgcgaccatagccagagctgcctaagcttggcaaggtactcaccatacattaaaaacaagttaattttgcatgtaaatttcatctcaattaaatgaataaatattatgcaaagccaatgtgaggaagaggaggtagaaaagaaaaaaaaaaaaaccaaccaaacaagagtaggtctttttggctcttactccctgggttcaaatcttgtctcagccacttgttagttgggtaacctgaaatcactcactctatgcctcttctatgcccctctttgcatcccttccccgactcatgaggtacagaggcagtgagcattacgaagataagcaggctggacagtcttcagagcatagccgaatttctcaacatctgacttttgctgtggtcaacagggagcaagctccagtcagctatccagtctctgatagccaggagctctgatgcttcagtccctcaacttctccattgtaaagtttgtgggttgtgttgtatacagaaagagccaggttcagggcagatgggtgaggtcaggagcccttcctaaggagttggcagggattccctgaagcgtgtctagtggcaaagtcagaaagaacccgcaatggcaaaggctggcccctatcttttcacatgccacatgcccatccatctcttcctacacacttgctccattccttatagggcaaggcctacccacaccggggcagaccatctgctttattcaacatatagattctagtgttagcctcatccaaaaattcccttagatggtagtctcgaaattattttgcagccatgaccccatcaagtttacacatggaactgagcaacatgtttggtactggcccttgcaaggcttaaggaggactcaaattatcaatatccttaccgaaaagcttcttagaaaaagtcagtggtagttggtgccttcccagtgggtcagaagttcaactttcacccctctcaagggcttcacaaggttttcagaccatagactaatttcctacaggcatggtggtgtccctaaggggagggaagaagaagcactattctgccacgaaatcaaacacctgagagaacactcttgctgtattgtccttcctccctgccctgacatccacatccacagccacaacaaacaaacaaacaaacaaacaaacaaacaaacaaacaaaccaaccaaccagacacttcgtgcaggcctctctgcacatggctttccacatgcaaataagctatcatgtcctgcggcaccgaacattgtacttagacttgccccaaggacagtgaccttcaagaacattcactaaagtttctcaacccacatccctgacttccctcaccaaatactaatcagctggccacttagggataccgcgaaagctgtctgcacatgctagtaaacaccttgaagccaccgggaacggagcatccatctccccacaggagaggtttgatctgtcagagtcctgtgacagccccacaggtggtccctcagggtggcatcgccatccaagttaggactttccaggttcatttgagagcaaaatgtatcggttcatcacatagccgtgggcaggaagtgttgctttcaagaagagaagactatcacatgacttcagcccccagaacagaaacttgctctggataggtctcctctggggctcagcccactagcaactgctctggtcccgctatcaggagctacggaggcctccagttacacggctgctcctttgtcctgcaacttggaagggggtcccaagtgctcttgaaaagatctggcccctgaaaaatcatgaagtatctcctgaggggttagcacattgccagaatgtgacagaacaacaggaaatggtttcctttcatctctggccaaaatgaattcaatattcatcgtgacacattttttaagacaaagaattcattaaaaatatgtaaaaaaaaaagatgtgaggaagtgttattatccataatacatacaggaagaatccttaattttaacgtgtgaaagagcacattagagaaatggaaatgttctggtttgctttgctactgcggtgacaaacactacaacccaagcaccagcgaggcaagggttaattaacttggcttacatatttcatcatggtccaccatgagggaacgtcaaggcaagagctcaaagaggaactgaagcagaaatcatggaggaataccgcttagtggctcactcactgcctcgtgctcaactagctttcttagacagcccaagaccacctacttagagatggcgccacctccagtggtgtggggcctcctacagcatccaataataaaatgccccgccgacatgagcgtaggtccatctgagcaaggcaaccctcagataattccggggtgtgtcgagttggcagctgaagctattaggtgatgtcaaacacaaccaggcaaaatcaaagcatctaattaattccattttactcatcaggcagaggttctgaactctctagatattagagaaaatcaagttaaaatgttattgtgcttttgcctgactaaaagtggaaggatcattagcacacagggagacagtgtctcccttgtaaaccccaggcgagcctagaagttggatgttttgggaggccatctagctatttctactcttgtttgatgatgactgtaggcgacacaaaggtccacttttaggagccaccttacagaaaccctggtgagacaaagtgcgagttaggggctggagagaggctcagtggttaagagcacttgttgctcttccagaggacccaagttcggttcccagcacccacatggcccttcacaactgactgaaacttcagctctgggagatcagacaccctcttctggccaacatgagcaactgcacacacgtggtacaaatactcgaagacatatgaccacctacagacacataaataggaatatcactttttttttaatgtagaagtactgggaacagcaaagtgggaaatagcctcatatacccatacaatctgggccagtccaaagtgtaggacggcaagcagccaggacacaggatgaagaggcttacctagtgtggcagctctccaggagcaatgagagaggtgtgtgttccacccagtcgcttcatacatagcatttgtgttgggatatatcgtcaagcagattattctttataatcagttcatctgttttccttccctaataatttgtaaaataacagtacttccttcagtcatgcaatcttggatcccaggagagattagtgagtctaatttatttaccaaacctatgtgtgcatgagttttgcgtcacagaagaaaaggcagggaaaattacactcacaacttcatgctagggaagcaaaacagcccacctatgtgtgttcgctctgactgggctacttggaatgtttatcgtacgcctcgggcccaagaagctttatggaccagatcccagaaagtcctccagagcagtcctccagggactgtcgtctcttcccagagcacaattgctcactgtgcttcctgccttttctcttcctcttcctcttcctcctttactcctccgcctccttgctagggaccctctagacatgtagagtgtccctcgttggaggggcactgtctgttgcagattggtgcagagttccatggggtctggaaagaacttaaccaggctggcccatgctcttctgcctgggtccttctgacacagcagatgagtcactggggacatctgtgttcagagtaaaagtgtcaggtcccactgcacacacaaactattgcctttttagtgtcaagaccaggttctgtgtaagcaactgtgtgtgtgcacacacgcaggtatgcctatgcctaaagtctatgtgaacacacatgtactcccttatcacagacagttgggaaacccagcaacactttaggaaaagggctgaatcatctagagagacccatctgcacctccccactctggcccttcccccccacacacacctccaagtcagtgtgaactggaaacagaatgtgaccataggatatcctctaggaaacctcatgcctccctgggtggaacaccactgggaccaaggggacattacctagtatgcaccaggatttatttcctggcccacattgtttatcaaaatttgtgttaaacctaattattgaccagcatccacaatttcaaagacatttcataaggtatgggcttcttcttttgcagtatttgaggcaagaagtagtacggacccatccttccataggctctgacactgtagccagagcatgcccacggttccctatgtcccgtcccacccagctggctctgggtgttctgctacccttgggaagcctgcgaggttctggccctgacctctgccttcctagacaaagaacattagaagtaacagaaaccaaattgagggataatgagtccctctgaccatcctgcctgtgtgacaatccatgtaggccttgtgtcactcaactcatgccttgtggggtccccatttttctgtgactgcagcttgtactccgagaacctggacacagaggctggaccctcgagtactttgacagagcccaggggaggattcacggggtcgaagtccctctgtctatgatggagtggaccttgtagccaagccagtttagtagctgcttctgcagagcagaggctgggctctgggtaatgcagaagtgggtattgtcaccatggtgacacacccagaaaagacagtgagcatttcctgagaagaaggaggagactgcccacactttctagtggcctttgaccaaaaatggatggagttgaatcagggaaccctgagcagtggggctccctgagattggcttagcgctgcccttcaggcccaggcagctctcggcagtccaggttaaactttgatacaggtcctagtctagggtataccatttccctggagccacagccgtggaagtcgtggaccaggctgctcctaacgggccccagctgggcaatgggcaggtttggagtatccccctgagggagggacagatattcctagccattaagtctaatatatacctgaccttgacatgctgggaatcagcttctcttggccagggccacagatggcagactgtgggtcatagcctgtagattacatacatgcacaggactggggaaactatgacatttcaaactccttcctggagtgctgagtttctatggaccagggtggcacatgggaggaaggacatgaaccctggcacacacactcagcttggggacaatgtttggcacttctggaactcaagaggatggaaatcgagctactcacctccagggcctcccatgggagaccggctcactcctgatagcatgtgctcaccagctgcagatcatagctcctctggaccagttcacaggagccacactcattcactggagaagcaggcttttgatggggccttttggctgggagctttgtggtgataggagggcaccctaataggttgagagagaatgggtcaattgatgaccacaaggacaccaaaggcacggtgcaagggtagggatatgtgtctctctgaggaaggtggacctgggaggtgtgaagaatggatgcacaagttggttccaggaagccagcagtctctatgacaaagaattcaaggctctgaaaagccaggccattgtgtgcctgttcctcaataactgtatcaaacctcgggaccgggctgtttccttatacctggtgctcctgattcatctgggttgggacacaacaactgtaccctgaggggaagccaccttcctccacctcctcattgaagagagaggctgggccaaagatgcttagagaaatagctgggctgggcagtggtggcgcacacctttaatcccagcacttgggaggcagaggctggcgaatttctgagttcaaggctaccctggtttacagagtgagttccaggacagccagggctatacagagaagagaaaccctacctctgaaaaccaaagggaaaggaaaagagagagtgtgtgagagagagagcagggtacattggggtacgaggaggtcacccttcgtcagagtccttgaacaagtcccaccattgcactcctctgtcccctggaaagaactgaagggagataatttctaaactgtagcatgggggaagtccttacccctacccaaggtcctgatggggtctctgccctctaccaccccacccacccacaggccctccggaccctggtgcatcccagccgctgctcacctggctgctgctgcccctgctcctcctcctgttcctgcttgcagcctacttcttcaggtaggagtgtccccaggcgctgacgtgctctcaccagctcctatgaggaaatgagtgtgctggaggctgggggtgtgggcccaaacagctcagacagcggctggccaggcctgagctgccacacagctcagccatgagcagcagaaagaacttttcccggctcacctggtgggtatcaccacactcagggcttgggggttcccgcggtgctgagacctaacacatcttgtgtgtgcctttaaggttccggaagcagaggaaggccgtggtcagcagcaacgacaagaaaatgcctaacgggatcttagaagagcaaggtattgtacactgggcttggtacagcgggcaggcatggggctgtcactcaagcttgccactctctccagctcctcctgggctcacgctgtcacttgctagtaacccagaatctctgtttcggaacttagtgtgagaggtcgttttttccctgcaagagagcggatgtctgagacatttcagtttgtgaggttttttttttttttttttttttttttaaagagaccactcatatcctgtcggtttagcagggctttgccaagtcacatttctcactgaagcctttgaaatcaccccgtgatagggctctaactcatggtgaggagtgttcagatgtgacggtactacctcaggatcaagctggaaagggcactgctctgccagagctcatcgctcttgagaaggagtgccagtgaggggacatgcctaacttagattccagctgtgtcctaacttgtaaacgctgcttatgaaagcttgtttttctctcctctctgtgtggtttcaaaggtgcaggctctagctgagtcggggtggcatgggcttctaatctcagtattcgaaggcacttgttgaggcagaagcaacacaggttcaaggccagactgagcgacgtaacaagatccatcttcaaatggccaagggacctggggatacagctcagtggcgtagcacctgcccaatatatgccgagcccctggtttttagtgacgatttaaaacacaaaacgctggctcacagcagtggttccagctttctgttctaacttcctgcagagctttgcctgccttgaggtaacgtgcatgccgtcagaactcaagcgacactttagaactcccccaaggtagtaaaggaactaacacaaccccacagatgggaaggctatgggcaagagagggctcagctgagcggtagcattgcagggcttgggggacctgcacatccgcatagacaggtctggtgcatctgcagtctgcaacctgcccttctcgcctccccgcacatcccaaaagccagtgcagagggaagagtgtggctgggaggggcaagaaggcaaaggcttctaccagctcatctggctgcagccgaagggtgtctcagtgagctctgcaggtgggacagggccttttgcaaaggtgacagctgacttattctactgatcttatggaaccagctccctctctgtgaagagagaaatgccagtccccagcagccctttgtagtgtcctctcctcccgtgcttcagagatggtttgtttctctgcattgtaatgcatgtgatttaaggaagcgggtctatgcattgccaaaaaggggaggctgcaagacagagatcctggcagtccccccatctgctctgagtgtatacccagagccctgtgattactcttctctggatctagtatcatgaagctgccatgccgtgcgtggaaggaacataggctagagggaaggctgagtggtgggtgagcttgcaagcaaggtcaagaatacgatgtctatgatggacaggaatgctgccatcacttgctgaaaatagggtgtgttgggaaggagatgtttgattcagttgctcagagctgggttagccccagggtgagcgagcgatttgagaggactggtcccctcccattgtgcagatccatcaggaatgctgtccgaccatctaaggaatgagtcagccatgggcaatggaactaagtggcttctctgttgctcctggccctacagagcagcagagagtgatgctgctgagcagatctccatcaggccccaagaagttcttccccatccccgtggagcacctggaggaggagatccgggtgagatctgcggatgactgcaagcgattccgagaggagttcaatgtgagtgtcccaggtctcggccatcgcgaggaatagcgggacagtcccagccagtagttccagggactcgggactttatgtcacttgtggagctgctcagaagtggggtctggagagcccagtcactagtgcagtgctcttcactggtgctccttgttccttaggaagtgagatggttgagcctggcgctcctgggggttgctgccagctccatgattgggtgccatgatatgacagcagctgtgataaacgtgtaattctaccatgtggtgcgtggtgtaggtggcagttttatttatgctgaaggatacagggagcctcccacaaagcatcttgtcatggtccccaagaggtccagcttctaatcagaccagcactggtccctctgagcaaccatcacggcacaattcgttggttatgaagactgtctgtagaggacactagctctcgttcagtgtgtgtgagtctctgctgtatgggatgaatcactcccacaccctctgagcagcagtggctcactccatgctcggcccaccggcagtctccatagtcattctcagaactcttaactcaagacacagcacacattggtgacctaacccttagagtttttcatttccttttttatacttttaattttttatttcatatgtatgtgtgagtgtgctttgtatacgcatgtgcaccacatgtgtgcagtgccagaagaggccatcagaccccctagaactgcagttataggtggttgtaagccacaagtaggctctgagaattgagcccaagtcctctccaagaaaggaagagcttataatctctcagccatctttccagcccccaagttgttgattgcttaatgactgtcatatgggtaggcatgaagtgctattttgaacacagagccccgccgcactgctggtgttctgagggagtttgttcaagtcttcaccctgggtgcaggactgggagatgaatgttgggtcagagcaagagggggtgtccctggatggctgccttggcctggctctgtcataacagctattgtactccaggtcacttccaacaacagtgtctgggggtggaggctctacgacagtacagatgtgagcctctcagatgatgagctttttaaaaagtgccgtgtggttgtttgtagagaggggaccaaccacgcagagatgcctgcgagggcctgggaaggctgtggtgggctccaccacagtttacccacttgtcagacttacatcttcctctttagcttgcttccctttttactgctgccaaatgtgttttcctctttttccccccctctctctctaaattaggtcatactgaaagacagcaccaagcactgttgttttgcaaacttacaacttaacaccagaagtcaattctccatttttaaaatagctgttgctcacattgctggtaggagcttgtccctcctctgcatctcccacttccccttccagttctgctgtcatatgtagggtgccagggaccagactgtgaatggagggtcttggagtagggccaggagcaggatgaggcaggtgagggggacttggctcaggtgcagatgtcaagaggactggaaaagcacagcaggcaagaccctggtcccatagcttatctaaaatagcaaagcaaaagcaagccatggtgagggggacagattggtcactgtcaggagagaacaacggctgtgatctccctgctgcccggggctccactgtgggtgttgtcgagcagatatggagtctaccattattgaacagtttgatgtttttcaccattatgagttttaaacactaagttagctttttagaaaggatgaggctgctgatgagatggctcagccggtgaaggcactggccaccgagcctgaattctgaggtcaatccctgaaacccgcatcatggaagaacagagctgtttcttgaaaaccaccgcgttcatggcatagcatgtgtgtgtgtgtgtgtgtgtgtgtgtgtgtgtgtgtgtgcgcacaagagcaaacaaatgttatctaaaattttaagaagaaaacatatgatagaaaagatggaggagccccgtaaattttatactggaaacaaatgattccctctcgtgttcctcccaccctgcctctctgtggccctcagttgtgcagagtcctgctgcctgtagagatacagtgtaaggtaagagcacagacagcctggctcctctctccatggccacactcctacgacacccctctcctgtccaaaccagccaggccagttctcagagaagacatttaagtttcccacccctccctctctctggtctgacaccctctcctaacggtcatggaagggatctggataagtctcaacgtgcatttggacattcctatactgccaagtccagggttaggtggccatgaacttgaggataagaaggactttggcattcagatcatcgggagaatgggatgaatgttggaaccggtttgtctgtgtactatcctggcccggaagacttgagccagtcccttaacctctgcctcagtttcttcatctgtgaagtagggattttccctgccctgtggggctttgatagcacttaaaccaataagtaacaggtaacttacagataagatgttatctgctagctcctcctggaaaggtagatctctagcctgtttccaggtcctgacttcagtcccagaaaaggaggcctctggtaagcatcttccccagctctgacccagcaagctgtgtcaagcctccctatgataaatacaatagaaatccgtacagagggagttgtttgtttacaggagtccctgcaaaccagagccttcctctgtcctctgggtctatgaagcaaaccagacctcctagagcatacacaaagagtcactgctggcagatcatccccagacagtcttacttccctggggctaccaagcagctgagaaacctgaggttcttagtagcctgacagcaggaaaaaacgtgctggacccaatctgtgcagggaacttttcagcttgcttggttctgggattatgtacaggggcagagagaattctgcccacctccctttgtcctgtcctctaagagcctggggaggcagagtgaaccaccacatctctatggcccacatctcagagacacacagctgtggaagggtggccagagcctgattcttctttgtacttaggctccgctggccatcatgttgccgctaccttgccttcctttgtttaatccagtttgctgtttttaataagccttatttttagagcagttccaagcatgcagaacaattgcatgcatgctagagtgtccccatgcactccatctctcccacggagcatgtccctctgtcgtgggccctctgcaggggcgaggttcatgtattacagttatcattgctgttggcggtgttatcactgagcccctagaatctgctcattcttgagctttgccagatgcagggtttttaatgtgccaccgtgacattaccatgcctggattttgcattctgagttaaagctttctgagaaggtcctgggatgtcagcacaaattcagtgtccacttagggctgaggggtagcgccaagcctgcactggtggtgagtctgagctcaaggagcctgggtgttcatagctagggacaaggttgagaacttctcattggcattgccaggatgacctctgattggcccctccacactgacccaggcagagcctctgcctgtggctatgagatgtggtggacctagagtagaggagagagatgctctacagcgccttgatgtaagcccttgtgggaactgagttggccactgaagaagctcctgtcttctagagagaggccagtgcccttacataaaatgagaacaatctcggaacattatggatgtcatctgaggctgctctaaaagccagaccccaactcccagggccctaaagtgggacacagacagcaagaaggccctcatgtttccctgtgcttgagcaagggagtcctttcaggctatattactaaggtctatcttttcagtcaagtgatgatgatcacgtttttaacactgttcatttggtctggtcccatgtcatctcatcataggctagttgtaagggaagccatatattttccctgtgcttgacacagcacaaacacgtcttccttggcgcccagtggtactaggtccaaccagaggaaggcttaatgttgaagagcatgatttgaagttcaaggtgttctttaccctggctcatttgagcacaaagaggagagcccagaagcacgcaaacagcagacagctggagggaagcaagcatcagaggcaggtggcttctgtggtagaaggaagtagaaagccacgtgtctactttattcccagatgtgatgattctcagttttagcatcgtggcaaagtgaaacttccatttcacactgatactcctagtctggggccagcggtcattaacggggtacatcttaagctgcagagagtcccaaacacctaggggtcctcggggtctgggagaatcagtatttctcaggagcttctggtcctgacctaacccacagagaagctgagtcctgggtatggtgagagctgcatctgcagtcactctccaggatcctgcttctctcctgcagctcagttgagaggtctcagcactttcttctcgctagtctttgctcctctgtctcatgcatcagaactcctttgagatcagttcacctgtactcaaggagtctctgcctgggccaagacctgtgtggactggggcacgataggctatgttgtgagtgagctcctgacctcacaaagtttagaatctagacagaagaccctgaagaaagcccatctctgtggatcgttcactgtcttcccagtgtctagtgtgggacctgacgagagacgaggacaatggaaggatggtagtattaattcctgggcttgttagtggtgctgatgggaacctgggtttagattaattagtgttcaaccaactctctgtttctttccagtcattgccatctggacacatacaaggaacctttgaactagcaaataaagaagaaaacagagaaaaaaacagataccccaacattctgcccagtaagacttgttgttgttgttgttgtttgctgtctgtctttgcatgatctgtgacatgctggttacacttggcactgcttcacagctttgctatgtcacagattatgttgtgactgctcagtgcgtgtcccagggaatccagagccaccctgcctgagtgcccatttccctgcacagggtgtgggcatctttgctgctgctggccactctggttgctaagcaggtaggaagcaagctgggcaggaacacttcacagacttaggcacaagcaggcaaggcctctcctgccagcttcagtcctgagtaccagtctaggcctgtcggtggccttgagcagtagcttccttcatagtgagtgtttgattaagccaggagcaagtcctcagtaagatttatggtccataaccaaagaccaagatggtagaagggaaagcccacatgggcttggcacccttgaggggctaaacaaacccaattctaactttagcaggaaacattaaccatgagctggtgagtgtggttgccaaggaagtgtcagagttagggtgaaagatgctgtggtctgggcatcttgtgacctgctgttgctggctgagtctaggcctgaggtgtctgtctcaccgccagggcaaaccttgcatgttcccagccgacttttcaaaagctggcgcaggagggttgcgacaccctgcctagcccacagccctcccatcctcccaaccacagggtcacccttcaagcacacagaaaagcagcctcagacagctccactaagctcaggcttgaaccctgaacagaggcctcctactggtcccagagacctttgctcttaaggaatgcctggtggggtcaggaagcaggcctcagtcagcttcagtctatacatggagctgtgacctgcccattacatgatcctagatttctagtactttctggaagcagctcttccctgccattcatgtataattaattgacttttttgtaaaggccaccatgattctaggatccaactaaacctagagtaattaatgaatgagtttttgtttgtcagggccaagggaggaggaccaagctgtgagggtggtttgtcccaagtttcgactctggacacagtagctttactgctcagtgagttgtggagatccaaggaagctatttccatggctcaatagctcaaagagcaagaagatatctgggctcttcagagaaatttatgtcaactgataactgtgattctcaaagaaccatttgacttctaacttagtacttcaccttcctagatgacttaatttatgacttggtttggctctcatgtatttaggacctcttagggccaaagacattcagggcatcttgcctaactttctctctttattagtaaacctactatcccctaaagccaatacccaaagtcttaaccaagaatatttctgagccagaggtagcaattcatgcttgtaatcctagtagcctccaggctgaggcagatggctctccagatagaggccagcctggctacatggcaagcaagaccctgtgtcagaatgggggaggggaaatgacaggagtgagaatgggggatcaaagaaaggagaaaaagatagagacagagacagacagaaaaagagccagagagtcagagagtggagtgctagttcctggtgagagctccggaacagaactcatggttaacctcctgcaccaggcacagatagggtgctcagctcaccaaggaatcattctagcacaggctgggtgccttccaaaccttcctgctgtacatgagcctgggttggattacagaagaaaaccagcctgccttctccctatatgaaagtgtggcagcactccaaacagtcccgctcaatgcgcccccaccataagttcccttgcccctgccccagggtgaggcctcatccctccatacccaggagtaatgcctgacttggggtgtcgacagctctccaggactgtgggtacatggcatgtttcacaggggtaatgggctgtttgttgtttgtttgagtttcctacagtatggaaacagcacatacgtcaaggaccaatagtggcatccagttaaggagagacatgcctggctatgttggagctgttggtcctgctggggcaatacagtgggctgaatgtcatggaggcaggttaggatcagcaaagtgggatgggaggacccaatgcccacagttacaggtgcccctgcccttcctagttcaccccaagccagggcagacttgcaataggttcaaagatgtccctgggctaaagtgtaatgttggccttagcctgggattctcaaagacttggacactctgtatccaaaaggctgagggcttgcatgcctgtggggactctctgtggccaagcgttctgattgttctctgctgggaggatgccactgctagtaattttagaaagcagtgttctgacaacaaagtgtaacttttcagaatgtagacccaggaatctgttagaagatgtgaaggtccaaggccattttgccctgtgtttccataactgtcccctggtgtaagtcattctaaaatctcttcagccagcatgacatgtgctgtggcacagttgtttccatccttgagcccctgaatgggaatgtgttgatatgtgacagtggacttggggtttgtcatcctggccagcatgtgtgggctagtaagtgtccccagagatgtgccatcccctcccctgcccagagtcggacagatgcagctcagcaatgaaactcagggagtctgagataacacacggcactcagccaacaaccttctatgtaaaaagggccaaggcccaagctagcctggaactctcaatcctcctgcctcagcctcctcggtgctgggactacagaccttcccgcatcagccaccttttacacaatccgttggtgctgcagtggcagcttctgtggaacacaagcccgcagaggagcagggtcacaattacagtgcaggcctgactgcagctccctgatatgcagtacattacaacaccccatacccacaccacatattaccatcccacatacaccatgaactgtccactataacacatatcacaccacataccacatatacaccattgtaccatactccacacataataaaactnnnnnnnnnnnnnnnnnnnnnnnnnnnnnnnnnnnnnnnnnnnnnnnnnnnnnnnnnnnnnnnnnnnnnnnnnnnnnnnnnnnnnnnnnnnnnnnnnnnnnnnnnnnnnnnnnnnnnnnnnnnnnnnnnnnnnnnnnnnnnnnnnnnnnnnnnnnnnnnnnnnnnnnnnnnnnnnnnnnnnnnnnnnnnnnnnnnnnnnnnnnnnnnnnnnnnnnnnnnnnnnnnnnnnnnnnnnnnnnnnnnnnnnnnnnnnnnnnnnnnnnnnnnnnnnnnnnnnnnnnnnnnnnnnnnnnnnnnnnnnnnnnnnnnnnnnnnnnnnnnnnnnnnnnnnnnnnnnnnnnnnnnnnnacttacacacctcagtctatatatatgtgtgtgtgtgtgtgtgtgtgtgatatgtgttatagtggacagttcatggtgtatgtgggatggtaatatgtggtgtggggtgttgtgatatactgtgtatcaggaagctgtgtattatactatacaacacatccttaacacagatcgcatgtgtgaaacactaacacacagcaccacaaatatgcatatacagacacaaacacacacacacacacgtgtgtgtgacttccttccaactctgaaaaatgcccccagggagccagctagactcccatagtcaatggtctaacatgggcaaacccagctaccctccagccctggggcagatggtgaaggatgatagatattgagttcagagttccaaaccctttacccatatgtcctctggaagccggcatgaaaagacccagttctgtatcctgaagtctcttatgtgcacctgcagttgttagttttggacccactgtgagaacatgatcacttcacttgctgctgtctgtgtgatcactgggcctcctcttttcctcccctagctgaggcacaagtgaacaatgcaggggcaccccacgctgccctcaaggggagacctggttacatccttacagtaactgactcttaggtaaaagacaccctgggcttctgtagctcattgttctaacatcaaagggtttgtttgtttgttttcccctactttcccagatgatcattgcagagtgattttgagccaagtggatggaatcccctgctctgactacattaatgcttcctacatcgatgtaagttgactggtttcctttcccctggcttagcattcaggggctgagtctaaaccatgccgtttaggtgcccgccactctgatcctgagcacttgtggtcacactgagagcatgaggccattgtgccttcccagcttgcatctgcaccagaagtcacaaagataacaaatccatcgcagctaatgaccccagtggaggtgtttggtcttgatccttacagcgctgacaaattaaaccccaccgatgcatttgactaaaaataaaccacagtgggcctcggaatttagttatctttgagatatcatttaaagttttaaatgtattaaaatacaaagaaataaaggggtttgtacacatgagcccatttaaaaacatcgatcagcatgttgtctgctgtgtgtatgaaaacaaaaacacggtagtaaaggccgcaggaaaggaactctgttacctttgagattgctaggggggggtttgttgttgttgtttttgttttcgtgtcctttttctgttttctacactctctcgggtggatcattcctgctcttctataaacacagttgtcccctagtcaaggatagtcctggataattatgggtttgacttcacttttctagggctacaaagaaaagaacaaattcatagcagctcaaggtaagcgttcgattttgttcatgtctgcatggtatttttatcgtgatctgaatatctaatcgattttgttcatgtctgcatggtatttttatcgtgatttgaatatctaattgccaacaatacacagcttcccatgtgtgtgcaccactgtgtcgctgtgttagacactcgcactgtgtgcccctctggggtccacagcacgcacacacaaggggcctctgcttaccccgagactctcattcaatagagaactgacttctctcagtagcctgagctctgaaaggctcctgctttgggtggaggacagaatggaggggctgtgagataaaggtcctaaccaatgtggctcagctacaagatcctgtccttacccttccacccagtcccaacccttctagccggcccaaggctgtccttttgggaaggtggcgcaattccccagggaccagtgaagctgaagcacgactctccttcctgcttctcctaggccagatttcctagacgtagaaacacttgttacacatcggggaactcgccccctgtaaatgagagaaaagccggtcagacattggtggaaacatcactaaggcctgtatttctctcatcagcaccagcttgtcaaggatttctttgtctcccgtcctcttctcttcagccaagaagttttagccttaggatcgaaaaatagctgttataccccctaggcactgtgtcatatttagacaggaagtgaacagagggcaagggagattcttcgtcacgtgacttggagggagtcaagcatatggtggcctccagccactatgaatgcagaggagacattgctctcaaccatcttcctgtggtccccttttcttttgcccgtgaatcggcctagccgcccaaactctgcctggctgcgcagaaagcttccaggctgcagggcctgtcatgcgcctgaggaaggtgtgatccttccaaggctcaattcacggacaaagtttagacggctccttcatcctctgcacacaggccctaagcaggagacagtgaatgacttctggagaatggtctgggagcaaaggtcagccaccatcgtcatgttgacgaacctgaaggagaggaaggaggtaagctccctgcactgaccctgcagtctttccttctggcccccacactcaccagagaggcctgaccactccctctgactggacagttctcagctaacagtggggggcaaacagcactcaggccttccagaatcctatgctgagtttccacacctcactgtcctgctccaacattaaggaatcagaggtccccttctttgtctgaggatcatcatggccacccgtggctccaaccccactggagaggaacagactttagagtgacaggtaccagtgtgttctgtgtgggacaggtctggctggcctatcaggctgagcaggtctttcctagactagagagatggcctccagcaggaggctcgtggaagatgtgaatgagtggctgaatctgaagcatcagctggggttgagaggttcactggcctggtctcctaacaaggcagactctggtagcatctgcagagcctgagtctccatccccattgccagaagctggcccagatgcaggctggaagggagagcaacagtgccctgggagacttgaagcctggcagacttgttcgcgtggaactcgttttccaagaaaaaggggaattggaagcctgagggaagctttctcaggtggagaaacccagctggtagactgtgcttctagcgtattctactatgaaagtccagcttggcagaaggtacctgcctgttgggtccccagccagggcatctccctatagatggcactagtctggtcctaacggtaccccatgtgctgaggacatagccagagcctacaggatttgggtggaacagccattattggggtacgcaggagaacaaggacggggctcacacaacaggcagcagagcactcttgtccctagagcacctaactggtgggctcaacacccaacagcacagggaaaagcctccagcagccacttctagttttctgatctatcagagagaagacgggtttgttttgtttttgagacaacagggacagatggggactgcttcttcttacttactgcatgatgtctaccctgttgtcctttgtcacctatgctcagagtgacaggagcaaaactacggtggacctgccaccagagccatcctgccctgtgaggagggaaccctgcttctgtagacagggaggctgaccctcacaagagctcgtgggtctctgtgatcaactgctcacagagtccagatctcccaggagttgcttagccctaaaaagaggcagagaagccctaaggacttctgtccccctgtgtcctggtggtgtcatccacattaatctctcttagagcctcctgctatatttttctgaccctgtgacttagggttgcctgttggtgctcttcatttccactacctcagatggagtcatttctcaagagagttccttttccttggtggcttgcgttgtggtctccatgatgtccacatcctgggcagagcattgcaaaacccagctggcatcttatgaactgagagtgggacagccaagagttctctggagcctgagaccccttttctatctttgtaagagtcgttcagggaggaattgcttgagagtcatcagagcccccagaggaaccatgacttacccaaaccagaccctttgagtgtcactacaggccacaccctgatgccctgtgactgtaggtcgtcttaggccagaatacaggaaggggttgtaacaaggatgctggtctccatggtgacaggcaccttttactttaagagcgtattgatcctggagaactggccaggttgctgtgcctttcaccggtcatttcttggacaggctttgaggtgcccgcaaggcttgttaaattttagagatttctccaaggaagactgtgcggcttttgtccctctggtggcggcgggtgatcaccattcattcatagactgtgctgatggacagcttgctgcctgttaagcactggggcttcaggaaacgcagggtgcctgcggcttgtcttctgtaaagagctgcctgggtggcctggatctccccaggggtccccatgttagtgtgccatacagagtgagtggtctgatcagaaggagaacagagagctggagcccaggggaatgcctagggaaggcattctgaaagtgtggaggcagggttcacttgagccagatggtcgttagggtcaggctccctaactctaaagtggcttcagcatgcacggtcatggctgacgtaataggatgtgagagatgaaggggtgagcgaatgagatataactatatgctccccccaaagccactctggttggtccacagccacatttgccacctcggaggcttctcttccccctttataaaagacacactcatgcagagtcatgcttccagctcatgatacacagactgctgacacaggttatttgaccttatgccacatcccgaactgtgtcttgactattctccttcaattgctcgtcacaggagaagtgctaccagtactggccagaccagggctgttggacctacggcaacatccgggtgtgtgtagaggactgcgtggtcctggtggattacacgatccgaaagttctgcatccatccggtacacatgaatgtcttatttggcttctcgggagcgaggttggcaggggtgggggtgggggtggggctttacagtgagaacagctgccccaccttgacccactcatagcatggcaggaactctcacagaggctgtggttgcagggctggatcctgtgacagactggggacagggttagtggatcaaggacccgaatctgcagagggctggatgctttgactcccagccactgtcctgggcctccccagaaggtgggtgagccagctggagtggtagaggattcaatgggggttgggggctttcccactgcaccaagcaggcactgcgccactgagctactcctagtgacaagctctcactatgtgatccatggaggtctggaacttcctgtgtagaacatgctggctgctgactttcatagatccacctgcctctgcctcccaagtgttgggatgaaagacatgagtcgccatgtctggtgacagaattgttttataatggtgtcaaaaattaggttcagactctcccccagtatctttcatgctcatttcgaggcagccttcgatcaaaatgctcgagaacaaagcagaggaaatgaagaccacagagacaggctgtttttattaggaataaaatgtagagcggttggtaaaattaagttgcaaaaatctgaaagaagtgtctagaagccaccgcagaaggttttgaaaggatggactgaggggcctagcctaatggtagaatatgtgcctgaggcatcccaaaattgttatcccttgcttccatacagagaatacacacacacacacacacacacacacacacacacacacacacacaccttacttctaaacacactggtattgtcatcttccaccatcaggagcaggagaaccatgcatgctgcaaaggcttggagaatctgggagggagggtctggaggtctccagtgtgtaggctgacccttcattcttccttcccacgctgactctttgagacttaaatatgctggcagtgactcaggtcgccacaagtcaggtgggactgtgtagatggagcaggcaggtctgcctcacagctggagtgtgtgagcattaagaccagctttggggatatgtggctactgggatcctggcctggtatagccagctgcaaaagccctttgccagccaagagctgtgtattgtcacatcgggtatggtacccctgcattccagggttctctgtgtttgcagccgctgacctggcatgagccccactgtccttcggaaggagatgctaaacagttccacctcccatctctcacttccccctcatcccttacagcaactcccagacagctgcaaagccccgcggctggtctcacagctgcacttcaccagctggcctgacttcggggtgccgtttacccccatcgggatgctcaagttcctgaagaaagtgaagacactcaacccctcacatgctgggcccattgtggttcactgtaggtatgtcagggaggggccagccacagtgtggggaatggccagtgcggcagtggtggggtgggcagagctagggctggggggaatgaagttttgaagcagctatacccaaagttgcgtgtggagaaaggaattctagcccctcttggtctctggggtacctgccccagtggtgtctggacagacccccaatatgtaaaactcttgaaggctgacaaggcccaggttgatggctggcatgggagctctgggcaagtccactgaccttgccctctgctctacctggtacctcaaggatcgtttagttcccatagcaggggacacacacacacacacacacacacacacaccccttcagtgtctctagtcctgagataaataaccagagcagcagtgccctctagtggctatgcatagatttgctccttgttcttccaagttgcaccctccttaattttgccctaggctgtgtcctttgtcccccaggttcaggcatcttcccaggcttgccatttacttcaggggaatgtgactcacgaggtggcatctttctcctccctgaagcgcgggcgtgggtcggactggcaccttcattgtgatcgatgccatgatggacatgatacactcggagcagaaggttgacgtctttgagtttgtgtctagaatccgcaatcagcgccctcagatggtccagacggatgtgagtggcacctctttctgccctggcctaagcatcacagagcactcaggtgccttcgcaccactccacaggcccatttaaaaatattttttgactgtgtgttgttgttgttgttgttttgcacctggtctgtcatgcggatagattctaccactgagctgtaatctcagccacccctttacttcctggaactcagtcttagtgagtagcccagcctgcttttgacctggctctgtagcttgggcagcccttgaacatatcctctttatgtctcagctttccaaataactggaattttgaactattgccaccaggccccgcttgcaggtctgggttttgctgttattggttttatttatttatttatttatatctcaaatgcttcatcccatccctcctcacagagtctctcctctcattccccctccccttcacctctgggccctcccaggtccgccctgctagaatcccacccacccacaaccctggtgcatcaagtctctgcaggattaggcacatcctctcctgctggtcagatgggttttaataggcaggtggccacaggctatgagcatgcccattgtcagacctggtatacctcccactctgtcattacctcccatggagtcacaaaggctggtgaccctgatccttagcatgttcatatgccatggtggtgattctaagcagctgacatagcccctggagccctcggaggtagtggtcattactgtcatcttattttaccctagacgaccagtccacatgatcactcttgctcctcggccttgctttaccagcgatggggcagtcttgagtggcaccccctgtctccctacaggttcagtatacattcatctaccaagccttactggaatactacctctatggggacacagagctggatgtgtcctccctggagaggcacctgcagacgctccatagcacagccacccattttgacaagatcgggctggaggaagagttcagggtgagtgctgcaaagcaacttccacaccctgaggggctgagagggcctggggagccaaggaaaatggtgccaacttaaatgacgcctcctgagctcagaaagtttggtgggtatcaggttgttagctcttagggaagctacatgtaggatcacttcatcttccaatatcaaggcgacttctggaggcaaacttgggagcaggtctcctgctgcaggtctgtctgtcatgtttggctctaactacattccttggctgcagaagctgaccaacgtgcgaatcatgaaggagaacatgaggacgggcaacctgcctgccaacatgaagaaggcccgcgtcatccagatcattccatgtaaggcagtgggcatgtgggcctcatgccctggaccacctaccttcgtacatcatgctagggggcaagcgcctctgggtgacttggagctgtgtccgaagctaggaagaaaggactctcctgggggcactctgagggatctccatggacccatagggtctcaagtggtacctagaatatagctcaaacgcaagacaccagagcttctgtatagggagggttccctgggacctgaaaagcttgcctcagatgagacctgggacctcactagcgctctctggagaccccttctcccttacacagtgggaagtgagttgcatggccaagaatatatacataaaaagaactaaatcagaccaaaggtgaattctgctgagcccttggagtgtggggtgaggggtggggtggggagaacttgccttggaaatttcataacacttagcctgaggtagagtcaattctagtcttccattgaggaccaggataactgaggcaaagacccatagtcagcaggaacccacatctgcccctgctagcaaggcatgaagaggtatctaggcaaacacagctgtcgaagcctgtgggatgctcaggcttgaagagagggcagttcatgtctcacactgctttttcatgccctccgtggagccgaggcttagtaactgcccaccaagtcgacagcccacctcttctccggaagcagagagttctaggcggctgggcaattcagccccagtctccattacttggttctctgtgacctcagtgtctcctttggcagctgcaggtcttatctggttaccctatccttgttcttaaatgcagtatgtttagtgcttatatttggggatacattattactgatgattggataacgaaaaagataattagattgttttcagagcatccccgaaccacattatgaagctatttgataacggaggcttccctaagagatggctttattaatattcttggtctgtgacttaattccttttcctgttgctgtgataaaataccttgcccaaaagaaaaaagaaaagaaaagaaagaaagagtgagagagagagagtgagaaagaaagaaagaaagaaagagagagagagagagagagagagagagagagaaaggaaggaaggaagaaagaaagaaaggaagaaagcaagcaagctagcctggctcggggttcaagggaacagtccactgtggtggggaagtcagggcagggaagcttgaagcccctgggtcacatcatgtccacagtcaggaagctgagagcagtgaatgcaagcgtgcggccactcagctcactttctctgttctacacagtccaggattccctggccagagaatggccctgccctcaattaagatgggtcttcacatcaattaacttaaccaggatagtcccccccacccccgtttatccagaggcccatctccttgtgagtctagatcttgtcaagttcacaattaacgtggaccatcacagtctataaggcatgctcatatctacactaacaaagaaaatcctgctttgcagatgacttcaatcgggtcatcctgtccatgaaaagagggcaagagttcacagactatatcaacgcatccttcatagatgtatgtaccgcagtcctgtgtgtgtgtgctcattgcaacatgtgactccttcctgtgtaaatatgtgcccttgagtgtgagcgttgctttccacccaataaggagcactggcatgccatttttcttggcagaattactttgcttttaaaataataaatagtgagccaagtgtggtggtatacacctgtaattccagctgttgggaattaggagtctaaagctagcctcagctacatagggactttgaagccggcctgtactacatgagaccttgcttcaaaaaagtcacaataagggaaagatgacttatcaactaagagcacttgctgctcttgcagaggacctaggtttaattctcagcacccacatagtggttcaaaactactggaactccattgtcaagggaaccaaagctctcttttcatctccacagacacaaggcatatacatggtatacatacatgaatgcatacatacatacatataaacatacatgcaggcaaacactcatgcacattaaattaaaaagcaataaaacctttaaaaggacaaaaaaaatcaacaaatactgagctttggaaatgaggcctagccttgctgctgaataattgtctgtttccacatgacaatggaaagctcctctacatttgcatattgtgacaccacagttttatgtgaagagcacgtgttggctcttgagtgatgtctgtgacttgaacccatatagactgggcaattatctgtctggcacacagctggatccagtctccatgcacggtggagttggcagagaaagagacaagagagaactttgtgaccatatggctattagcacttctgtctgcactggagtgaactaatggacgtgttgagaccagaggtccctgctctagcttcacactcagcaccactgagataggaatctagctggggcacagagcccatgagaatcaaggccactgtgtgctgtgctggtaaccttgggcctctaatagctcttagagatgacttcagctactgaggtgggatgtgtagagaagcaccctgataaaaaggcagttcctgcttggtgggtacatccgtgggctgtggcatgcacctgtgacagcaggcctctgttaaggccatctaggatatgcacctgtgtcaggccatctaggacatgcacctgtgacagcaggcctctgttcaggccatctaggacatgcacctgtgacagcaggcctctgttaaggccatctaggacatgcacctgtgacagcaggcctctgttcaggccatctagggcatgcgcctgtgtcagcaggcctctgttcaggctatggaacattggattgctgacatcagcctagggctttcctgagtgcctgtggagatggaggctctggtgacaagtagccctcccctaacctctgcttctctcaagggctacaggcagaaggactacttcatggccacacaggggcctctggctcacacagttgaggacttctggaggatggtatgggagtggaagtctcacacaatcgtcatgctgacggaggtgcaggagcgggaacaggtgaacaggctggggcaggggctctctgtgtgctgggtgtataagaggcaggtagctaatggtgtggtgcctcagcagtgtggaaacctgagaacacatggatgaggccaagccaggaggcctgaggaagaagagaaggaggagggaggttggaatgattcagatcttactccatctttgcttcagataggtggaagggttgttgtctgtccctaaatcgtctttgacttggctatctttactctgcctcaatgttctaccattttttaaatgtcaaggtcacagcctgtgaatgcaacggactgttgcttactgttagcaagatgtaaaggcaggcattgatctatgcccctggttcctgtcctaatgaatgaattcgaagacttacacatttccattttttcccagagatccacccatggcctagtaacatcacaaactcaggaaagtgggagtcaccggtacacagcatctctctaagtgctaacctaaggcatggccacaaccctgaatctttgttttggtttctttgctttaaaaaacaaaactttattgagctgcttttttaatcacccaaaaggcatccttaaatccttaggatttaatgtgttcatagtgctgggcaaatgtgtcttctgtctaactccaaatcatggtcaccacctcaaaacgaaattctgttccattagcagtccccacatcccctcccagccccagacagccactcaccagctccctgactctgactagatttttctggacactggagtaaatgtagttgcacagcgtgtgttgtttcaggagtgaatccccatttaccatcatgtcctcaaggctcaccggtttgtagtgtaaacttggagttttttcttttccttaaccacccatttgtagtgtaaacttggaattttttcttttccttaacaacttagcgtatgtcaacaatatatcttggtcataaccccccccccatcatctctccctcttccctcaggtacctcggaacgcgtccccctctcctctcctttcctttttccttgtaacccactgagtcctgactagtggcgctgcctgtgagaatgttgactggttttcttagcttgctcttgagtgggtctagagccagttctgtggctgcagtgagttcctcgactgcagtggccacaccatgtcgggaaggccctcctccccatcttctgcctcttctatttctgccccagctttcctgagccttcgtgaggctgggacggggctagaggttgatagagatgtcccatttagggctgagcactggttgcagactttgttatttttgttgttgttgttgttgttgttgttgttcacattattccatcgtgtgaatggttgtgcaatttgcacttcccagtccaccggctgatggacacttgtgctgtttccgctctgctgctgtggacatctctttttgtgcaggaataacttctgagttcctccactacatacctacaagtgaaatcactttcttatgatcactactccataatataaactctaaatcacaaactttgatggttcgataatttaaagattttttaaattatgcacttgcagggagggggtgcacaggggtgcagctgcacacgaagaccagaagaaagaaccaggtcccctagagctggagctataggcaactgacaattgcctgatatgggtgctgagaaccaaattctggtcctcggaagaaaagcagtgcctgctcttagcctctgcttccccacctctattacagtcccagtttcagcgttcaggggctctggcttctccacattcttgacaacactgctgttctgtcctcttgactaaagctctacgagtggatgatggcatttgttttgttggggggaggcattaaatcagctgaacgtggtacaggaacctataacctcagcccttgggacgaggcagcaggagagttaggggatttctctcaacctcctctaagaggaaagctcaaggccaggttataaaaccccagagggggcacctttaagtcatatgtatttgtggctggagaaatggctcagaggttaggagtgcgagtgctcctctagaggaccggggttcaatttccagcacccacatggcagcttacaactgtctgtatcttcagttccaggggatccatggcacaaggcgtgcagatggtacacacacacacacacacacacacacacacacacagaggcaaaatacccatacacataaaataaataaatctgaaaacaatcatatattcatgcctaaagaaacagttaccttattttacttgtgttgcaactttatataaagatttccattgtatacaatcttctgggatgtcgtctttctaaacagaatagtggatttgttgtttttctaagcttatgtccgttactgtgactcagccccctttccactgtattcctctccacagaacacacatcctgcatccacttcttcagtcctttttccacccttgaccgtggtgccaattccatcctgtcgtgtgataagcgctgatgacaggcttctggctgccaggggttagcaggtgccaagcagacaaactgtcagattgcagagtttgtccaagagtgaggattcctggttgctgtccaaagtagtttttaaagtgaatatcagcaatgaataagacatattcatcggtctgcccgatgctttcggagtgtctggagttccccaggcaccctgatgcttcctaagagggtgttaatttagctttctgtggccttgattggcatttatcacattcctacaaggtgaaacatcacaatacatacccatggatgtcttctttctcgtataaaaggctttcccttgctctttacctattgcctttctcactgctgtgataaaataccacacaagagcagcttagggaaggaagggtttatttggcttgtgatttgagagtaagtctgttgtggcagccagagcacagggcatctggtcacatggcatcaacagtcaagaagcagacagctgggcacatgtgatttgtttcctcctgtttattcactccaggactccagcccaaggaatggtatcaccaggtagtcaaagtatgtttctctgtcagttgaatctctctggaaaccctgagaacagtctaggtgtgtccctgaagcgattctaaatcccaccaatgtgtcaatcaagattaaccaacaagcaacaaagcgcctgtttttctactgagcactttgtttccttcttgttgctttaagagttctttacatatggtggatactcatcctgggctgttttcatatggctagcatcttactgtagtcagcaggctccattttactctttggatgaagctattgatgaagcaaagaaatatcattgcagtctgatatttctgtcctttgcctcagggacaccccagtcttttatgccttcttttttttttttttagtaagactcaaaaaatgttcttcaaagtaaaagaatattcaaagacaagattgcaatatagggtagtgagattgttcactggcctgattctaggagaggctgaggcatttatgtcaaccttgcatagtgattctgagatttgatgccatcttccagttccatccattgactaaatcctcctttctctcatggatcaacgtttcaaatatcagggtcttcccaggcctcttctctgctcaatggtcagcagatataggatttatatccacgttcacataagattttctgggcatgtgaaatcgccctacatcaactctttaccctaagtggcaacaaccagacattttccctttttcctcctaggataaatgctaccagtattggccaacggagggctcggtgactcatggagatataactatagagataaagagcgacaccctgtctgaagcaatcagcgtacgagactttctggttaccttcaaacaggtaccatcactgggatcccccaaactctagtgaacccgcagaagcgtcccttggaatgtacttacttatataccaaggtgggccctgaacttgtcaccacccatccaagtcccagggaaccctgagagagaggccactggagcatctggcggtaggcatcctatgaattctggcttctgtggccatatgcctcctgctggagcatgagattgatagcaaagaggtaatttcctggctcttgcaatcactggggagagtgatcttagctgggggtggagaaacaatagatctgaaggaaggtagagaggcctcctggaccccttccagaacctctcactgtcccggtccatactgggccttgacctctgaccacacaacatctgtgccttctggctcagtaagagatacaagcgctcataagcttgaccaattctgagctgaagatagtcatttcaggaagctgctacttgttccctccgggccagcagtggattgcctgaaccactgggcttacctatagcccctgatgggaactaagagcttaacttcccaagcaacgtgagtcttagctgtgaataaagccaccaagagtcctaaaagggctgagccagaatgaatgggggtccagaaggaagcagagtcactggccaggcccctggactgtctaggaggggcttcaagacccagaaggacccatgggcaaggcaagcagattcctggcaggatgtgggcagtctttggagtctcgtctttcatctgcagcccctggcccgccaggaagagcaggtccgcatggtgagacaattccatttccatggctggcctgaggttggcatccccgctgaaggcaaaggcatgattgacctgattgcagcagtgcagaagcagcagcagcagacgggcaaccaccccatcaccgtgcactgcaggtgagccgcccctcccccacggggccctggcttgggggcacagcaacagagggccagaggtttctggagacccactctacagctagggagagctcaatagcgcctctgggggattgcttacctagactgcgtgtcatcttccctttcacacacacacacacacacacacacacacacagatgggcacaagagtcacttcattacccatgatgcagaatgtacatacattcaaggaggagccagagtagacacaggggacaatatcctgttaaagtcacacaaacctcccaggcaaagctcctaaacatcggcttagctgtgttcactgtgaagggcagctctgacgctggctgcccctccccacattgcccaccctctctcctggctttggaaacattcaatgcagaacaaccaaaacacaggatggaatataaggacctcacaaaaaccggtctagcctggaatctctgtgtgtgtgattatgagattacataaatgtaacccacaaaggtcagaggtcaggctcatgtgtcactcctcaggtgtaagccattcactgggttctgtctttgtggatggagctgtgctgggtggccagggagctccagggatcctcctggtctccactgttctgtccctgggattacgagcactcactaccatgcccggcttttaaaagaagtatctgggacttgaaactcaagtcctcatgcgtgcacagcaagtgctgtaccgactgagccttctttccagaccccagtctgaaatctctaaagtaaacccgatccaacactcatgtacccagtcagcctcaagggtggacacgttcctggtgtccctggagacggcaacaaccaggctcatggcaagaagcatgtggagaaagagtgaatgtatggcagatgtacagtttccctccatccctggatctgcaggtcctgccctacatgatgttacctgcctcggcagtcctgttcacacttgccaagccctggcgagcagcagtttagaatgcttttattcttgggtgaatctcactagctgccggagctgtggctgtttcatttcctgaacatttgactcccaccttggaacaccctttatttttattcactatcctatcccttgtgtctaaggggcctctgtttaacaagagagatggacactctccctgtgtggatagcccacctagtgtagtccatgcctggccagtaggtggcgctcacaccttggttttcagtcccagaagcctttcccgaggtccctgagaatgaactagaaaaaagttgagcaggcttgttgttctgcaaagcagaagatgagttctgcaagcctggggcaccaggtggcagtcatggggatgaacaacaacaataggtcctcaacttcagagtagaaccattcgtagagattccgagagatccaaggacagctgtgtccctccagaggatactagaaaaggctggtctcgtgtctcctttagcctctcccagccctcttctgtgaggctgagatcaagccaagtgccatcttcaggagaatccactattcctagcagagagcatcttactatactatccccaactgtagccttgatgtgtcaatatcccaaaatccaggctttggcactggccagggtctcttctccctatacctaaaagaaaagcttgcatatctgatgcattgtaggtactgctgagctgatggtcagtcagggaatcatactattcatagccactatgtcaaagcacctaagttgtccccatccgtttctaatatccgtaggaaaggaagcagctttctgcttgctggatcttgctgcattatgtatataagtgatcttataagctacagtcaagggggttgggagatggctcagtcaacatagtattttgctgtatgatcgtctttatccacataaaaagccaggtgcagtaatgcaggtctgtaatctttggtgcaagttaggcacagacaaactagtccctgggggcctggtaaccaaccagcctagccaagacagtgagctctaggtgcagtgaaagagcctatcaaaaaggaaaatgcaaagcaataaggaaaggcaacatacatagacctctggcctctacatgcactcagacacacgtacatgtacaggcatacgaacatacacagcaccacgcacaaagatgcaggcagacatgggtgcctttcagttctcccccggggttggggagtaaatgcccaggtctcctcctccctgtgtgtgtcttgcttgctttgccttcactaagcatcttccctccacagcgcgggagcagggcggacaggtacattcatagcactcagtaacattttggaacgagtgaaagccgagggactcctagacgtgtttcaagctgtgaagagcttaagacttcagagaccacacatggtgcagaccctggtaagaatctgatcagcctgatgttccagaagagtcaagaattgtttcatgtgtttgatgtctgtttcatgaaaaggagcgcctggtgtaaggggaggctgggagggttcttgtcccagagtacctgacccagctgcaggcattcacaataaagccctcccctggtcttaaggggagtcttcccagcaagactcaagagggggggctcgtgcacagattgtatttccatttaaaaacggggtgacagagttcaaaagcagccctgaagttcaaagcccggatgcttgttactttccgtgttccgccatagcacttgcttggcctgtttgcctttggaaggtctccctcaacctcaaggctccttcaagggtcttgtctggggggtgggggtgggtctcctaacatccaatagctctacattttctctttcattagtcagagcacacttcctggttagagagagagagtctgcactgaattccaaaacgtttcatgttggaggggcaagggcagtcttaaaggctgagttcatcatttcccagagcctcctaatgaggacctctctcccacctgctgtctctacacactcttgacaggtggcctgacgcatgtgcaaggacaggtgggctgtggctgtgactatggaaagacttcacgggaacctaagacctttagtcttgtaaatcctaatggtgtctatattaatatggaagcatgtgattttcatctgattaacagttataaattaggcagtgtgagctttattcttcagtattagaaccctggtagtttccttttctccacttcagaaatagtttccattcaggtgtggtggtacatgcctataatcccaatacttgggaggtagaggcaggaagatcaagagtttgaggtcatcctaggctacagtaggaagtcaggctaggatgagcaacaaacatctctctctctctctctctctctctctctccctctcacacacacacacacacacacacacacacacactaatgggcccaatggcatgtatttgtgatccttcacctgggaaatagagacaggcttcctggagctcacaagcagccagcctaacctacttggcaatttctgggccaagtgagagatgctgtctccaaaaatcaagcagacagtgcctgaggaagggcacctgaggttaccctctgtcctccacatgcaagctaacacatgtgtacctgcacacatacacacaaaaaaaaaatattttccaatgtcaatatgaaaagcagagttgttttccaaagaccatactgaaaacacactagtgtgaacctaaaaattgatgttttctgcatggacaaacagcttggtttagaacatggctcatgcctaaaaggcccgctgtgtaacagaaactgatgtgtgggagggagccccggactttgatgcatcagcagactgactgacaactgggcttctagctcatcttctgattacatgcatcaggtatgtgtgaagctgcttagtattaatatattactaatatactctcattctcttttcaggagcaatatgaattctgctacaaagtggtacaagattttatcgatatattttctgattatgctaatttcaaatgaagattcctgccttaaaatattttttaatttaatggtcagtatattttgtaaaaaaaaaaaaagagatcatgttaatttatttcctagtggatattaatatccttcctaattcctttgtatatattttgttatgttctaaaggctacctgctgtaaggttattaaattgtaaatgccctttttaaaaattggaataacatgttaaggtcaaatactatctggaaagatatatatttctgctaacaccagtcagtatcttagttctattagattcatgttatgtggtgtcccacatcaggtgtcacatggtgtcacacatcatgcatctgtaaatgtagttcttaacatgtcaaatgtgtttgtgagaagacactaacccctgaaaccccctgtggagaaaccagtagaggactccgagtcagagcacatttactctccccaccaactgtcgcacccagggcatcggaatgtggcaaacagtgtgcatgggggctttggtagagtcctgggtctcagccatgtggtccatccttgcatttgaaagatcagagtggaagcagacacggcagtgcatcactgcactgctagcacgtgggaggctggggcataaggatttggtccaggtcaggccaggccagcttgggctacagtgagactctgtaacacaacaaacaacaaacacccagagggttttgaaacccaaatccaggtctcagatgtacaaggtgtagatggtggtgactttcctatgagttttaaaaggcattcatgagaggctgtgtagtgccactgtaggcttgataaagagatgtgttataccaggccatctattctcacaggcctccagtaccctccaaactagccatctgagctgtgttcctggaaccacttgctgcctgcctgtgtgcctggctcagaatccactcaagctcattcccaacggcccgcccactgacacagctgcctgtactgaccctaattgggcctacaggctcaaccacagctgcacacacacacacacacacacacacacacggtagaatggccacaaactgttgcactgtcaatttgctgatactcaaccacagctgcacacacacacacacacacacacacacacacacacacacacacacacacacacacggtagaatggccacaaactgttgcactgtcaatttgctgatagccatttcaggatgtcagattttctttgtaaaaagttaagatggtttgtaagaaaggaattcttaaaaatctagatttgtacagtttttttcttaaatgtcccacctcttggtgtttaatttttaaaaatgagagggggggaagatcctaatctaacttacctttggaggaaaggctgctgagacctctgagttcaggtggcagtgacaggcgcactgcctgagagggtaggttaggaggagggagaggaggaggaggaatgtagaaacattgacttcaataaaaattatcttcctatggcatttagatacctagcaaatgagcacaatgtaaaaaaaaaaaaaaaaagacatctggtctaactcattgaaggctttgaacacagtttgggaactttttttttaaactttttaaaagagaaatgaaaatacaaaggccttatctccatggaggactgatcatgctcgcctattgcacagtttgttcttgttcgtgtacaagggacaaccccagggtctgtcactgcttcatacaggtgaacgggtcaccacgcttatctcaagccccgcagctctgagtgtcccatccagaggcacaagctggcactcagcatgcaggatgaaagcagacagtggccactgtcaccaccaccaccagctgcaggcagggctggctgcctgtgctttgtgggagctccccttctctgagcagccttggagcacaggcagaagatggaagatggaggagctttccctggccagtggtctcatttgtctccatcttagacccaagctcaacgccttgctgtaactgaagcgggacagagggcagtaagcccactagaattaaggtgacctcacatgggtcccaagccaaagttcggccacgcaccttggcaccccaacttagttactggtccttagaatcccaggcatctcttgtatcaagaaatgccttagggtagatcttttcaggatgtctagaaaagtattctaatgagtgtttttcctcaccttggggctgccccaggttctcctgcaggcagagaccctgcctgtttctaaacagcttgtctcattccagagaaaaacagaagccacgctcctgtgggcacagttggggcagcacttgtactttggaggggccaatccctctagtctcttgactaatgccatagcaaaattcagcctccgtaagacacagagcctctgtgtacaaggggtctcctagggggaggagggcggtctcagcatcttctctgtgtacctggcatgtccttttcttcttccttcaaagaagctccggtgtttatgacaccgacaaccttcttagttctctgttgcatgcggttgtgctcaacgccaaacagtcatcagagctgagcgttctgatcaggtgcgtctcttggtcactgtgtgacttgctttactctctctccatgggctggatgaacgaggaatgcacacctgtgttttccaaggtagttttatgtgtttttaaaacctttttaaatgagcctgatacctgtgtttcagcatttggccacgttgttggtttttgtttttcatgtatatttactgatatatttttgtttgtaaccaagtcatgtttaatttatgtgcaatctttataatatgtgtatgtgttatggttccaactctcatatattattccttgatcacatttatcgtttgatcttgctctgattatgccagtgtatgtcgctgaattcttgagacatgtgaactgcaagattgaaaacatccggattcgagaataaatctctgactaccagcctgtacctgtgcttctgtcttcccatttaagtgtgtgtgtgtgtgtgtgtgtgtgtgtgtgtgcacagaaaacatgtggaggccataggacaatggtgagtgtcagctttaggaatactgcccaccctctttaagaaagggattttcactggtccgcagctgaccaactgggcaaggctggccagccagtgagcaccagagattttcttatctgaactccccagtgctaggattacagaagtgtgacactattcccattttctttatgaggatttgggagactgaacttggtcctcatgctcacaagccaaacactttaccaaacaaactattccagtcccactggaggtctttaaaatgtaggtctgagccgggcggtggtggcgcacgcctttaatcccagcacttgggaggcagaggcaggcggatttctgagttcaaggccagcctggtctacaaagtgaggttcaagacagccagggctaaacagagaaaacctgtctcggggaaaaacaaaaacaaaaaacaataaataaataaataaaataaaatgtaggtctgacttggcccagaaacagcttctaaggggaggtgagcgctggagccaaagaggcattaggtcttaatggtctatggtaggcaggtatcatacaagaggcacagactttgactaccagttcaaagagttcatgttctgtcagggtccagggaggaccaagcctggaaagctgagaaattagctgtgatgaagagcccggaatgactgaggtggaatctttgtctgagtcctggcctggaagttccctgttcaggacatcatataaaatctagtgctgagacttcggtgctccaaatcttccttctaccttctcagtggagaaagccctcatgacccagcttgactccaagcactggccaaaggctacaggagctgcaagcagtattctattctgttcatcttaactaccctgagatggagcactgagaacatcattctatagaccagaaaactgcctgttaaagatttgccccaagtcacattgcaatcatcaggcaagctgagattacatgctattaaactaaatcagtttagtcaaggggatgaaaattgcatttaggatgctgtagtggctattcccagctgtcaacttgactatatttggaatgaactacaatccagaattggaaggctcaccagtgaccctaatctggaggctgggagatggaagtttctgatctggatcttggtatggagatcttgaggcatagtggctatggattccagaagattaagacagggagatctctgagttcaaggtcatctgggattaaaggtgtggtgggacagacctttaatctgggctacaccttctgctggagaccatataaggacattggaagaagggagtctggctcttgctccttcgcctgcttgccgtgtgggactgagtaactgctagatctttggacttccattcacagcttctactgaaccattgttgggaattggactactataaatcatcaataaattcctttactatatagagactattcctaagttctgtgactctagagaaccctgactaatacagatgccgattctcactaggtgcctagatgctgctgacaactaaggacctgccgttcctaacccgggacagtggctgcagtggagaggccaggaagcttcttggagctaagttcatcattccaatgaatacaattgatgaagtgcggggctgggtcaagttccaggcagggaaaacagtagctgtttatgagaagggcaggagcaaatgacaacaaaacaggaagagtcacagatctgggaggcaaaaagtacagcactcctttcttgggaatctcccatcatgctttctgctgggaaactgacattgctagggaccatagctaaacacttgaggaatgggtggatatttgttacaatcaaccaacaagtgggtctttctcagatgtgcacacagagataaatagaggatgtgttctaagaatgtcttggcaatggtatcaccctcaaatgagcgttttaggttacatggtggctgcatgtgtgtgcatatatacataccaagtgcacacatcagcccacacaagcagacatgtatgtaggctgatttgggacatctttctactggatcctctttggctagggtggctggctagcaagcctcgggcactcatatacctgactccatatcccaatgctggggttgcagacctatgtcaccaggcccagctcagacataggttctgctaatctgctcttgccttcttgcctgcatagcagctgcttcagagccgtcacatctgtcctaagtgagaaaatgtgctaacatggctcagacagaatttcctataactgagcaggcctttcccttatcacccagttccattcaatcagcatgcagttgactacaatttcccacatacatgtgatatttctaattctacatcagagcaattcatagtcaaggttcctgttacttcaaagactttgactttaggatttaagtcaattaagggcactttcatgcctcacaccctctaacaggtaaaaagggcgctcttttcctgtgccttctgctctacacaatctcctttgccagttccactgttacccaccctatgaagcttttgcccccttattaataaccagttgccattccttgattacagaattcctgaggtagatgaaatggcagaactcccagactcacccaaaatgctaaatcccggcctccactcagtgtttctcacctgcgtacccagtgttcttcacctgtatctcagacaggagatggagaagtgaagaggttagggcaatggctgaccagggcacactctaggctctcttccagcaccagcagatatgttactgctggaaaacagaaaggggactagcaggcagagtgaaaagcacaaagttgcatatgcaaatgcgcagtggtttccaacagaaaagagtttagggttaaagtgaaacttggaagataagcatctcataccagacaccaggatggccttgtgctgccaggcaagaggtcagagaaagcccgtgataaaagcagacgctaggacaggagactggagtggagactccagtggggacaggagactccccagcagcaaaggttccacaggcaaggcagccaatccactcaatacagaggcctaatgaaaagcacagacatcaaccgctctttaacatagcgacccgtgcccctgaagggagctcggcagccatccttgtcagatgtttctcccaaaggtcacaggcccagaggattaggctgacttgcgtaagtgactaatggtgtagcctacaaaccaaccactccaccgtacagtcatcctgtgtaaggttggctgatataactgcacaaccaatgtctaatgaatggaggggcaccaccttcccctccttcatgagggcagaggggagcagctgcagttgtcagagaggccaaaggaggcagcgaatttcagagctttattggataggacagagggccacatttctgcctgctcacccctaaactgtaattgcgctgagatccctggtgatcttcctcatgacctccattggcgtctgaagagagtatgaccaggaaagctcaaagcttccttccttaaactcaggcagtagcagtagtatttacagttcatctttacactggaggtgaaaaccacactggaacttatcactaagtcaaatttacttttccttcttaaatgtctttgctacatagtttcacttttctggtaacttcttgttcttaacttcttgttcttaacttcttggtgcatacaatgtcttcatcctgtttgggaaaaaaaaaaccacactcctaaataatatgaaggaacaatttttgtgatcacctcaactcaatgagccccttgtccttactaggtgtcattcaggtctctcatctataaattaacattgaaggtctggaaagatggctcagtgtctaggggcactttctgcacttacagaggacctaagtttaactcccagcatccacatggtggctcacaaccatccagggaaccagatgcccttttctgactgacctccgcaggcaagcacatgatacacacacacacacacacacacacacacacacacacacacacacggcaaaatactcagtatacattaaaaaaaaaaacccacaaaacaaaaacaaagtgtttttcttttttgtttgtttggtttatcaagacagggttcctctgtatagccctggctgtcctggaactcactctgtaggccaggctggcctcgaactcagaaatccacctgcctctgcctcccaagtgctgggattaaaggtgtgcaccaccactgcctggctacaaagtgtttttaaaaagaaaaaaattaaagttggaaatccttttacaatgcttaccataaggttgtttcttcctaaatgtttttttttaacttagtttttaaaactcaaactctgtgctctttcacaagtttctaaagcatacacggtctctatcactgtatgtggttcactaattaaaaaacatcattcacaaaatttgactgtggcctagatgaaaacttaagtatcctaaagccaacttcccacagacaaaggacagtcactgtgtcctgaggtctcctatgtggctgcaaaaggatagtgggtcctctaaggcagtggggagatagaggcaggcccatctacctggaagcggggatccaatctacagaaagcaaaaggtcacaatagcctcttagagcaaatgacccaaagttctggtacctgataaacacaaggcccatccaacaaaaattagaaaaagccgagggtgatgctgggcatactttagacacagttttatgagtgattatggacagttaagaaagggagacggaaaacaggaactcttaagtgtgaggctcagtatggacaagaagatcttggtatgtgaatgctgttgaattctagaaaataacaggtagatggatctactgtacacatgttagaaaggcacacacaccagataagaggcttgcttctccagcatacttgcaggatggaccgccaggaagcacccacccctcccacacacacatatgtagaatctgggcctatggacaacagaacagacaagaaagatatagtcctgggaaaactcgtcagtgtatgacatccgctgggcaccagtgaggagaagagacctgagtgtctatgacacgatgacctggcctgatcaccctcaggccttgcctgttgtgttcaggatcatttgactaaaaaaacctgggttttattccttctatttccttctgataaagtactactttcaaggtgatgaagctgtgcttagagctctgaggaaagataagatacttgttaagcctatgaggctgagttcctggtgtgtcttggtgtctgtaatgaaggcttgccaccatgagatagtttctgcttccggacagccacctccacttcctgggtattgctctcctttcctgagcctcgcttccatggttctcaagccctttgtgggggtcaaacaaccctttcacaggttgtttcatatatcagatatcatgcataccagatatttacattatgattcataacagtagcaacattagtgatcaagtagcaataaaataattttatggttggggatcaccacagaagaactgtattaaagagtcacagcattgggaggttgagagccgccattctgggtgctttagctgcaccttcgcactagacttccatgcctcttgctccatccctcagctatatgggatgtttcatgacctctggaaagcctgggtcttcttgtgctgtgccagtcacatgtaggactgccagctcagcacacctctgcctcgagcggctgtcaatacctttatctcccatcagctgtttcagaatgttcagagtatgttcaggttcaacttgaatgtccagaacaattatgtgtcactcctgcccaccccatctttacctggtcctagactactgcttaatgcaagcacgccactgggaatgatgcaaagcacggacagcacatgggtttacagtctactagcttagtactgtgagcttgggatgctgaaacaacacacttcccactgaggagaatttacctattttcacttatttgcttaggagatagacaatactgggcttattctgcctttttatttattttttttaaatcatatttattccttttaatttttatgttttttgccttcacctatgcatatgcctgcttggtgtttaaggaggtcagaagagaccatcaaatcccctggaactggagttacagatagttgtgagccatgtgagtcctaggaataacaactggctcctttgaaagagtatttggtgctctcaactgctgagccaactcattctgctattttaaaggaaatcttttgaggtcctgacatgcccacctttgttttagttaagtgttgccaacatagagaggctgaaaatgtcatctataaccaagataagccacatcacaaacatcagaaaatggtattagatataaatagctagctcttctggaatgaaaccctcaataggtaaattcactattcaaagtggaattaccaaaacagacacaagaaagtaagtggcccgaatgatggctttcccactagcatagcaggagctgctggcatgtccttatttgcctttgtaacctgggcataaagattagaatgttctgggtctcacacaatataagacagcaagggtccttacctccttcagagtttttgcatctttcttggttccacgagttacccttggcttaggttcactgtccaaagcgactctagtttttctggacctcaaacacctaacatcagactctccagagactcctttctcttcctgaggctttatcaagatttctgcagctggtttgcttgttttctcttctgcttcacaaggctggggcatctcagtcgttcctctagacctcaagcatgttcttttcccactgacttggccccgagatgtagatttcttggctc

SEQ ID NO: 525 - DNA, 2374 bp, Mus musculus
cgggctacggactgcgggctgcgagagaagtcaccggcggcgcaggtacctcactgcctacgcgcgtccccacgaccctccctcgcgccggcggggacagcggacgccccggagcggagcgcgtcgggcgggcgcccgggagatgcggagtcgccgcggcggagcgatcggggctacagcaccggtccctgggagactatagccctcatttccccttggtgcaccatggagcccttctgtccactcctgctggcaagttttagcttgtcgctcgccagagctggccagggcaacgacaccaccccaacagagagcaactggaccagcacaactgcaggccctccggaccctggtgcatcccagccgctgctcacctggctgctgctgcccctgctcctcctcctgttcctgcttgcagcctacttcttcaggttccggaagcagaggaaggccgtggtcagcagcaacgacaagaaaatgcctaacgggatcttagaagagcaagagcagcagagagtgatgctgctgagcagatctccatcaggccccaagaagttcttccccatccccgtggagcacctggaggaggagatccgggtgagatctgcggatgactgcaagcgattccgagaggagttcaattcattgccatctggacacatacaaggaacctttgaactagcaaataaagaagaaaacagagaaaaaaacagataccccaacattctgcccaatgatcattgcagagtgattttgagccaagtggatggaatcccctgctctgactacattaatgcttcctacatcgatggctacaaagaaaagaacaaattcatagcagctcaaggccctaagcaggagacagtgaatgacttctggagaatggtctgggagcaaaggtcagccaccatcgtcatgttgacgaacctgaaggagaggaaggaggagaagtgctaccagtactggccagaccagggctgttggacctacggcaacatccgggtgtgtgtagaggactgcgtggtcctggtggattacacgatccgaaagttctgcatccatccgcaactcccagacagctgcaaagccccgcggctggtctcacagctgcacttcaccagctggcctgacttcggggtgccgtttacccccatcgggatgctcaagttcctgaagaaagtgaagacactcaacccctcacatgctgggcccattgtggttcactgtagcgcgggcgtgggtcggactggcaccttcattgtgatcgatgccatgatggacatgatacactcggagcagaaggttgacgtctttgagtttgtgtctagaatccgcaatcagcgccctcagatggtccagacggatgttcagtatacattcatctaccaagccttactggaatactacctctatggggacacagagctggatgtgtcctccctggagaggcacctgcagacgctccatagcacagccacccattttgacaagatcgggctggaggaagagttcaggaagctgaccaacgtgcgaatcatgaaggagaacatgaggacgggcaacctgcctgccaacatgaagaaggcccgcgtcatccagatcattccatatgacttcaatcgggtcatcctgtccatgaaaagagggcaagagttcacagactatatcaacgcatccttcatagatggctacaggcagaaggactacttcatggccacacaggggcctctggctcacacagttgaggacttctggaggatggtatgggagtggaagtctcacacaatcgtcatgctgacggaggtgcaggagcgggaacaggataaatgctaccagtattggccaacggagggctcggtgactcatggagatataactatagagataaagagcgacaccctgtctgaagcaatcagcgtacgagactttctggttaccttcaaacagcccctggcccgccaggaagagcaggtccgcatggtgagacaattccatttccatggctggcctgaggttggcatccccgctgaaggcaaaggcatgattgacctgattgcagcagtgcagaagcagcagcagcagacgggcaaccaccccatcaccgtgcactgcagcgcgggagcagggcggacaggtacattcatagcactcagtaacattttggaacgagtgaaagccgagggactcctagacgtgtttcaagctgtgaagagcttaagacttcagagaccacacatggtgcagaccctggagcaatatgaattctgctacaaagtggtacaagattttatcgatatattttctgattatgctaatttcaaatgaagattcctgccttaaaatattttttaatttaatggtcagtatattttgt

SEQ ID NO: 526 - protein, 768 aa, Mus musculus
RATDCGLREKSPAAQVPHCLRDRPSLAPAGTADAPERSASGGRPGDAESPRRSDRGYSTGPWETIALISPWCTMEPFCPLLLASFSLSLARAGQGNDTTPTESNWTSTTAGPPDPGASQPLLTWLLLPLLLLLFLLAAYFFRFRKQRKAVVSSNDKKMPNGIEQEQQRVMLLSRSPSGPKKFFPIPVEHLEEEIRVRSADDCKRFREEFNSLPSGHIQGTFELANKEENREKNRYPNILPNDHCRVILSQVDGIPCSDYINASYIDGYKEKNKFIAAQGPKQETVNDFWRMVWEQRSATIVMLTNLKERKEEKCYQYWPDQGCWTYGNIRVCVEDCVVLVDYTIRKFCIHPQLPDSCKAPRLVSQLHFTSWPDFGVPFTPIGMLKFLKKVKTLNPSHAGPIVVHCSAGVGRTGTFIVIDAMMDMIHSEQKVDVFEFVSRIRNQRPQMVQTDVQYTFIYQALLEYYLYGDTELDVSSLERHLQTLHSTATHFDKIGLEEEFRKLTNVRIMKENMRTGNLPANMKKARVIQIIPYDFNRVILSMKRGQEFTDYINASFIDGYRQKDYFMATQGPLAHTVEDFWRMVWEWKSHTIVMLTEVQEREQDKCYQYWPTEGSVTHGDITIEIKSDTLSEAISVRDFLVTFKQPLARQEEQVRMVRQFHFHGWPEVGIPAEGKGMIDLIAAVQKQQQQTGNHPITVHCSAGAGRTGTFIALSNIRVKAEGLLDVFQAVKSLRLQRPHMVQTLEQYEFCYKVVQDFIDIFSDYANFK

SEQ ID NO: 527 - DNA, 198849 bp, Homo sapiens
tttttagattcatctagatatagatacacacatttgtttatccactcagcagctgatggacattttggtagactcaagttacatcaatatattatatttgttaaggataaagctgtcatgcattcgagtacaagtatatgtgtggatatctgattcctttttcttgcataaataaataagagagatattactggaacatggtaagtgtatatttagcattataagaaactgatagactgatttctcaagtggctgttctactgtgcattcccacaagagatgtattatagtttcagttgctccatatcctcaccagcacttgctattattagtccttcaaaatttggcattataatgagtgtttactgatatctcgctgtggtttttatttgcattttgctaacactaatgatgttggacatctttgtatgtgtttctttgccattcatatgctttctttggtgaagcctctgtttacatcttttgtccattttcttattgatttgtcttctttttgttgagttgtaagaattatttatattttattctcaagatacaatatttattagatatatgttttatatatatcatatatttattagttatatgtctcgcaaccattttgttccagtatatgggttgttttttcatttccttaacagcatcattgaagagcaaaatttttgaaatttggtgaagtctaacttaccaattttttcattttatggaatatggtctaaatgttatatttaagaaatttttgcctaacccaagagcacaaatatttattttcctatgttttgttctagaaattttatgcttttaggtcttatatttaaggttatggtctatttcgagtcaatttttgtatatgatatgaggtaagggctgaggttcatttttatgcatgtggctagggtgttgtcccagcttggtttcttgaaaagattatcccttccctgatgaactgccttggcgtcttctttgaaaatcagatgatcatatctgtgtgggtctctttctggattctctattaagagatcattctttccagtcctttgtaagctccaggaattgtttgtcacttggctttgccatggctcccgtcctggtctccgtagcttcctctgaggtgtgtgcctcagcactcaattaatgattccagggatccctctagatttctacgcttccctctgcagctctctcctctccagcactcaccaccaatcctagcactttggcctcctcaaaccttggtttctttctattcaactccagaagaccattggcttctttggtttccccttccacaccgtagcctggaaatttcctccttgaaaacctcctggcgcaattgtcagtctgacttcatttgtttcttttatctcaggaatcatggccctgtgctgcctgatgtccaaggtctattatagaaaccattcctttatatatcatcttctgtcttattaattttataagactatagggggcccttcttactccatcatagtccaaggaggtagtcagccttcactgaatgaccacatggctgtcacactttctttcccttagaattttgtagctaccactttattggctttttgcactgaacgttgctgttgaaaagtctgaggccagccatattttttctctctgtatgttactgagttactctgatagcatggttataagagtctgtttgtgaagtgcagccatacccacctaaattttgtttagattattctgattcattttattctcctttcatgtaatttctcttttcaatttgcatattcagtttattacagaaacatttttctgtgtcatatttctaaattatgtgttccacttgttgaaattttacctgcagacacaccagttattgttgtgttgggtgatctttgaccttcatatccactattcaccttcttctaattgctttattccctttatatttttgctgtctattcactgtgattttcttccacaatgataactcatttttagctaaatttttttctaacttatgtattaaatcttaagttatatggcttggagtctcaatttgttttctattaacttatctctgttgttttatatctcattattagtcccttgcgtaattgaatctttcttattataagtaagttcttacatagcataatacatgcagaagaaactgcttccgcccattggattggatgtttttccagactgaggtgtgcttaccctttttttcttttcttctgctatgttggtgtagatcccattggattggatgtttttccagcccgaggtgtgtttacactttcttttcttctgctgtgtttgggtagatcccagggtatttcttttcatcttgcttagtttaacatgagaagttctatccaactattggtttacacgaatccatgattagtgagtttccctgacatacttcttaccttacctggggctaatttatcttagcttctccatgcgtcactctttgactggatggttttctatcatttttttttctaaatacatccaggagggaaaaacgtatacagatctttgacaaaacatgtaagtcagattagcttaagctcacaggagtttggggtaagggaaacctctcatgtgacatgatgcagggcttccaagaaggtctccaggacatcattttgctctttctccatctctgggttgtgtttctcttggctctgctcccaagttcatggacttggatcctcattcagaacttttatcctctcagcttcaagtttattacaagaaagaatcgtatgcctctcccccagaaatctctcagcattttacttgctgtaatgctgccacacacccacacacctagagctggacagaagcagggagaggtcttgttgtgttgtaagtaggattactgctgattcattctgagtttagggaggcagaattggtggtcttgcttccatcagctcttggctaatcagaatctccatgcagtcaaggaccttttctaattaggcttggtaattgcacagggcatggcaatggggactatcttgtccctctgctcagagtaagaggcagcctgagactctgtccaggaacaggaactttataagggatgggctagggcagactgagtctgggtgtacataagaggaaggtgatgtcagagcctgtggtgaagaggcctcttcaagttgaaaacatctagaacacgaagccctcacagaaaggaggagagaaagaccaaaatctggaaagcaggtcactactagaggctgggaggcggccctagctcaggatttcccataactcagtcatttcagttccactgttgcaatttttgccatctatgactatcacctctaatgttatttccttaataattttctctaaattaattttttataaattaattgaccatgacactatctacattagcttagctgtaataaaatcttgagcgatgtctcactatttttctaatatacatgaaaataaatatacaatttatatatgaaatgagaagtggccatccttgtactatctacaatcatctctgacatccctccacatacaccactcccaatagaaccttactttggaaaacgctggcctagctgatatgaagaaagaaaatgaccttctacgttgctggaatgcactggggaaactgttttttgttttgttttgttttgtttttaactacagtttgaggcctctgatttcttctacttttcatgaagcttactacacatcagtgattttttaaaaattacaaatatgccccttacagcacatgaagttccagaatatataacaggatttattttaccatttttaactatgaattcatgtacatgtatactttcatcataaaacgtatgtagtttatatgtactttgggatcatttaagtagaaaaattgcctcaagatgaccacacttttccattaaaggcaatttttttatatgtaaaaacctttcttaacactgccatgctttaggaaatgaaatatttaaaaactaaatttctattgtgctttagtaaccgctaagaaataaatatctgtatctcatttttaggagagctttcctcagtgctgtattatgtctcattaccaactttttcctcaattccaagagcaaactgaaattatataccaggtagaaacaaggtgattaataaatcatcccaccagtgataatgttctgtggattattgacatgaatttcactgtgaggaataaagaaattatgtcataggtcttataatttctcaagttcaaggaaaaatatccttttgccaaagtgtagatatttctgagagtcctatgattttttgagtgaggaacacacgggtattcaatgcattatgaaatcatctgaagcaggccatggaaggtgctggattattttattatttggccttccaatgaaaacaactctaatttacaggcatcagtttattttgtaaattgaatcaatttttcttaatcatagaagaagagaaataataaatgacttttgccactgtgcatggaatggtcacctgccctcatccttatgcatttgacaatgtgataactgttcccaaaacaattacacacacatacataatgatatattgttcacctgtactcggtggccaagaagttaagattcaatcataccctcatatgtgtgaaatgacatatgaacaaggctattcttgtagcattttgtgttagaaaacaactgggacgcgcagtggctcacatctgcaaacccacactttgggaagctgaggtgggcagatcattgtgaactcaggagttcgagactggcccaggtaacatggtcaaatgctgtttaaacaaaaaatacaaaaaaaaaaaaaattagccaggcatgacggtttatgcctgtagtaccagttactccagaggctgaggctggagaatcgcttgagtctgggaagcagaggttgcagtgaaccgagatcgtgccatggcactccagcctgggcaatacagtgaaaccctgtttcaaaaaaaaagaaaaacgaagaaaaaagaaaagcaaacaactgggaataattaagtggcctagaagtgctattttaaatatatccaaagatttaaaagaaaacatgaatataataaataaccatatgaggacctcattagagaaataaaaattatttttaaaataaccaaatgaaaagtctattacctaaaaatacataacagaaataaaaaagaaatcactggatggacttaacagaagattaagcattgcagaagaaaagattggtcaattttaaaacttggcaatagaaaccatctaaactaaaacacctacaagaaaaaaggcttaaaaatgttaaaagcctcagtaaccttgtgagacaatatttggagataccacatgcatccattggagtccaagaaggacaggaaggggaaaatatttttaacgaaataatggctgaaaatttcccaaatttgatgaaaactacaaatttataaaataagaaactcaagtaatcccaagaaaatagacacaaggaaaaccatatcaatggcaggtgcagtggtttatgtctataatctcagcactttgggaggccaaggtgggaggatagcttgagcctggggattcaggatcagcctgggcaattttgtctctacagaaaaaaaacattaaaaattagctggtcatggtggtgcatgcctgtagtcccagctactcaggaggctgaggcaggaggacttcttgagcccaggaattcaagattgcagtgacctatgatcacaccactgcactctagcccgggtaacagtaaaagaccccacctcaatgaataaatacataaaataaaataaaacaacaccgagacacattttaatcaaatttcttgaaaacagtgataaggagaagattttaaaatcaactagaggaaaagggtacatcaccaaaactactgataataagcaataaagaatgaatctcaaaaagagtttgctgcctaaaataaattagaaataagatactatgtgattccatttatatgaagatacagagcaggtaacactacctatggtgatagatttcagaataatggccatctttggcaagagtggggagattctattgggggaagagacatcaaataactttctacaatgatggaaatgtttactgccttgagatgggtatgcatttcactagtttatacacttgtctttactcattggcgtatcccttaagatctgtagaatgcgtgtgtactcttcatcagtgaaaagcaatccaagaaaaaaacgaagagttcaaatgtggtaaggatctgggggagggcctaattattgttttttctgggtgagtagaggaatcttccagcaaaaagatctgtcctcttgatttcagtaattgttaacacttgggcataacttggaaaaagaggaggagagggaagaatagttgggtaatgtaaaaatagatagttctgaacctatttgttattcaatctagtacatccttgagatcagaataaccatcctgactgtggttactaaaagttacctcttggtgggaacagggcctgaacaaaatcattgaaggactctggtgttgtctcagtgtattagtccgttcagacatacctgagactgggtaatttacaaaggaaagaggtttaatggactcacagttccatatggctgggaaggcctcacaatcatggaagaagacaaaggaggagcaaagacacatcttacacggcggcaggcaagagagcatgttccctttataaagagaactgccctttataaaaccatcggatctggtgagatttattcactatcatgagaacagtatgggaaaaacctgcccccgtgattcaattgcctcccacagggtccctcccacaacacatgaggactacgggaactacaattcaagataagacttgggtggggatgctgccaaaccatatcactcagtttttccttccttgccctgccccacagccaatcaatgatcaagacctgcttttttcctcctaaggttgaataactttatgagaatgtttctgtatgatgtttaaaagcaacttcttatttgctttccacacattgattttgccttttttttttttttttttttttttgcttattctcctagacagtattcctggcctcagcattttaattttaattgacatctattgggccctctaagcatgatgggcagtatctcagtttctgcagagaaacccaaaagcccagtcctcaagtaaaatagaagacaagacaagtaagtgcagttaatatcaataatcgcaggagcactgcctcaagctgtgttttagagggaaggggctaaatggttgggtgtaggggaggcctggggagagcgggcaggaggccagccacggacaggcctgagacaggatcagacagccagtgtgccagggagctgaagaggactctgtggactcaagaagggccctaaaagaggagtggtgaggtgttcaggagggcaagaggcagaggagctcctcaaagcctgggaggaggataggggaattgactctgatgtcaatagggaccttgagcctatgagaggcaaaaatgaagatggtgaagaaggatgaagggcttccctgtggtaatcaacagggccctggcacaaacacttctgacaacacgcttctgtgtgacaatgatgaatgtctgtagactttagaaagggttgagaatttttggggtccagcagagaagatattatgaggaaagaagagccatctgcctccccatcatgttaccaaggctgttcactttccaatagcagatgtctgacaaaggcaagttgtttctgtcttcttagctcacagtctctgcctcctcagccctgcagcgttaacaagcaaaactgtgcttagcagagctttgtaattatggccttcatgtacataagcctgactctgtagaccacaacagcagaaaaatccaaagcctggtgacgtcatgtgctacctggccccacctcaacctgggctgttccttggaggtgcactcaggagggagccacccgccctgctgggctccgaggtgaccaggctgtctgctgctgctggctggggcccatcctcctctgctctgacagcccagacgccttcactgagcacctcctggctactgacgttgctttaggagcttgagtctgagaagccatggagatcaacagagcctaggctgctggagcttacagccctgggggtaggggaagagggcacgacagacacaaaaggagccaataaacccacaaataattccaaactgtgatggaggatgtggaagagagtggcagaagagatggatgcagggcgatcttccagaagccaccagtaagaaggaaccaggtgcactggttggaggagtcccaggcaggaaggagcttggctctggcactgagagaaaggagccgtgattggagcccagcgggcaggggtgagaggctcagagcagccagggaagtcaggcagagcctcgtgggagtttgggttttaatattcctggaggcttttaagcagggggctagcaggacccggtttacactttgtgaggtgcctgggaccaagtgtgaagaatggatcatctgggagagtgggtcagaagctggggagccactgcaggttttggaggggcgcaggcagtgagatgaaagggcaagatgcatggagaagccagtgggaagtggacttgggccctctgggaggtggacttgaggtgggacacggaggcagggacagggacgactgcagagaaactaagtaagagcaagaggcaggtctgagacagcaggagacagccaggaggagctgagcttggaggagagggccccagagtggtgctgcttagagtcattcccatacggatggtgtttaaagctttggggctagacaaggcccccagggacagaaatgggcagggcagggcaggaaggtggagctcaagttctccactggtttcgcagctctccggcccctgtggaggggaggtcccactctgggcaaatcacgtgggggtggcctctgccaggaggcacccattgctctgcagcctttggggtccgtagctctgtctaaacaggccttaagtatgctaagagtcgtcggctggcaatcggtgcaacgtggggtaacacaccgtaagtgccactttctccccatccattcattcattcataagcctaatgagctgggtccctaccacagaatgcagcttccctcatgagggctgggccgtggccccacccagagggcacggcacaaaggttcagaaccaacatgccaccagtgtcttttctgctccttccagggaactgccttttctctgaaagctccctaaatagcttgagtgaaattccctggaagaagtcggctagacagcaggcccagtgcctggctctgtcgctcttctttctctttgtgcgtttttaactttgacagatactgccttcgggacaagcgagccctcttctacatcccccagacaggcgccttatcccctcctctttccagaggaggccaccaggcccagcgacctcacagctctcccagcttcctcgcaccagaagcgcacggggtgccctgcgtgtcccacacctgctgcaagaccagggcgagtccctagtcaggccacttcctggtgcacagggatagggcagggagaggcagggccttgcctttgctctccaccaggtgtgagtgcctgccataccttgaccctctgtctacgcacctgggtcccggcggagtggctgggccaggcctccccggaaggggcaccagccttgagtaaacggatgcccacagtgtctgggtgctcccagggcagggccgcagggcctcagggccatacccgcctcgcaggtggggcgggcgccctggatgcgctccccgcgccgggcaccaggcgtcgcccccgctcctcgcagcgcccaggcccccgcccccgccgcggagccacagccggagctggagccgaggcggcggcgggacgcggccggccggacaaatttcctgctaggctgcggacagcgggcggcaggagccggcgcgagcggcttcaggaacccacggcctctgcgcgtccccgcgacccttcttcgcgcccggcgaagacagccgggcgccccggagggcggcgggcaggcgcccgggagatgcggagcctccgctgcagcgcgatctgcgcgaccagaccggcccccccgaggtgagcgcgcgtgcggacagggaccctgcgcccctgtggggaactgtgcaccccgggaggcccaagcaggccggggcgctgcctcggccgctgccgcgggagggaggggccgctccggggctcagagtccggaccccggccccgccgcccccgcggcgcgcccagtaccagcggctggggcccgtacgacccccgaccccggcctgtggcgcgtcccctcacccggagtccccagcccaacttggcgaccacagtggcagtgctcacgctccctctcggtaaacaggaggagggcgcgcgtgtctgcgggtggctacagtgcgcgggggccggcggcagggcggcgtacgtgaaagcgggcgacacagagagggggtgcaggccgcgcgtggggggctgcgcccactcgaggctggaggctggagcctttgaagaaagtggctcgagttgtgccaactctgggaggggccggcgctctgccaggatgctgccccgcagccgggcgggcgcccgcgccttcccagggaggcaggtggagcgggatgcagcagccgccgggggtcggagatgcggcagggagaccctggcaggtggtccaggctggactgccgcgatttgcagggtcgacgacctcacagggctcctgagcacagatgcgagcgcggtgccaattctgagagctcccgggaccatctggggaaggccgggcaacccacaggatggggaggcagagccaagccggatggagaccgcgctggacctgacctaaattccttccaggcatgcaaacctttccagaaagattaggcaattatacttgcagaattatgatattggtttgtcttgagtcgtgaccattccatcagagtttcaatccaggaaactcaaagaaagaatacagctctctgcttgtattttagagtgaatgagcgtataggtgagttgaatgaacaccagcaaagagtgatcacgtgatacagaaattactgtgtccatgtccagtcagctctgcatttggccccaggtaccccttgacccagggcgtctggaggtctttgtgtcccaaagatggatgaagttctgcctctgcacactaacgactcttgtccatttaaactgtgtgtatgtgggtggggagggggggtgtggagggtcgtttccaaaactgggataatggccagaggagggcatgaaatggtgggggccagtggctggggcaagcgtctgaccaccacggtcactcagccagcatggtatgggcagagctctgtggtgtgaacagggttagggtctgtactttccaagcacaggctcttggcatttggggagcaaaaggtcagaggcgaggtggagcaggcccaagaggtgggggctgcgctgtcagtgagagaggcctgacgtaccacccagcccttcccagacaaggctctgcccctgaatctgaccttgggggccaagatttttgttcattgatgttggtgatgcctgtgagtcaccaccgccccctccctaccccaacagaccgttcccatgtggacaagagctaggagctagatttgtctctgtaaaaggtcaggtcactggatgtgtccagatggcttgggacttagtcacacactccctcatcagttccagtcaaaccagttgagggaagtcgatgagggtgttattgtctttacgtgtgatgcttcttggaggccctgtgtggacacaaagtgaggacaatgcggaaagtcacacagaggccacctctcatttctgtgggggacagctggcagagagagatgcgctccctgtgtcagcaccgccacctccacggaagcctggaggaggtcctgaagcactgtgccctgatgggagccccctcttctccagggatgcgtgtgtgcaaaccattgcccctgagagtagatgcggctgtgtgtgtacatccttgcccctgagaagagaggtggctgtgtgtgcaaatcttgcccccaaaccccaagagaagatgcattcacagtgggggtgatggtagatgcatcagtttcaactggtgaaagtatgcttctcccagctgtgcctcagtgggtccactgtgctccatctgcaccaccattagcctagtctaaggtgcaccgctgatcaatattccctccctgaaggccagaggtgtgtttctaggcccggccactcctctgtagttctcctccgcagctgcccacttgacatttctccctgggatatcaaatgccccttgactcaatgcgtcaaaatcaaacttgtgatctcccctccccttccagtactttcccagtgttgtctttatccatccaattccaccagcctccatgttgcttctgaaatgtatgccagactatagtttctgtgaagagagggcaatactgtatctccagtgcccagccatgtgcctaccagtggagccttgaggactactgtccatggataaacaacttggaagtgagaccttcccgaagcgcatgtgctgatggagcaagtgtgtgtctgttgcgtggatgttgtatggttgataggcagccacacatttttgccgatgtggatgggcatggtccatccagggctcatgtggccagcccttctggagatgctggactcacctgctaaaatgactgctggcttggaccagagacaccccaagtgacctcccagggaggcaggcttgggagcagggagggaacaggatcgaagctgccccgtattcccttgctagacaagtctttttcatttataacatttgagtcaccctcacagaagttctgttgccaaagcaggaatgaatgtatccattagggtaaagactggccttcttaatatttgaatatcacttgggaagaaaactacagttctaagaacatctctagtttttcttttggctttcttcctactgacccaatggctttgtcttccataaagctcccaaagctttccagatcccaagactcagctccctgctctcagcctccttcccctttatttccatcttaggaactcctacccatacctcaaggcccacctcaaaagtctcagtctccacaaagccttcctggctcccctacctgagaggaatctctcttactcttggttccatagaacgttatttctgcctgtcctaaagcacttactggacttgactttgatttccagttcacttgctcaagtagtttatctcctccactaggcagccagtgctttaagggtggagggtgtgtctctgagagcatgtactttgggttcagtcagtcaagttctgactctggtgtgaccttggctaaatgactcaaaatgcaggcttcagtgttctctagaatgggagtaatcatcgctacttcccagggctgctgctgtgagggggacataggatacatataattgacaggccgcttggctggtatgcagtaaactgtggttatctttcccctacaacatctaatgctgtgcattgcacatgtaagaatcagtgaagtttgaggccgggtgcaatggttcacacctgtaatcccagcactttgggaggctgaagcacgcagatcacttgaggccaggaattccagaccggcataggcaacatgatggaactctgtaccaaaaacacaaaaaaattagatgggcatggtggtgcacacctgtagtcccagctactcaggaggctgaggtgagagaaacatctgagcctgggaggtcagggctgcagtgagccatgttcacacaactgcactccagcctggttgacagagaaagaccctgtcatggaaaaaaaaagaatcaatgaagtttgaatgaatacatgaaccaagccaaaaaccatacaaatagatagataccttttgtgcatcatccagatcagtaggtcaaatcagtgtggtgtggcatgccagataatttttgcatggcaatctaaatgattattatgtaaattttgcgtgattaagtattttaatcccataatgttatcacttaccatgaaggcattcattcttcaatatgcaccattgactccagtgatcgatgaggcagaaatgcaacttgctgtgcacattaaccaggctcgtggcctgaattaaaccaggctgggtgtgaggcactgcaaaagcaaacgaaacccacccctgagaagcagtgtggcctagaatcaggtgtctggaatcagggtaagagagcagcttctagaccagaacataaagctaggaagctgtggcctaccctagaaactctcagaacttcactttgcttatccaaagaaaggggctgtcctgggccatctctgggcccctcacagctgctgcacttccgcccgatttcaccccttccccaccactgggcaggaagggctgctgactccgtacaaggctggatcccaggcagggaggcctcctgtttcttggctcagcatttgggccacgtgtctctctgctctggacaccaaatctagagagagtgaggagaggcccgtgggtacatgtagcgtgctgccaattttaggtactggccctagacatatcaagagtttattttggaggattaacttctcattattttgtcactaggatttttttttttcaccaaaagcagagtgctggatgatattttagatggctgggattttagatcagccatacctgaggcaataagagttggtcgaatgttaccaatccttgagcagacacagatgagcagttgcggggtcgttcgctgctggatgtgggctaggagacccctggtttggggattatgaaggcagcctccttttcttccctgggctctggctgctgttttcccagtcatacccatcatggtctgccctgtccaggtgttccatgtggggagtattgatgtggtgcccagcctttgaactgttaacaacaccctgctcacagccagaaatgtgggccccacatctttctttcaactgtatgaatacttcagaggctttgattgagcttaagaaatacaaattcttaacaatatatttcagaaaaataaacatatccttttatattgattcccaatgaaataggggccagataaaatattttaaaagggcatctgtttttaaaaatatctttcaaatgcaatcaagaatgttcagttaatccggtccattatgtatattgtaacaagtaacaaaaggggcagagaaatctttctcccaaaaacaaatataaagtccagcagggagtagggaaatgtttgaagaaaaaaaaaagattcttagttatgtgctaaaaaccaaacgtgttttgggcaggtgctttgatgttagtgtttgttgggtggagagtaaagaattgataggaaaacttgtttggatcccaggtctgggtgccagctacactacatttgatccaatggaagggctagcatgggaacaatagcatttggtgtgagcgccctgggcaggtacatgactctgtcgtcagctcccagggatggacagccagtcccacaatgcctggagctcagagctcactctgtgcatgtatgtgacatggagagatggatggatgaaggtaatagaactgagtaggagcctgtccaggtagcagtggaggaggccaagtggcggaggccttccctgccatgattttactctgtctgaataccagcagcaagtggaagccacggggctttattttcaagggaggtgacacagcctggggctcagggaaaggacttaggagcagaatgactgggatcagatgggggcccatgagactgaggctctggacaaggcaagggacttcccctggcccagtgtgagcccaagtctttacggtggggagcatgatgccgccaaggcagctgcacggggatcggtggaggtggtacgcagaggcctggccccatgatcaccaaagggccagcggtctcacacaaggcaagggcccaggggaccggaatcaaaggcctgagatgatgtgagccctgacttctcctctgccacagtcgctttgtcctcaaggcaagtcatttaattcctattcaataaatgcacaaacataatttttggttattaatgtccctaaatctgtttggacatttccagctgaacattagtcaccagttttgtactagagagaaaattagttccatctttcttctcaactgagatttttaaatgtcctatcacatagctacttgattacagtgtattattttaaatgacctctgtactaagtccttttattttggcgtcctctcactccagaaggacttggcattggcatttttcaggctgtgtctccacagtaggactttcataggtctgcggtgcagactggtttgctgtccacaggcttggccctgactcctcggctaacatgcacaagggcgctctgagggtcgggaacgcacccaccaagcacagcccagacgaaatggaagctcctgtccaggcaggttcccggtgaaactctagggagctccagccttcctttcttctccagtttattaagaggctggcctcagaggtggacacctacttccacaatttgatgtccgaccctgggactctcctctttaccctgcccccacctcatccaccagccttttggtctgaaatccttgtcatggggtaaagctttttattctgttgttggaaacacagtatatggtttggctgtgtgtcccctccaaatctcatgttgaaatgtggtccccagcgttggaggtagggcctggtaggaggtattggatcatgggggcaggtacctcatgattactagcgccatccctttagtgatgagtgagttcttgctcagctagttcacatgatatctggtcattttaaagaatgtggcaccccccacccactctctctcttgttcccactctcactgtgtggcatgctggctccctccctctgccttgattggaagcttcctgagcctcacctgaagcaggtgccagcattatgctttgtgcacagcctgcagaaccatcagccaattaaacctcatttccttataaattacccagcgtcaggtattcctttattgcaatgcaagaacagactgacacacacagcacaggtggaaatacaggctttgcggacaccggtggcctgtttttctgacactatcatacttcccaggataggctctactcttaactcttctaaccccatccacttgttataaaacacactttcagaaaaaggctaggttgttactgaggtaacatgggatggatctttggaggtgggaaggcctccagcctcctctggggaagacaaagtaaatcctccctatggaattctccagcttgttttcttgattccagagagacctgctagtgaattcaactaacaggttggttttcagcacagaatatttcctacagatgtcggtgtttctttccaaatccttcctctcttcagggcgctttcccactgttctagacgtaggagagaaagcacttctcagatggtgagcttttatcttccaatcttgtcaaccgaggagacctggaagttccctttcaacctggaatgtgagccctgcttgctgggcacgagataaggaccaaggattgacccaggacaatttcagagagcacaggggtggcatatcctcatgtcagggcgtggagctaatattcagacccaaacactctgaatctctgaagcagaagctctcttaaaattcctggggaggaaatcagtatgaattaataaaaagcctgaatattgtggatttttattaaattcgaggatttatagtaactcaatccaggccaacaaaacgttgccttccggtacttactttaatgaatagaaagcatgtaaatgctcttccaaagagaataacacattttagcatcttaaatatgtaaaaataaaactcctgtacaatcctagttgcactaggaagtctacttatcaaaaaaagaaacttctgtttccagccacattatttcaaatcatcccaaaacttacattgttactagtaaaatttttcattgtgattaacactttttttccagtatggttttcctctttctgaaagcaaccttagtttcataaacagttggacatttaagtactggtcaaaaaagtactctgaaccagtaacctcgtccttaattttgaactgctgttgactaagcgctctcttttcctaagctcatagcagcccttcgttcagtgcttcagtaattcaataaattactttttgccaaggttgcaaacatcagctaaagttcagtcatctactggagatgttatcagtctgtccatttaaattcttttgcgcaaagtccagatttggacccaaagtaatataaaaatgcaagagccagaaatttaataattttgtactgtgttgtgccaagccaggcctattcttagctagccaacaacattctttcaaaggatattttttggttttcatcaaatgtaaatagtgtttaagagtctgtaatatcatttagaaggaacaaatggaagtattaaacctttattgactacctacagtatatagaggatctataacttatgatggttttattatagtttctcaaccttacaatgggtttattgggcattgggtacattttaaacttatgatatattctatttacaaggggttcatcaggatatgacctcactgtaagcccaggagcatccgtacgtacaagcactgtgcttagcgctggagttacagggaaaaaaaaaaaaaaaggcacgatggcttgtgacatcctgtggatgctccaggtccacaggaagacagaactcacttccagggagtgttaaatgtgatgctggatgctcctgtggaggaggggagacatggaagggcctccccaggtagagcagtgacgtggtctggctctgtgtccccacccaaatctcatcttgaattgtaatccaaatagtaatccccacatgttgggggagggaccttgtaggaggtgattagatcatgagggtggtttcccccatgctgttctcatgatagtgagtgagttctcatgagatctgatggttttataaggggctcttcccccttcacttcactgtgcacttcactgtgcacttctccttcctgtcgccttgtgaagaaggtgccttgcttccccttccaccatgattgtcagtttcctgaggcctccccagccatgctgaactgtgagtcaattaaacctctttcctttataaattacccagtcttaggcagttctttatagcagtatgaaaacagactaatacaagcaggcttggtttactgggccatttcctaggcagctgacagggattgagcattccagacagaggggctaccatgtgcttgcctggcagtaggaagcggtgtgtcctgtctggggaagagcaggtgtctgcatggagctggagcccagggacagaggggatgggacaaaaaggtggaaagtttaaggatcacccaaacatttgtacaccatccaggagtctggattctgtgtgacggaccagcagttcttaccgtgtcttaaattatgaccccctttgtgattctagggaagactatggactcattctccagaaaaacgcatgtgtgcacacagtcatttgtatagtttcagcaagtctttcctaacacccctccccccatcctgaggctcacaggttccaggtgtgtcccctttgtgcggcctggccagccccacagagcccagcagcatgctcagctgtgagtttgagaaggggtcccctgctggctgtgtgtggaaagccagaatggaggtgacgggggaaaccgactcagcaggttggatttataggcaacatgaccatgtgggtgagaggatgagagtgagaaccaaggccccgcagttttcggccagggtgactggatgcatccggaccagacacaggcttacgagatgatggtgcgcccagggtgtgagctgagtttgagggtgccagagggggaagccgctccaacatgtggaatccaagcagctgattccagcagggagggtctgtccaaagggaagcgaagagagtttttcagcatgaaactgatggtgccaatgtttgtgcttcactgcgctaaactgtcatctttctgttaaatttggcttacagggccaggtgcagtggctcatgcctgtaatcccaacactttgggaagctgaggttggaggattgcttgaggctaggagtttgagaccagtctgggcgacatagtgatactgtctctaaaaaatattagccaggcatgatggtgcatgcctgtagtcccagttgctccgggggctaaggcaggaggatcacttgagcccaggaggtcgaggctgccatgatcatgccactgtactccagccttggtgacagagcgagaacctgtctcaaaaaaattttttttattttgaaaattgggttacactgtacattcttagggtctagacaatattcctaataaaatgccatgtaggctgggcacggtggctcacacctgtaatcccagcattttgtgaggccaaggtaggtggatcacatgaggtcaggagttcacaactagccgggccaacatagtgaaaccccatctctactaaaaatacaaaaattagctgagcacgctggcacgcacctgtaatcccagctacttgggaggctgagacaggagaatcgcttgaacccatgacacagaggttgcagtgagctgagatcacaccactgcactcagcctgggtgacagagtgagacaccatctcaaaaaaaaagccatataatgatggttgttgtcatcagagaagtcggctcacagggggtgatgtctcctgctcccacttacaaagtaggtgagaatgatctcgagaagctccatgaggtgaccctcagcctctgatggggacaaacaggagtcaccctgctctctctctggctcccatgactcttatctaaagacctcaggctggcttggagcaccccctttaaacttcctttaaaaaaggagaaaatcggcctggtgcagtggctcacgcctgtaataccatcacttttggaggccgaggtggccagatcaggaggtcaggagatcaagaccatcctggctaacacggtgaaaccccatctctactaaaaacacacaaaaaatagcccagcatggtggtgggcgcctgtagtcccagctactcaggaagctgaggcaggagaatggcatgaacccgggaggcggagcttgcagtgagccgagatcacgccactgcactccagcctgggcgacagagcgagactccatctcaaaaaaaaaaaaaaagagagaaaatctatatggaagaaatgaaaattattgaaggagcttggggaaaaggctgaaagaatcttggctgttcatgcaaaccaagtcccagggctggcttcatggctgttgggcaacccctgcccagtcagcatcctggcagttgtcactttggcagagtcggaggacagacacacaatgacagcaagagcaaaggcagggcctgcccgcgaggaagagccacggctgttgagcgtggatgtgtatttctcaaggagtatgaaggagtctttttgcaaaattgcaaagaactggcctgactgggaagtgcaagagttatcttcccttcagggaagagggaagtttaactggggcctccttgggctggaacacatctcaaagtcatggttcttggaaacccagggtgcatttatggacaagtctattataggagttgtaggtgtatcttgaagatgcaaaaattcattttgtacctttattttacacatcagaccttacccaggtaccattctgtgctgggcagtgcctaggactgaggcagatttggctccattggtgtgcccaggaaatggacttcattgcacactgaaggaccagcccttcaatgcattgtcttcaaataaaaatgaaaatttcactcatttctggtgattttctcaataacctttctcataggtttgaatataactagaaacataatttttgtccaagtctttcagttcaccaaaaaccaaagttaaattctacccttgcgctttagatgttaacaatttgagaagtttggcgaacaattccatctccttatttagagccagagctggaggccagctgcagatgaggaaagggagacttgcccaggggcacgctgcctgctcctgccacccgtgggctgccttcttcctgttctgttctgtgctgcctctagtggactgaccccttatccctccttcctgtgcctgcaacacggcttatggtgctgggcctcaggaaatggaggtccctcatctgcatccataagaagaaagcccgggttattcatctgtttagacagaagtgcactccaacctttagcaggatctgaaggtgagaagctatgacttcattactgtgcatccatcttttgtctgcttggccctagtcctctgggtgtggtttccgcctggcaaattacttccaggagatgcttgagaaggcagtagcgtgtggaaacatcttatgtgcagcatgcttttgtttacaaatgatttattattggttatgtcaaaatacacatcctgaatgaatgggcagtgctgggtagaaatcagtgacatcaatcgtggttattttacttagcagtggattttttttttttccttttcagtgtagtagtaatttgtaaatgctttatggaggttatgctttctttagtggcttggcatcttggaaattggagcagccaggctcggcgtgctgtgtccatttttagccctagcaggcaggaagtgtggccatgctctctcagggtaactgctgcgagtttgtggctagaatgatgttgggtgggagttactcaactgtttgaatgcaatgggcttagctaatggtaagaaagtgcgtggagcctgggaagcaattgatagctggttaccctgagctcagcctctagtaacaaatgacacaaggcatttgtgaaggctggaaagcctccgtgagaagagcaccttgagtcccactgggaaggggcagccccttggagcatgaggggtctcttgctgcctctgctttgggtctggctgagggtccactttgctccctgaccccagccagggtaccagttcccagattgctggtgggtgtgtgacagctcatgtggccaagcaccctgccctgcttcttcaaagctcctaggtgggggagtcccagtggcagggcagagggaccaacccccatggctgactcagctgtagtccacccagattgcatttatgggtaagtctactagaggcactgtacctgagcctggggcaacccttcttctttcgtggacttccctggtctctccaggacgtttcagtgcaaatgcagctgtgtgataccaccccatacactggcggggctgaagggaggttgggttccgtatcagtcagggaccttagggatgcacgagatggaaatatgactcaagttcagtcaagttcataggggcgttgacttacaaaactgaaagctcaggtacaactggatccacatggccagatgttgccaccaaggccctggctctctctcatatgtgctctgacagactcagtcctgtggggcctccagcaaactcacattctgtcttccctgtgtaaggagagggcgtttccctacagatcaacccagacatgagtctccttggctctgacgagccaggcttggataactggcccaacctcaaagcttcctcggtgtctggggcttgccctgttctgataatccaggcttgggccctctgtcttcccaggggccagaggtggaaacacagctcctttggcaagtgtcctattttcagtgggggtccagggcaataaatgaaatactcgttacgataataccagcgatcactggtgttgagggtgcacttgctgagtgccagccagatcctgctctaagcacttggacatgttaactcggtcagtgctcacagctgcaaaaccaggtgagggcagcaattagtgcatttttgacagaaggaactggaggcccagatagggtagcagcagggcagggatttgaaaagggattgagaccaataatccccaagacggaggagtgatgcctatgtgtggaagcaggggccacacggctgctggggatggggtgggaagaggcgtcctgtggcctccaggctcactcagggagcagtcagatggaaggccggggtagacacctggacctgcctgggaagggctttagaatcacaggagggacgtgagctccatcttgaactgggggaggtgatgccagggatgtggacgtctatagggactgggctgggggcacagagctgggggccaggagaggctcactgagctgttgcccagcagggctgtgcctcagagtcacaggggaggttcccgagagcctcctgcttggaccctgctctcatgattggctccaagttctacagtgaggccagggcagctgcattttttacaaagctcccccaggaaattccaagtgtggccagggtggagaatgccagggtcttctgtagggtcccagaatgaggtcaggactttcttcaatgcagagggcaggaggggagtccaggaggaatggacagggtgctgtggctcagggtgccggtggaaggcaggcatcgatgctgagtctgaagccctgtgctgggcaggaactttgctcttgcaggaagtgaaactgctggaggaaattgctaaaggaaagcaatggaatagactaatccatgacaagttgttagtgaattcatgaagtccaattttaagagctgctttttgaaagaaggctactggagaaaggctaactaaataaacaagttgctgatgttgggatgtcaggcagctgagctgacagagatcactcccagcagccctgaagccacaggagccaccacacatggtcatttacacagttccattcattcattcactgtctcaagttcatttaacacatgtgaatggaaggccttctggtgctgagactccaatggtgaacaaaacccataggtgcccttgcattctttgccgccggacacctaacctgaatctgggggtcctgtgggaggcagtcccgtaaggggctgtctgtgcggagctcagccctgctctggagactccgtggggcaagggggccagggggccatcgagggccgctctgaggtccttgtgttgtccgtgtgggattgagaaggcctcatgccaggagctgtgctcttctcttccaggtgggccggggccatgtgtattcattaggggcctgtcatccaagtgggcacttaggacaaagtggttgcccagctctctgctccacagaaccccatctgccacacatgataccacttttgctaggccttcttctaaagagttccactgaacccgtaagagatgtgtgttcctgccactctgttcccagccacaacatagaaaggggactgaactctataccaaggtgggtgggctgagagccccaggcacagcggcttctgtcgggccatttctgcccaggttcctttctctggctccctccctgctcccatcttccctccccctctgccctctctggcttttcccatcctcagcttcatctcttaggacctcgtcttccagaaccccagacccagccaagctcggcctccctcaggccttcagctagtgacctcagcattggtggagggactgctctgaccccagacccagcccttagtggcaacagtggcagctctgtgggcagctgtggctaacttgagcgtctggcggcattcccagcctgcactcctgtcccaggcagaggcctggagagctggtgctcagcccggcatagcggctggcgtgccattcttttgacatgagtaatagcaaagcaagtccaagaaatgtccagtgttttctccctgttgttgcccaatttcaaagagataatccaatcaccttatcaggtgaggggtggggcaggcttcccagaagcagacagagtgtggggacaccctgacctggccccaggagtcttggctatccagagcgagtgctacaagtctgggaagaacctcataatggaatcgcttgcctgttttgatcctgatgtgaaaaccagtttgaattttttttttttttttttttttttgagacggaattttgctctgttgcccaggctgaagtgcagtggcacgaactcggctcaccgcaacctctgcctcccaggttcaagtgattctcccgcctcagcctcctgagtagctgggattacaggcgcccgccaccatgcttggctaatttttgtatttttagtaaggactgggtttcaccacgttggtcaggctggtctcgaactcctgacctcgtgatccacctgcctcagcctcccaaagttttgaattatttttaaaggctccaaggagagcttctgttttgacagaaactctatcaagatatcatccagcccagtgtggagacacaatcttcctttaacacaggattcaaaccacatgcagtttacttccgggtatctctgtcaggatcttgcattcatttcccactgcctgatgtctggttggtggaagctgagacccctgagggatcagaacagatccagggagagctgggagtgctacttttccatgtctggtctgggttttagggagtgatgttcccacagaaggcttaagctggaaaatatccatgatgagtccagggtacatttggtggaggtttaaatactgtgtcaagatgcatacaaataaacttaaccgtggtgcatggcagaagatgtctctgggaaactgagtgaacaagtgaaaggaacacaagagaacaaactcttaagcttttttgtagagaaagagtttgtgctcgaaatagggacaagttacagggtgacaggcatgactgttttcagcagggagggcaagcgaaggtgggtgagcttgtttgttgttgttgttgttttgaaacagagtctccctctgtcacccaggctggagtgcaatggtgcgatctcggctcattgcaaccttcgcctcccggattcaagtgattcttgtgcctcagcctctcgagtagctgggactacaggcgcccaccaccgtgcctggctaatttttgtatttttagtagagacagggttttgccatgttggccaggctgatctcaaattcctgatctcaagatcctacgcctacacctcggcctcccaaagtgctaggaccacaggcatgagccactgcatctggccaggtgagctgttttaagaccacaagatcaggcagacatgggattgtcagcaggatttttaccatcaggtaacagtcaatgtgttcccctccgcccaacttccctcactgtactcaaggaatatctgatgacccaataataaaaacttacaagattaactgagataacccagtttaatgttcaataaggtcccactgggctgcagaatacagaaaaattgacccatataacttggcatttgtatcttttctgcaaagtctcaataatgtataattttaaaatctagaagttatggagcattgaagtagctgagctttctagaaagcggacattgtaatgaataagcaaagcaagaaaacctcagacattggtaccagctctattttaagcagaggcatgtggagctccctgggatacttggaaatgcacattcccaggtactgcagaggctgttcctatgaactatgctaactcaatcttcagcacagtcttctgttttctgagctctagagcaaggttggcaattttgccccatcttacctgcctgaagccagcacacctgagggcttggcttgggctggaagatccacttccatggctggaggatgttggccatggacaggaggccttcagtccttgccagatggacctatccacaggactatgtgtcctgatgatctgggagctggcttcacccagagagagtgatccaggagaaagcaagaaagacgttacagtgtctttaggacctagcctgggaagctgtattctgctgtttctttgacatcctatttgtcacctgatttagccttattccttcaggaaagaatggctggctctttccaaacagtatgtatgggtgagggatcctcattcttttctgaccccgggtggattagttgtggctcctggcaatatcccggatctgactggttaacttagtgagaaagggagcttggcagacggctaccgcagagttctcagaatcaatagtgaagctggagaacaaggctcagaaaacagggaggagcccaggaagctagcagcctgaaccatggtcgaggccaggccacaggaagcttttagtaagaatgtggcctgtggtccacggccactgagcctgctaggcccttccagctgtggcctctgcaacagttccaaagcatccctggggctatcaccctaaagaccaacatcttgggtaggattgatggttggagtctgtgtcaccccctgacaaatcctaactgcttggcggagggaatgtgagtgaacaggaaggacctcccctgggaggtggagcactttggagcagcagctgataggtaaagggcacctcaccagcccacaaaggacaaaaggttaccctgtctatactgagctcaagtgtcatttttggctacaagtatacctggtattacagtattaacatactcctgaaaagttatgttaattggaattgtgctttatatacactgggtaagcttaatacctttcagaagaccatagctaatccttttgtgaagcagctaatctttttagagaacaaatggtcacttcttaactatttctttcaagattaggagtctattgtgttttctcaaggcagagtagccagtgtttaagttttcccttttgctcacggtgaggaaatgttactttatagaaagctgcttgcagcctctcatgcagaatgaaaaaacaatgagtttttttccttcattttaaatctccactgtaatcaactgtcttttgcaaggagtacagattgttgaaaattttaaagagcatgtatgatttcattcttaccagcaaggctgttttaatatgagcatattttaaaactaagaatggcaggatctgaatgagcaaagaagcaggcgctgtgagttgttctgcggcaaagcacatttggacattcacctccaacatttctgtttttcttctgtgaggagctttgagactatatatagtggaggtattttgttcggtttcctagagttgctttcacatttcctggataacagcatgccgggagaggaggctgggaggctggctggtgtgggcgtgaggagcaagcctgagaggtttagactctgctccaccaggtctagcgacgggctctgtgtgtccgaagtagtcatggtggccacaggaaaggagacgcctagcaggggaggaactagacaggggacgagttgggaagctgctgtcacaatcaaagaccagaggggagaaagaggggaagtgagagagaccaagggaaagagagttgtctttttttttttttttttttttttttgagatagagtcttactctgtcacccaggctggagtgcagtggtgtgatctcagctcactgtaacctctgcctcccaggttcaagcaattctcctgcctcagcctcccaagtagctgggattacaggtgtgcaccaccacacctgactaatttttgtatttttagtagagatggggtttcactgtgttggccaggccagtctcgaactcctgacctcatgatctgccagcctcggcctcccaaagtcctaggattacaagcatgagccactgcgccaggtctctcttaatccaagagtgacaatggcaggtaggtacactggagagtgacaatggcaggcaggtacactggatgccccccacccccccgggggttgggttctcgctcaccattagggagatagcatgttgaacagtagcgtatttctccatatgtctaactcggctactttttcctccagcattggaacacaaaactatcattggctgatgccagatgaagtactggcttgtattcctttaaacaccagaatcctactcaatgtggcaagacactccccatgagagggcatagtgggtaatggtggatccacttagcggggttgagttttctcagttttaatgtatgtaagatgtgggcccatattatggttagcaaaaccaatgctcagagatggaaactaagttgttcagggccatgtaaccagagggtagtagagctgggatcaagccccagtttgtctccccaacccagggcatctctgcagacctgaacagtccccctcctcatggagaggagccttctggagggggtgctgcctgggaattggggcagctagttttgtgccaccttctggaattgcagactgtgatttggaggttgtcacgtctttgagtaaaatacacagctgaagaaaactcagaaagtaacatttttgagtgggtagtttagtcgtatcagtgaaagggaatcactttcttgatttgattgtacttttaaaagagaatactaatacctatttacctggtgcgttttaatgaatgactcattatttattattattgtacagtattgttgaaagcatgatggctttcttttaaacagctttttccatacttcatattgcatttaagtataaaacacagaaatcatcatcgtgttttggctaacacaattgatgcactcttcaaaaactattagagagtatattgatttcctggagataagaaccctgatttgctttttttcttcaagattgtaaattgcattagtggtgaccgtcagatttatagttaaagcaaaacttcaagaggggtaaagtggatgactcacaaacctcccgtcatcagtgttcactgtttacgcttatctggccagcctgtctcatgcagcatccaaacggactttaaaattcctttaatttaacacagaaacgttctctgatgagtttctgttttgtttatctggtcatctctgtgcccttgtttcctgtcctgctccctctttcagtaaatcttgtttgctatcaacaggcctgtgtttgtttccttggagcttggaattcctgagcgggaaggaaatactaggaaacttaatgcagatatgtaattcttttactgttttcaaatgtacagggaccatcggttgaattgatgtatccttccttcttttggaagtgctcagtgccagttcatttccccttttgcatagctttgatggcttaattccacgcacctagacccatgtctcctggatggaggacagattagctgtgctgggttagactcataggcttatctggaatcctgcactcatctacaacgctgattgagtgaacagcaaacatcgtactgtgggtacaaacttggaggtgtttacttggaaatttatatctaccttccaaataacatcttggaaagcacactggtagatgaggcctcattgatgaattcacttagaaaaacatcatagcattcatttttatatcaatcttcattcagcccaatatttgtagctgaacaaaacactgacaacatgtcagacacgaaggccatggtcagttgcctttcacacaggaaaacaaagattagctgtgtagctacggaaagcgaatgtctgttaagtacagaggttgtagttaacagctttatgtattcaatttgtttgcaattgacaacacctcattaattgtaagcccagtgacactgcttgctgtttcaagtcacttttaaattacacacgtgctacttaatcttaaaagcaaaattaaacattggactggtttacatttcaagctacaatatggaaccattgtatttggaggaatgagtttaatatgcattgtaaaataaaattagggggtactttgcattcacagcggcttatgtaattaggttcagtcaactgtaatgtttcaggttaatgtcttccatgatgtatgctgtgtaaatagtgaacttacatatcccttaatacatctgaattattacataaatccttaatattaatataataaagtattttaagcaaattacttggaagtgtgagttgcatggcaagtaggtaaaactgatttatttttaagagatcagcaaagataaacatttcatttatttaacaactacagatatttatcaagtctctacctggtccaggtacagaggacacaaagatctgaaaactatagttaccgccctcaagaatctgctaactgagtgtgacgtttccagagggttccctggaatacggatccccagttccctgttgggcgtaggcaggacagttgggagccacaggctgcagcgggtgggttctcttgagagtttgtgggtagagttcagaaggcctgcaaatctagacggagaaaacatttgcacttttatttccaagtaattggcttcttttgcaatcctacatatcctctatgcctttaaaacattgtttttaggcctggcgtggtggctcacacctgtaatcttagcactttgggaggctgaggcaggcagatcacttgaggtcgggagttggagaccagcctggccaacatggcaaaaccccatctcttctaaaaatataaaaattaaccagatgtgatggtgtatgcctgtaatcccagctacttgggaggctgaggcaggagaattgcttgaacccgagaggcgaggtgaaggttgcagtgagccgagatcacaccattgcactctagcctggacaacagaggcagattccatctcaaaaaaaaaaaaaaaaaaagaaagaaagaaaacaaaagcattgtttttagattttattttttaaattacatgcttggagtaaaagtcactcattttggcgtacagctccatgaattttaacaaatgcagagttgtataaccagtaacactatcgagacatgcacattttaccaccctgcccccgaaaaaaaaaatctgtcatcatgcacctttatgtcagaccctgtaaccccacccctaccctggtatccactgatctattctctatctttgtaattttgccttttctgaaatgtaatatatgtggaattatttatagccttttgagtctggcttctttcacttagcacacggatttaagaaacatccttgtgtgtatcaatagtccattccattttatggctgagtagcattctgttgtatgcatgtagcgcagtttgtttatccatttcccagttgggggacatttgggttgtcttcagtttgaggcacttaatgaataaaatggctataacatgtgcatgtaggtttttgcataaacctaggttttcatttcacatggataagtagataggatgggattgctggctcacatgttaagtgtgtttaactttataagaaacttcccaactactttctgtcatgggttcaccatttgcttttccaccagcagttgctctgcatctttgccaacatttgctattgccagttatttattttttatttatttatttacttttttttttttttgagatggagtctcactctgttgccaggctggagtgcagtggcgcgatatcggctcactgcaacttcagcctcccggattcaagcgattctcctgcctcagcctcccacgtagctgggattacgagcgcgtgccaccacactcagctaatttttgtatttttaatagggacggggtttcgccatgttggtcaggatggtctcaatctcctgacctcgtgatccacccgcctcggccttccaaagtgctgggattgcaggcatgagccaccgtgcccggcccgccagttgttttttcctttgtaagtttttgccatccttacaggtgagtagtagtatttcatgtcagttttaatttgcatttccctagtgactcacagtgtccagtatcttttcaggcccttatttgtatataaagttgtttatctcctttaatagtatctgttcaaatcttttgcctgtttttaaaattgggttgttaatgctatatattttattgtatgcaattaaaagcattattctgatgatatttccctaaatggcccaaaggattcgtgttccagaaaatattaagaacctttgaaagacacactgactttaaaatgttctttacatttttgccttttctcgtgacacgtctactttgctcaaagtccgcctcaaggcagaagctggcctgtgatagaatatttcccaccccatctttctttctttctgtttttcgtatatgaagagggatttccaaatgccaagtgtgggcattcctatgcccccttcccaggagcagcaagccatttctctattctgatttctgaaactctaccgccccctttgcatcgttacccaaatggaaggaatcctaggttgtggggaaaatgtgaactaacatattccagaaaaatgaccccactccaccttaggaattaggagtttttttcttaatgcaggacaaaaatctgattgtgtattttatcatcatttatcatgcacattttattactgtttatctccacaacaccatgggcttgatatatttttctgccttaatctccatttttttcatcaaagcttcccagtagggactcatctcctagcaaaaatggtttttaactatttgggatatttttaaaagacttttgtggacccttttatatggtcagccaagttttgacttagtcatcactcattctttaagtcaagtttcaataccgtcttcaatggttaacgtttcttggaaccataaagcttatttatgatgaatatattaattttattttgcagttcttctattaaggaatataagaaggaatatagggcacagaaagtggttctgtattatttttatttgaattcaacttatgattgtcctcctcgaatcaaaaagaaaaaaacattgaaaaagcaaattacacgcaaagtctatattgaaaattaacatgccgcgttgaagaactctgccatgtgttaattattgatattgttgctttagaattagctttatcgataaatggatgtcctaaattttatatttggcctattgtggccaaatatatgcaaacttacgttaagtgcttatgttttggggtataggagctataaaaaaagattgttcccttccatatgtgtacagttcttctggggaaatgaagacatacacaggtggaacggtaagaacagtggcgaagaagggctgcacggagtttctctccagccttttgcgcatggcacgcaggctcatcattgcagctgcagttttttactctgctttccctgcagcaacagagacaggagggtggagaagggcgcctgtgctcttttgcagctgtgtgtgctcatgccaccctcccactcaacactccctgctcagattcctcacgcagcagtgacaaagtaccactcactcagtggctcaccgtcagagaagcctgggcctggcctggcccagctggttctctgctcatcgtctcacttgacgaagttgacgggctgcagggtcatgtgcctttccagaggctcaggatgaattcactcccaaactcattcaggtattggcagaatgcagttccttgaggttgtaggactgaggtctcagcttccacacaggctgtgggctgggggaggtcctcagagctagaggctgtcccgatgctttagcgggtggctccttcctccatctttaaagcccgccatgtgctcccagtctctctgaccccctttctccctcatctctctggctctcctgctcctcgtctgcctttaagggctcatgtggtaacacagggtgcacccggatgatccaggataatctccctacttacagtcagccgtttagcaaacataatcccatctgcaaagtcccttcacaacggtacctggattactgtttgatggaaaaaaacaggactggaaatcttgggggacatttttggattctgcctaccaccccctccatacacacataaacagcaaaatgacaaaattcaaggctctcctgagtgactgtttgcagcaaagaaagttgtttccatttcagagacaatatgtgctgagataagtttgtgatatttacacatttggtgtttaatcctcgtggactacattatacatatctttaggaatactctttacataaattaagataattttctctttcctgaaaacataacagcatgccacgcgttctggatgaaaatgaggaactgtttacaccatgggcccaattaaactctgcgagaattctgatgtgcgataaaaatgtgctcagatgtatagcatattttaagtttcctaggactttccttgcaagcataatcacaaattaatattaaaaagctatttaattacaatatcaagaatgtatctaaggctccctggcatttaacagagaaagttatgctaaacatacatcattattttcctccatgcagttgtccagggtgacctctcttagctgggattgacaaatccaccccaggtggcagagtggaagagcttggagtttggagttagaaggtctggattgaattttctctttccaggcccctaccgaagtcctgtggtttccctaaacctcgatttccctaatgggcatgataatcctgatttgagatttaatgaagtcatatcaaagaaaatactttgtaacctataaagcacagatgcttgctaaacaactcctgtaaacatacattatcccccttccccccaccccccgcgcacacacacacacacacacacacacacacacaactggtgattgtaactcactcatctctctttcccacagttgttttgaaaacttctgggtttctgaaatgaaggttctttgcagaggacaatcttggaaaaaaagatgaagtttgatttcccttttttctttgcactataggggtgttcactgaggttgcagagcaccaaccatgtctgcagaggagttcacacctcactggtgttcattgtattgcttcaccgttgagagcctgaatgtgaaccttgttgtattaaggtgatattcttgtccttcatgtgttagaatatctatttgctttgaagagagagtcagactccctgccttttgggacatggctttgagatctgcctttcagtaagtaagacgctatcctcaaattgagctgggctacctctctacatgggaaaacctaagtacttcacagaaagctcggtgacggtttgagtttcccagaatgccgcactcatccccaaggataagtcacgtctttgggggatgatggggcttcgacactggacacgtggacactggaccggaagttagaatccagtctcccagccctcaaccccatgctcctttccatggcgaaggaggagaagctcgccgccaccccactggcctgctctgctgaggttgtggagcaccgggaagcaggggccgagccttccccgctctgtgcctgggggctctgggcactgtctacacctgggaggtggtcagcatatgtgcgtgggaacttgctggaaggaaggaatgacccttctagccatggaacggtggtcatccgtgagccacggcctcaggaggtgggttcccttaaggctccggctctgggggcagcgccccctgggagcgtccatttttaagcctgtgaagaaagggctgctgacgtttggggcccccgctatgagcatagcctccactcctccccaatccctgtccgtgcctctacatacctctgtggcatttgcaaacccttttcttagcaggtgctcccatctgtgtttgcccttctctcctcccgtttccatggagaggctggcaccaggacgcgtgactgacagtgctgtctcccccagcagtcccctctgagtctgtcgggtgtgggctccgggctccaccctgcttcttccttagcccgctctctgcccctcccactgcccaggctgccggggcttccagctcccgtggtgcaaacgtggcctttgctggcggcaggatgcggttgcgtcaggagtaagcagagcttttgtgaccaaaatcaaccccggggcatctcaggctctagcgctggtgggcgtgtgagatcatttcagcccaacccacatcccaggcttgaatcccattaccaggggcaaccgatccttcttgtcctttcccagattggtgatggatgtccactgtgtctccatgcagctggccactctgtggacagctgtttgtgactcagctcctcccagcctgagggcatctgggccctgcaactccatcctttgctcccctttcttcccgcggggaccctttcatctccctggcaggaccctgtctccacccgagggcacgttctctgacctcttctgcggagtaccctggcttgatgacgcttcctgttccttcccagggttgtgctgggggcatcagtctttgaacagtccctccctgagggctgccgtgtcccctcagtgcccaggcacatcaagcactgctacaaacccagacattcacagggacccctccacctgaagtccaccataaggtagaagcttccggaaggggtgatgcaaaggggtcaaacatttagactacgcctcagagctgcatgattccttcctctaactgtgaagcaaatacagcgatttctctgggtctgccatcgaggccttcttccctctgctctcacctcaggtgccttcctaatgtgcaggtgacgattgcctctgagctcaggcatgcagcttctgggatgcactctcctttcacggcaaagcattctgcataggaaaaaccgtctctgcgtctccaagctgtggcctagcccttcattcatcaaatgggatacaactttcatttcttattaaaatctggaagtcactctccatttgtaagatatcccaggggttgatgtcatcttgtaaagggggacagtgccattttctatcttacactttaaaaagacaaaaccactagctacaaacatcattcaccacagcatgggagaggcaaccccacagcaaaggttatgtcatgtttcataaatgggtatggatttgggggctggtttttttaataaaaacatattttggtactttggaacttgacataatttgagctgtttatgttgtagatgttatgaatagatgttatggtattaattaatagtgtgtattttctatgtctgggcttgcctggaccgctggtccttgcctttctttctgacacagaatttccagggcctcaacctgcttctgtctggaagtgacagcccactccacaggggtcttcagataggggtagaaggtggtgccctgggctctcctggctctagagaatctggctctagaatcacgaagccttccagcatccccagcttcccccttgcagtaatcccataagggaagcgttgtcccattttacagagagtccgtggggctgagaggtgtcatgaattattctaatggtagtaactctattggagaggctgaaacccggggctcgtggatgttgtgacccaccccccaccagaacctcccatcctgactcactgaatatttagtaccatcgtcccctggaggatggtctagttggcaagtagctgaggatttttaattctaatttagtttaaacatggctgtttgttgctgttgctctctaaagggccttattaaagactcttgctgcagtgaaggtggcctgtctaggaatcgatatggatgttgagatctgagactctacaacacccccaatctcagtccttctcgctccataggcagttccattccctgcagatctaactctgagattctcactcctgaaaatgcctggacaataaataaatccaaggtgaaggtgttgatgccagtgacctagctgcatcattttattcatggcatcaagccttcaagaatgtggcttaacttgtatttattcacatgataatggctttttataaatctgcatctcttcctcccctaggaagaaaaaaagggcatctcttcatgagtcacttgattaaaattcctctccagtactctgtaccatccactcatactggaattgttgaaaatcaggtgatttgcaactccacacttgcccaaattaaaccatgagtggaattgacaatatgaatcctgaattttctgagctggaaggaggttctagtgattacccacaccagggatggcattttacacatgaagaaacagaggccccagggttgtttctgatccaggtaggatcaatatctcggtagagaaaagggggaatttttttgcttatactttttaaaataagctacttgtggctgggcgtggtggctcatgcctgtaatcccagcactttgggaggtcaaggcaggcagatcacttgaggtcaggagtttgagaccagcctggccaacatggtgaaaccccatctctactaaaaatacaaaaattagatgggcgtggtggcacatgcctgtaattacagctacttgggaggctgaggtggaaggatcgcttgaacccaggaggctgaggttgcagtgagctgagatcacaccactgccctcaagcctgggaggcaaagcgagactctgtcttaaaaaaataaaagtaaaataagctactcgtaaggggtgtgtgtgtgtgtgtgtacatgcatgtgtgtaatctctgtggcgtgtgacctggatatattcataaaggtgtaagaataattcaagtaggtaacgctctctcacattttttaaaaaaagaaagaaggaaaatatttattccttatatttcaggatggcagtcaattagggtgtgatgtgacttaaaggtcacaggagaccttgcctcttgccaagtgctgccacgactgtgtggaaaatctcttgtgtactggggacccagtttctttcctgtgaagggagttgacagaaataaaaaagatcactgaatgagataatcgttgtaaaggagccagcatagcagccccttaattagggggagtgtgctgtgtcactgaaacactctttgtttccaatcagggagctctcactgatcagtcaggactctaattgttggatagagtcaacaattagaaaaaaagttatagtctcctaggagacatagacaagtgagctgacagggtgggctcagctcaccctgtcccagcaccttgggaggagtgtcaaggcaaacgacaggcagctgggtgcagtggtgtgagcctgtgattcctgctacttaggaggctgaggtgggaggatcgcttgagcctgtgagtacaaggctagcttgggcaattttggggagacagaataaacaaaaattgactttttttaaaaaataagtttgtattttcttcaattcaaaacatttttagaattgatattactttttatagctttaaggcatatttcacatcgatattacttcttaatatatatatttttttgctacagatttggagtgtgtaaattgataaaattagtatcaatgctattgtaactacctggaattggttaaatagcagcagtgccagtcacctttcttagagtagagattgccagcaggcaatatcttcatcctcaggacccaggtctctcttctctgaccctgcctggaccctgacaatcccagggcgctctgcgttggaatcagtttggatgtgtgttaccagatcttcgctgaagcagggcactctgcattggagtaaatttggatgtgtgttaccagatcttcgctgaagaacgcaaggaacccagcatgcaaagctggccactacagttacatttttccctccctttgaaaaaaattttatgaatgcctttctgaacaaagaatatgaactaaccctcatcattcattacatttaaatagcataacatgccattgaaatccttttccagacgtttcagcaagtgaaatcatttgtggttcatgttatagctttttcagtaacatgacttgagaaatttttcttcttactaataaaagggaatcattcccgcagttaaagaattcatcttggaatcctctggtttttcatcatgctttacttttaaaacttcccgttctgctgtagcaaacttcccattctgctgtggcaaacacgagtgcatattagttttcatctttggaagatgaatgaagtatgtgacttttcaaacagggatctcacattttaagtctagttattccagaataaaaacaagccagaggcccaaacacaggattcttcactgtcgttagcaatttgggcacaaatctgaagggccagtttggtgcaggtgtgctggaggatacatggagaaaaaaaaacatgttccagtctagttctgatacacagaaattgaaagagcaacccaaggagttgggttgctcttccacatggtcaggatgagccaaggcttccgggtagggcttttagggcaagtgggccccagctgagcccagcaggggcagggccaagatgagcagaaggaagagataggctctggaaggagaggcaggaggaggcaggtgtgggcaggtgcaggcagatgtgggcaggtggaggcaggaggagacaggaagaagcaggtgagggcaggtgcaggcagatgtgggcaggtggaggcaggaggagacaggaggaagcaggtgagggcagatgcaggcagatgtaggcaggtggaggcaggaggagacaggaggaggcaggtgagggcaggcgcaggcagatgtgggcgggtggaggcaggaatagacaggaagaggcaggtgcaggcaggtacagacagatgtgggcagatggaggcaggtagaggcaggaggaggcaagatgaggtaagaggagccaggtgcgggcaggtgcaggcagatgtgagcaggtggaggcaggagacaggaagaggcaagaggatgccagctgcctgaggtggctgacagcttcacccagctgaggttcttgcccatcctatacacccatcccaggacctctctctaaacactctgctctgactttggcatttccttgaataaacaccccagaagctcctcgtctccttcatacaataatccagtctgcctagcccagtgaatgagggttctaccagagcccagccaacccctaggacagctcacatcccaccatccctgaggtactgcaggctcacagccttcctgatggaccacacctgtgcaccgggctggtcccctgcatgcacctctcattcaagttgccttcctctgggaagcccccagggacttcttttctgtcctgcactggcagagtccccctgcttcccctgcacccagcacattccttccttcatcaggtgttgctgcacctctgctgctgggcaggcttggtgccaggcactgaacacacagctgagtcccagatggatgtcttagtgtcaggagacagagtaaagttctaggcctattgtccatcgtttcttgagacagggtcttgctctgttgcccaagctagccttgaactcacaggctcaagctatcctcccacctcagcctcccgagtagtagggattacaggcttacaccattgcacccagctgcctgttgtctgccttgacattcgtcccaaggtgctgtgacccagttcatttgtctgtgtcccctaggagactatgactttcctgcaggcagggttgtaccttctcatctgcaccctcagtgcactcaggcaggtagtgtccagaaaatgcttgaagacaagaaaggttcccccagtgagtccatgcagagcagaacggcaagcagggcaggaggcaccaagctggcagggcagggtcttgtcccagatgtactgtgtcctggagaatgatgtgctaaccacatgcaggccgcctgggatggagaagagcagtggagtgagtcttccctgcctggtgggaggtggaggccctgtggcatctgaggtcaaggtcactgccactgggctggcagggctatttctccaaatgttagaatcaagaacttcagattaaacttcccctctgcctactccttccccatgtcagcattgctgaacagctgccatttagcaattgtgggagcaacacctatttattgagggtccattctgttctgggccctgacacagtagccccaggaggtgtcacaaatgcaagagtcaggcaggtgtcatcatacatgagccaggggagccaggtgggcctgagccgaggggagcaacacctatcccggccacaggggtgccctgctcaggctcagcccgctgtgggctcacaggagcacatcttctgatttttcaagagaagctgagcacctagatttttgtgtgaaatgctacaatttaaaaatataaacaatgaatgtaaacaaatcttacaccaggtaggctaaataggagccatttcctagccgcacttggtttctggacagccagttttccaccttgattgataaaagaaataaccattcttggttttttatttacttccagatctccattcccctgctctttctacaatacaactcccaccccgtccatctcactaaagctcccactgatgctcctgaagccttgatctgtacatccaggcttccttggtttgtggccacaaaccccgaatccctcactctgatttgcagagtaggggacaggtgagggctgggcccagggcagagccaccagtgagaagttgggcaacccttgatctcatcagtgtggcccagactgtgtcactggtaagggaaaaggcaaagaaaacaggcaaaatattgatgtttatctgcagagctgaatgtctttttatctcatagaaaaaaaaaataggtcagcctcccctgaaatgcagggcaagcctcctatagtccagtcaagagcatttcgagtgtcacttgccatggaaggaagctggagaccacgatgtcagagaaatgagaatgagagaaacagaaggagagctgtgatatccaggaagatggtttaagcacagggaaccaaggaatctgtctccatctgctagcaaactgaggctctaatcactatcagaaacggaagaatgttgaggaaaggtgatcagaggtttgggtgctgttcatcaacctgtctaaaatgaaatttttaaagtatgtttttctttaaattgtacgacatcctcgatttataaagcaaatcaactaacaaagctatgcctttgtgggcactcaacttgatcctttgtctttaggttaaaaaccaaatcctacaaaatgtccatcaagggatgaatgaataaccaaaatgtggtcatacatgcaatggaatgctgttccgtcctaaaaaggaaggagctcctctcatttgctgcaacacggatgaacctggaagacgtactgagtggaataagccagttacacacagacaaatactgtatgattccactcacatgaggtccctagagtagtcaaatttgtagagacagaaagttgaatggtgggtgtcaggggctggagagagagggatggagggttatgtttaagagggacagagtttcagtttgggaagaggaagaagtactggggcgaggtagtgatgatggttgcacagcagtgtaaatgcacgtaatgcccctgaactgtacactcaaaaagggttgaaatgttcaatttcattttacacgtacattaccacaatttaaaaaactcatacaagagcaggaatttcagggccgcatctgttatcataaaaccatggcactgttgagactcggaagcaattttaatcacgtgggccaggaaaccggtgactttcttatctctttgatctcatggaaacaccaacactgttttcatgtgttttattcttctcttcccagctctgccagacatccacacatcctgtctaatgaaaacagtaagactgtttaaactccagaggtcatgtaaggaaatcattcctaaatgtgtagttcagagtaaaaagtgctcttgtcgatagcaacttttcataaatttgtttttctgagcgtcacagtggtatttgttcatctctaaaaatctggattgtttcaagatgatttttaaaattatttataaggaacccccaaacttgcctggctgccagtctctcacactccctgtaaccctcgagttgaggagtaggttgctaatcctctcctagagtgtctctgccaccagcctggaaggcactggggctccatgagttcctgcagctctttgtctgtgcatgcgagaactttcccgtcgtcttctcccatgcaggagggagacggctacctgagcctctgagtctaggttgaaggaaggtcggtgaagaccccacccacagtgagacaatgcggtggtcatggggaagctccacccaccaacaccccaagccccagaagttctgctgcctggaatgcgcaggaggcttccagggcagctgaggtgactctgatttcatttgctcaggcagatggtattggagagactcagccactttattctgcagttggtcagcacttcccaaggggattttattggtcttctccaaactctcttaattccagaccttcccagcctcacatttgctagtctcagaacagagctaaggaggcctgttcctcacgagctggacaggcagactggaatgaccgtgcccactgctggggtggcagtattgggcatggtgtatgagtgtgtgtgggttgacctggctgtggactctgggtggaaggaggaggaagtagttcctatgggcattggggctgggaagtctaattagaagcaatagtgttggcccaacaagtggggcatttgtgcacgacagaacctaagggcacacaaagttgctcctgtcagggatgtgagtcagccaatggccaagctttgactttcggccagggtggagagtggcagcaaatcatggttctgctgctggaaggactgaagtccagggaatattactgctcagagggcctgataagaatccagggaccagaactggggtataaagtaggactgagaattaagaggaagaccacagctgttgtgtcacatgcagcatgatagtcagggatggatgagcacctctgggaggtacttgataaatattgattgaatggctaaatggtgggtgggtggatggatggatggacgatggacagatggatggatatgtggatggatggatggatggatggatggatgcatgcatggataagtggatggatggatggacagatggatggatacatggacagacggatggatggatggatggatggatggatggataagtggatggatggatgggtggatggatggataaatggatggatggataagtggatggatggatgggtggatagatggatggataggttagtgaggttagaaaagtaggcagaaactggatcatgaaggccctataaggattttgcacataatagaaggtcatttgaggagattgagcaggagagtgacaaatggaactgtgtatttgaaagatctctgtggctccacgtggatagcaggctggtgtaggtacaagactggaagcaagagactagctagggggttgttgcagtgaaagaagatagtggcataaaattaggtaggtggcaatgagatggagagagtgggcagattccacacatttttagaaagcctgaagatcaggaatcagtgactgttctttagatgtgtggggaaaaagagggcggcatctagagtgacccccagtgggctggacagctggggggatggtggcaccttctatcaaaataatgggggaaaggaagagaaggctagggatggatcgttgtgactgtcatgggccaggagtgccttgtggcatggatctgtttataagcctatctccttcattggacctcaggaaagaccctccagcttcctcacccttcccctgcacatccagagcttagtgcagtgcccagtacctggttggttttcgaagttattggactaaagagtgaatatggatctgggattagacagtctttaagatcattccctgcttagttgtgctgctgtagcaacattcatacatgggggtgagaggggtgacttgcggaactggcaactcaatgtggagaatcttccagggcaagcaggtagaggagaaaaggcctctgtgcctgacctcatatctgaagcccaaggcaacatgccagccagactttgggctccttgcctgtggacacctgtgtcttactgtctgctctgggctctcctttgaggaggcctctgtctcagaacaaatgtcacaaacaatgaatgccatgcttcaaaggaagctgatgtatggagcgtgtgtcaccttcctctacaggaatggggtttggcagtgatccaaagactcactgttatgacatgttctcagggaagtaggtcatatgtccccagggtattcagagaggcctgtgagtgtgagatgtttgggctgagcagggctttcttcctctcaaggctccaaagggcgggccaacaggtcatttggtttttctcagtgatatgttttcctcctcaagattcatcacccctctctcctcctctgcttgttctgaggcaaatggacacagaaatacattctctgttttatccttcatcgttgctaacccctgtggggtcgctgacatcatggagttctcttctggtcgtgcatattgtagctcatgaagaaaaggttgtaaatcaccatttcaggatgttctgcctttgacctactatgactccatggagtatcccctacagagctctctgtgggtctctgagaggcattggtgtgtggctgcatctggcaccttgaggtgaagatgggccaggagtagatccaggaggagcacagcagagcataggaggtggctggagaagaaggtcagatgctgtggggtcaggaagtgcctgtcagagaagcacctgggagtttgtttctggctgaggccagcaaggggtgcaggctgcatgacttccttcttctgaatcttcctttcagggcccaagtacaaagagaaaacacacatcaaaatgcttggagaatgaatggctattcgtgtatataccatttcactgatattgataacttactatgtggccgatcctgctcaagggcctaggaagaaaaagaactctcagccctcattttggggcaaataagtaaggatatatatacaaggatgtttattgcggcaaaaaataaaacactaaatttataatggcaaggcctgtcaacagggaaagattgaaaagagattgattctgcatctgcatcatggagcagtctgcagcccctgggagatattcatcagacctcgcaggctggcagggagggatttccaccccgcattggtaagagagaagagcaagatgcgcttgcacattgcacctgtgcacacttgctcatctgtaattgtgggtacagggacaaaggtgtgtgcagacacactgcaggtcacaaagactgcatagaggcatagagtgaaagtgggtacagaaaaggggaggagtaggaagaaaagaaacaaggaatcacaggacacggcagctcgtgtctgtaatcccagcactctgagaggctgaggtgggaggatcacttgagcccaggagttcgagaccaacctgggcaacatcgtgagaccctggctctgctaaaaactaaagccagatgtgatggcttgtgactgtagtcctagctactggggaggctgaggcaggaggatccctcgagctcaggagggcaaggccaccatgattgtgccactacactccagcttagatgacagaatgagaccctgtctcaaaaaaaaaaaaaaaagctatatgtttttaaatatcatttatagtgtgatttgtgtaaaattgcatagacacagagaagggtttacgccatgggacagccacgaaaatgtgatagcacttcagtttgactttaaaaaaaatactcttgtgcattgttcaattgtttttataatacagtgatcacatttatttagtgattggaaaagaggttatattttagttttggaaaattaaataagtgtagatgtgaaaacaaaataaataaaaattctcagaggtatgtttatctaaagtgagccagattcacgtgcattcaaaactcctctcctaggaaaacctcccctgattgtcttcttcaactgttaggaaatagtgttgaggtgttgccacaccctgaggcccattctcccctatgctgtgtgttagaagtctgtctcttgctctgaagaattcaggtttgtcccatgggtttacattttatttatctcttaatgcttacatcctctgatgcctctgacattttaccttgtctttggacaaattttcacaatgtttaaaaggtatgctttaaaaagatatgctcttacataacttttctgtgcccggctattctcccatatgttaaaggaggcctcctttccctggaccaccatgaccacccgagggacttgcaggttgccagggcatcacctgtcatgttcttttatggaaagaatctggactggagcacatgagctcaagaaaaatctcggacttaaaattcagtctacaagagaaactgacattgtcctggacctgtgtaatgggcaaagttcagagtctctggggtacagggaagtaggtcagggagtggggaaactgaggcctgttgtgggacttctcagcccaccctaattagaggggttgagccaaccccccaataaataccttctcatgtgacagcatgggacgtgagatgggaaaggcccatcagctaaatgcgagccacaccgtgaaggatgccccatgccatgcccaagggtttgggttttctcctaggaggggtgaagagctgctgaagcttttgagccctgtagatgcttagatgtgtgttgggccactccgttggcccccaggagagcagatggggaagggtgagcctaggcttagaagaccagcacagagtcctgagcttggggatgtgcacacaccatcaccccctcctttttttttgtttaagagagactttattttagggcattttaaattcacagcaaaattgagtggaaggtagagagatttcccatatgccccttaaccctacacacacacagcctccccactctcattatcctacacgtcatcatcacccagagtccatagtctgtgttggggctcactcttggtgttgtacattctatgcatttggacagatatatgacatgtatccaccatggccgtgtcatatagaatggttttactgccctaagcatcctctgtgatccatccatttattctccctccctgtgaacctggcaaccactgatttttttactgtctccatagttttgccttttctagaatgtcatgtggttggaatcatataatatgtagctttttcagattggcttctttcacttaataatacacatttaaggttcttcccaggcttttcatgagttgatagttcatttccttttagcgctgaatagcattttattgtccggaggtaccacagtttatttagccagtcacctacattgtgatggttaatttgaggtgccaacttgacaggattaaggaatacctaaaaacttggtagtgtagtattttggagtatatccttccagaggaatttagcatttgagcctgagtgaattaggtggagaaggttcaccctcagtgtgcatgggcaacatccgatctgctggggacccagacacgacaaaaacaggaaaggtgactgtgtcgatctgtctgctggaactgggatacaccctgcctctcctgaccctggacaattccaggcttgtcagcctttggattccagaacttacaccagtgccccaccctcaatccatcccctggttctcaggcctttggccacggactgggaatttcaccaacaccttcgctggttctgcagccttcagacctggactgaaccatgctgctagtgtgccagggtcttcagcttgaagatggcctgttgtgggacttctcagccaaccctaattagaagggttgagccaaccctcaagtaaatcccttcccatgtgtctatctagctatgcatattctattagttctgtctctctggagaaccctggctaatacagattttggtaccaggagtggttctagaggaaacaattttaatttttggttttggagtttctggaattggctctctaacctgtttagaactaaaaatgctggagactctacttctaatagcgcagagagcactgatagatcacgtgcttactgtttgtaaatatgcaaaataaatacatccatactcctaattcaccacttataaaaggcaaataatttagagactttatacctgatacgtttgaacatttgaggaaaaccaaagaatatgccacgttcattggttgctcctagcacggctaaaccaagtgatgagagaaaggggtgagctccggtattcacataaatgacctgagtttctacatgtgccctgggtcagaatcttctctcccgtagccacagggctgaaattgctgaaaatcaaacacaagcctttgtccctcgattgactgaattaccgcgaaagctgagtctcagctttgcggaaatttgggatggggaaacgtggggagaccttgatgaggctagagacattgagctcagaaattctgatgagtcttatttgctaaaagtgacctcccctatcccagaaataaatcccacctctgcctgaggggattaactctgatgggactcacagcctcccctgagccagttgccaggcaagacagtgctgaatctctggacccgcccccaccaaccctctttccttctagacctactgtaactagactgaagtcccagcagcccctacaggtgaggtacacagtgtgccccatgaggaggtggttacactctaaaagaactactttggttttctaatttatacaagcagaaattcggggaacatgtgtgggagtggatattaagggtatggactaacagagacataaagggagccgactgaatttattgatatggacccactgagcagagattctgcagttaatgctgcagcgcagggaatttggggaggggctcagtttgttttattggttggctgaaatgtgggtcaaaagatggtccaccatgactgagttggagatgcctgatctcctttggtttactttaaaggaagggatccagaggcttagggaggctggaatgctagagtggatttgtcacttaaaaccaactcccacacactaggagggtccagaagactggtctttcaccaaaaccttgagaaacagatttctggggggagtgccagcatccctgaagagctccgcgattgctcttctctgtaggctggactttacagtgggaacctcagtcactcaattaggaaacttaaatgctatggggataattggatcctggggtggcaggggccaagtggcagcactcaactgtcaaaggcaaggtggatgtagttactgtaaggtacagcagagcaaagcaacaatcaaaatggtctgactcgtgtagatctatggcactggctagttaatcacgtgtttctaaaagtgaaatagggtcgggcaaagtggctcaagcctgtagtcccagcactttgggaggccgaggcgggcagatcactaggtcaggagatagagaccatcctggctaacacagtgaaaccccatctctactaaaaatacaaaaaaattagccgggcatcgtggcgggcgcctatagtcccagcttcttgagaggctgaggcaggagaatggcttgcagtgagccaagattgcgccactgcactccagcctgggtgacagagggagactccatctcaaaaaaataaaaataaataaataaataaagtgaaatagataggaagcctactaaattcttacctgatctgtataagcataaaactttcaggtcaactgcacaaaagtccaactcaaatcataaaaactgagagtcgtggctcctcaatgaattcccagacttgagccagtttatagacccagaaccccttgggtgaaggagaggctgggttccctccaggaaggactctggtagactacaaagaacgtatactgttcatctttctcccatctttccctaaagggatctatggccttttaccatggtaactgtgtgctggggagagggaaataaacagacaatttgggaactactggacactggctctgaactgacattgattccaggagacctgaaatgtcaccatggccccccagttagtgtggggcttatggatgtcaggtgatcaatagagttttatctcagatccaatttacagtggactcagggggtccctgaccccatccagcggtcattcccccagttccagatgcataattggagtacacatactcagcagctggcagaatcctcacattggctccctgacctgtggagtgaaggcaattatgatggaaaagggtaaatggaagctattagtgctatctctacctacaaaaatagtaaatcaaaaacatgacctggagggactgcagagattagtgccaccatcaaggacttgaaagatgcaggaatggtgattcccaccttcaactctcctatttggcctgtgcagaagacagatagctcttggagaatgacagtgaattatgataagcttaaccaagtggtgacgccaattgcagcagctgtaccagttgtgatttcattgcttgaggaaattaacacatctcctgatacctggtgtgcagctattgatctggcaaatgcctttttctccatccttgtccagaaggcccacctgaagcagtttgccttcagctgacaaggctagcaatataccttcactctcccacctcaggggtatatcagttctctagcctatgtcacaattgttttcaggaatcttgatcacttttcccttcaataagatatcacactggtccactatattgatgactgaaggaacttatgtatacagtgatccatttccaagacaaagtgccttaaatcagcttaggtcagcaaaactacagaagaaacaggatgtaatatgcccctgcttagatagccaatgcctacttgttgtgcccaccccgcccccccagcccttagttgccctcacccaaaccaaaaaaagtttagtctaagatgaaagtttattagcctgcaaaatagctccctttttctattcttatcagcctgcccagctacttaggtcataagtcaaatacttaaagagttaagtattttacttataagctcaggggagctgacaaggattgcagtgcattgtgggctgcaacaaaatgcagcaagacaaccctaataaaaatcacctacagcccctacccaacaatcaataggcgatgtccaggaagattgtaaacccatagtactcagcctatagggaaccgggggagggacctacacactaggggataaagtgcttgttaaaactgtgctgggtgtgcctgcttatcagacactcaatcttgcaagactgtcattaaaagtctcacttttgctattccttgggtctctgagtccattctttgggtttggttgggtaagtttatttctcacaatgacaatatgctgattgggcctagagagcatgaagtagcaaccactctggacttataggttagacattcgtatatcagagaatgggaaataaattgagcaaaatttaggtgcctcctacctcagtgaaatttctaggggtccagtggtatggggcatgtcaagatatcccttctgaagtgaaggataagttgttgtatctggcccctcctacaattaaaaaagtgcctagtgaaactatttggattttgtaagcaacacatttctcctttgggtgtgttactccagcccatctaccaagtgacctgaaaagctgctagttttgagtgtgtcagaacaggagaaggctctgcaatagatccaggctgctgggcaagctgctctgccccttgggccatatgacccagcagacccagtggtgcttgcggtgtcagtggccgatagggatgctgtttggagccttcggcaggcccctataggtaaatcacggtgaaggctcttaggatttttgagaaaggcccggccactacctgcaggtaaccactatccttttgagagacaactcttggcctgctgctatatcttagtagaaatgaaacacttgattatgggccaccaagttaccatgcaatctgaactgctcatcatgaactgggtgtgatctgacccaccaaaccataaagatgggcatgcacagcagcacactatgataaaatggaagcggtgtatatatgtgattgggccagaaaaggtcctggaggcataagtaagttacatgaagaagtggcccaaatacttatggttcctactcctgctatgctgccttctctctcttgcctgcaccccatggtcatttgccagaggaagagaagaccaggacctgctttataggtggttctgcatgatatgtaggcaccaccaggaagtggacagctgcagcactatagcccctttctgggatgtccctgaatgacagtggtgaagggaaatcttctcaatgggcaaaacactgggcaatgtacctggttgtgcactttgcttggaaggagaaatggccagatgtgcaattatatactgattcatgggctatagccagtgatttggccagaaggtcagggacttggaaggaacatgattagaaaattggtgacaaagaaatttgaggaagaggtatgtggatagactgctctgagctggcaaaggaagtgatatttgtgttccatatcaatgcctaccaaagggtgacctcagcagaggaggactgaaataatcaggggtagaaaatgacctgttctgtgaatatttgtcagcctctttccccagccacccctgtcatggactcgtgatctaagtggtcatggtggcagggatggaggctgttcatgggctcaacaacatggacttctacttaccaatgccaacctggctacagccaccactgagtgaccactctgcctgctgcagagatcaacatggggtccccagtatggcaccattctttggggtgatctgccagcctcctggtggcaggttgattacaatgcagcaccttcattgtgaaaggggcagtgttttttccttactggaatagacactctggatatggatatgcttcttccacagctaccatctgtggactcatagattgccttatcaaccatcacggcattctgcacagcattgcttctgaccaaggaattcacccaaagccaaagaagtgcagcagtgggctcatgctcgtggaattcactagtcttaccatgttcttcatcaccttgaagcagccagtttggtagaacagtgaaatggccttttgaagtcacagttacagcaccagctaggtgacaatgccttgcaggctgaggcaaggttcttcagaaggttgtaggtgctctaaatcagtgtccaacatatgatgctctttctcctatagccgggattcacaggtccaggaatcaagggtcaggaatggaaatggcactactcaccattactcctagtgacccactagcaaaatttttgcttcccgttcccatgactgttagctctgctggcctagaggtcttagttccagagtgaggagtgcttccgccaggagacacaacaatgattccactcaagcagaagataaggatgccacttggccccttggggttcctcatgcctctgagtcaacaggctaagcagggagttacggtgttggctgcggtgactgatccagactaccaatgggaaattggactactactccatagtggaggcaaggaagatcttctggaatacagaagatcccctagggtgcctcttagtactaccataccctgtgattaaggtcaattggaagttacaacaaaccaatctaggcaggacaagtaatagcccaggctcttcaggaatgaaggtttaggtaactccagataaagaaccatgactatcatatgatgcagagaataaatacatgtgtacatacatacatacatacatacatacatacatacatatatacatacacacataaaatcatgaccagtgaggtgcttatcgaaggcaaagagaatacagaatgggtagtagaagacggcagtttatcaataccagctatgcccatgtaaccagttacagaaacagactgttatgagtatttcctccctattttgttaagaatatgtccatgtgtatagatgcatatagtaagcaaagatctttattttcattcctctcttattcttttatcatgtaacaagattttctgaacttatattagtatttaagtgttgttaattttgtatcatagtatttaagtcatgagatataaggagaagagtaaacatcatgcaaggactttttctgaagaaggaattatattcatcagttttcacactactgtaaaaaactacctgagactgggtaatttatgaagaaaagaggtttaattgactaacagttctgcaggcttaacaggaagcctgactgggaagcctcagaaaacttacaatcatggaggaagatgaaggggaagcaagaaccttcttcacatggtggcaggaaagagagagagaaggggaaagtgtcaccttttaaatcatcagatctcgtgagaactcactcactatcatgagaacagcaagggggaaatccatcccatgatccagttacttcccaccaagcccctcctccaatttgacatgagatttgggcagtacacaaatcgaaactatatcagggattaatgtgtttttggttgtacgcaggatagctgcatcctgtcaggtgaaactattaccttattattatcttatctggaaattaagtatgatttcaggagttgcatatatataggtgccaagttgacaaggggtgggcttgtgatggttaattttaggagtcgactatattaaagaatatctaaaaacctggtaaaacgttattttggggtgttgtctgagggtatttccagaggagattagcatttgagtccaagtggactagatgagaagccacactgccagcatctcagggactccaccttgcaaacggcttctcaagggactcctcagccacaactgtgtgaaccaatctccctaataaatcccctctcatatgtctatatattcattgcattgatttttgtttctctggagaatcctgactaatacagacatcttggttgcttccaagtttgggcaattaagaataaagctgctatatacatacatatgtgggtttttgtgtggacataagttttcacctcatttgggcaaatgccaaggagtgcaattgctggatcatatgttaagtgtgtttagttttataagaaaccactaaactatcttccaaagcagctgtaccattttgcatttgaagcaataaatgagagttcctgttgctccaaatccttaccagcatttggtgttgtcagtgttccggattttggctattacaataggtgggtagtggtgtcatattgttgctttaattagcaattccctaaagacagatgatgatgagcatctttatgtatgcttattttccatccatatgttttctttgttgatgtgtctgttctggtctttgcctgtttttttaatgggattgtttattttcttattgtgagttttaagagttttttttgtacattattgataaaaatcctttatcagatatgttctttgcaaatgttttctctccagtctgtggcttgtcttctcattaccttgacagtgtcttctgcagagcaggaagtttttaatcattatgaggttcaatgtatcaattctttcttttatgggtcatgtttttggtattgtatctaaaaagtcatccccttatccaaggtcatctagatttttttctgttattttctagagttttataattttgcatcttacatttaggtctatgatctattttgagttaattttttgtgaagggtataaagcctgtgtgtagattcattttttgcatatggatttacagttgtcccagcaccgtatgttgaaaagaccatcaatctttctgcctttgtattgccttcactcctttgttaaacatagttgaccatatttatgtgggtctatttctcttccattctgttggattttttccttcagatttgttacatagataatcatgtaatctgtgaacaagaatatttgcatttttacttcttaatctgtataccttttattttcttgtctcattgcaacagccatgacttcctgtatgatatcagaaaggctctccattctgttccaatgatgttgattattttactgaagctttatagttaagtcttggggtcaggtagtgtcagtcctccaactctgttcttctccttcaatattgcgttggctattgtgagtcttttgcctctctgtataaactttagtatcagtttgttgacatccacaaaataacttggtggagattttgactgggattgcattgaatctgtagatcaagtgaaagaactgacatcctgacagttttaaatttgtttatccgtgaacacggaatgtctctccatttatttagttgttatttgatttctttcatcagagttttaatatagatcttgtacatattttgttaggtttatgcctaggtatttcatatttagggatgctaatataaataggattgtgtttttaattttaaatttcacttgttcacttctggcatacagaaaagtgactaactttttgtattaactttataccctgaaacattactatagttacctattagttccaggaggtttttttgttttgtttttattcttccaggtttgttacatagataatcatgtaatctgtgaacaaaaatatttgcattttttacttcttaacctgtatatcttttattttattttcttgtctctgcaataaccataacctcccatatgatatcagaaaggagtgtcaagagaggacatccttgcctcgttcctgatcttagtgggaaaatgtctagtttcttaccattaacgtatgacattagctgtaggtttttcatagctgtcctttatcaacttgaggaaatttccttctattccttgtttgttgagagttttcatcatgagtcagttttgaattttgtcacgtgcttttttttgcatctgttgatataatcttgtgattttcttctttagcctgttgatgtgatggattacattaattgattttcaaatttgaatcaaccttttatacatgggataaatcccacttggttatggtgaatacttatttttatacattttggatttgatttgctaatattttgttgaagattatgcagctaaattcatgagagatattggtcaatagtgttgttgttttttttcttggaatgcctttggttttggtattgagggtaatatgggcatcatacaatgagtgttccctatgcttctatcttttggaagagatcatagaaaattgatttaatttctttcttaaatatttggtagaattcaccagtgactcatctgtgcctggtcctttctgttttagaagattattaattatttatttattttcttcaatagatataattctattcaacttgcctttttttttttttttttttcctgagacggagtttcactcttgttgcccaggctggagtgcaatggcacgatctcagctcactacaacctcctcctcctgggttcaagcgattctcccatctcggcctcccgaatagctgggattacaggcatgcgccaccacaccccgctaatttcgtatttttagtagagatggtgtttctccatgttggtcaggctggtctcgaactcccaacctcaagtgatccgcctgccttagcctcccaaagtgctgggattataggcatgagccaccacgcccggctgaaattgcctattttctttttttaaacagaaatccaggttaacaacaagttgggacttgaggggagtggagaaaaacagtgcaagagtttcctaaaagcttacccagttcatgcattcactcattcattcatttgtacattcattcatttggtaattcactcaatagcctcctactgaacccatttaccagaaataagtcctgcctcaagatgatagcatatgcctttcttatgccttcctgggcattttcttgaattacttttttgtggttgtttttaatgtgtaaatatacatccccaataactcagactcattaatttatgtttgtaataattgttgaaataagtttgacagaaggtgacctttctgaatttgcaaagaaagtgattgccaggcaaatttaaagcagaagtccattgtggggaagatgttgtgtccaaagccacacacttttcaacgagctttaagcactttctccatagtgttgagggcacaactgtggagtcagaccttccccagtatgatcctgggtcagctacttcccagcagggtgacttaggattgtctccttgtctctttaattctcctttccctgactgtaaagtgcaaataatatgacccaccttgcaggctgcttgtgagggtccatgagatattatgaagcttctagcacagtgcttggcagggcactgatgggagctcttacctttattattaattcattcaaagggagatttactgatactctctttagtgctgtaagagatgtgacgatatcaaagctagtgcctgtcctcttggagaatgtaattctttggggaagctaggacagatgcagattattactatgtaagatgggaagtaataaaagacctgggaaaacaagtgaatggcagacgcaggtcagaaaggagaccaatccctccagcttgggcatgcttgctggcatgcgggtgccccagggactcgagatcctgttgctgaatgatcagatggtggcatctggggtggacactgaaggacgaggctggctgtgtgtgtgacagcagacctttctccctgctgcctgtgctgtgctttcatactgcagacacccagcaagtgagcgctgagttagattccagagagagagttcaagaaaatgcatagcagcagacaaacccctctatcgttaatagcaaagatttcttatttgttcatttgcaagatcctttgtcaaattcttctggccttgggccctttgatcacttctgtgtcctgtgcacttaagtctggtggattccttcttgcccctcagcactcagctctggcagccgtgcctcccccgagtccggtctgaccgttccctgcagctttacctggttctctgtgagcctgagcacttgggctgctccatctttcaacagccccaggagttggtctgagtcatcttggacctcctagctcaataaatgtgtaaacttgccatagcccagatcttgctctgatttatcagcatttagccattagtccaaatacgtgaggcttttcaaaaaatacagaaacagccgggcgcggtggctcacgcctgtaatcccagcactttgggaggccgaggtgggcggatcactaggtcaggagatcaagaccatcctaacatggtgaaaccccgtctctactaaaaatacaaaaaaaattagccgggcgtggtggtggtcacctgtagtcccagctactcaggaggctgaggcaggagaatggcgtgaacccgggaggcagagcttgcaatgagctgagatagcaccactgcagtccagcctgggccaaagacccagactctgtcaaaaaaaaaaaaaaaaatacagaaacaagtagttcccactcacccttcctctctgctgttagtgtgcattcagacgatgccaaggaacgggcttctctgggcagagccggggctttgcgaggggtctttctcagccacacgtgtccagcatgtatgtggccttctcctggggcatagaagtacttatttcagaccacacaaatgaaaacgattaacattcagcaaaatatcccagctgcagtctaattatttcctatggttgttggtgacagcgtcccctttttggagcagggttggccggaggcaggatgagaacagtgtgggcttgttggggaggtgttgtaaggcacccagcacagagaattgaaaagccttctttagaagcttctctctggggcagggtgggggtgggagaggaaacggtaaagacccacagtggcctgggctcttctctccagcaagatgcaacaggacagggaaggagggcccccaggaggcccctggggtggcctggaacttgagaatgaactgatgctggcaggcacagccttcttcacttcttcacaagggtgggccccgccttagactgctgggtgacacctgtgcataagcgctccaccccccagcgagagaaagcgggccgctaggactggctgtcctttactgtgtgactctccccagcgtcttgtctgtcccttcctacctgtcactgcacttggtagtcacatatttatttgtaccttggtgtatttattcctgtctcccccacaagactgcaggcagcactgagaacccaggctgtcttgctcatgctctgccgccaggactagccgggccgggtacccctggggtactccccaggtgcctgtggaatgaatgaatgagtggatagatgagtgagtgaaagaatatatgaaattggttctgcaggatgtgcggcctgcagttaccactcaggagatgctggctccagggtaggagagagactccatttttctctgggtattactgggctgttttaatttcatcaaacaataggaatttattacctgttttcttaagctctaaataacaaagggaagcacagtaagtattctgttcttcttctttgccagggcccagaggttgagggaggagcagcccatggtgctgggtgccagtggggggtgaggaagaggctgcagaggtccctgctgcctggacacgtggctctagcccctaatggaggggcagccccaggtaccactccctgaacctgcgggaaggctggcacagacggcatgtgagtgcggcacatgccaggccacggggctcctttcttgtaactctcaaggccccatgaggcaggccaggtgaccgaggctcaaagggcaaagtcacttgttctgatggctcagctgcaggacagtgactgtagggccagtgctctgtgcacccgcagctgctccgctggacacagacctccccggggaagcagagaccaccctgcatctgaacggggaggggtcgatggagtgtgccctggtgacatgggctctgcagggcggggtcaggcctcccgctcagttctgcatcagtacttgcaccacagaggcctcaatgaagccgagggagctcaggggagcaggagtctaagccggaggccctcagcggggcggctgtgccctccccaacgcccaggacatcagcagtgtctggagacaggttggattgttatggccaaggagggagcagtgtcattggcagttagtgggcagaggccggggatgcagcggaacagcctacagtaccaggcagtccccagcccccgcaatgtccacggtgctgaggtggagaaatcctgggcttaggtcacgcccaggtgcacaggaaggatcttgcatcccaggaaccaggggctgggagagaggagagctgggctgggggctctggaggtcccaagttggggtgcccttggattcctatgtagaggtggaaacctgggtctataggccttgactaggggtctctggctgagaaacactggctgaggctgcaggaaagatgtgcctctgaggagcaggcctgtggaggccagacactgaggcagctcggtccccctggggcctatggaaatgcaggtaacccatgatatcctagggtcctgctcccacccaagagagggctggggtgagtgatcacagctgagggcctgcaactgtatggacccattctccacaccacacacagaccagcagaaacatctggcatgttcccccagcacccctgcatctcactaactcccattcctccctctcctgtcagccaaggccactccctacaggatgccttccctgactgctgctctgggtcaggttgcatcttctcaaagaactgtatgtaatttacatcctttgttaatatgaacatgtgattaactggcttctgggtggatgcatcctggtgtcttcagagcccaacacatagtagatgcccagaaagtggtttttaaatgattatgctttgtctttgataaataacataggcgtctttacagtgtgtataggcagagccgagttgagacatcgaaagtgggcagggaaattgtctccaatcctggagttgtggggaagcaccgtaggcgagcctgtttcctccgatctcacctggggtggagtgtgtgtgtgtgtgtgcatgcatgcgtgcgtgcacacacacgtgcacacacgtgtggaacccacggggctggggatagtctctagcagtgtgagacaaccagcacaccatcctggtgctgagcacagctcagtgtccctgtctgggaagcccatgacccttggggcagaagttctgcacagggagtccgcagtgggccaaggcagtggtcttcagcccatttgcagagctaccttgaccctctgtgcctgagataaaaaagatggtttctccttcatggagaaggagttcagttttattaatactttcttaaagtgagccacaggattagtgctggcccccaggttttgaaatcttccatctgatgttcagcctctttcctgttgagaccactccttgcaaagatgattgctcttgaagttgaacccagcataactgcagtccgtcgccccctcccagctggcagagtatcctttgctttcattttatttattgtttatttatttatttatttttgagacagagtcttgctctgttgcccaggctggagtgcattggcatgatcttggctcactgcaacttctgcctcccgggttccagcaattctcctgcctcagcctccagagtagctgggattacaggagcccaccaccgcacccagctagtttttgaatttttggtagagattgtggtttcaccatgttggccaggctggtctcaaactcctgacctcaggtgatccgcccaccttggcctcccaaagtgctgggattacaggcatgagccaccatacccggcctcctttgcttttatcaaatttaaacttctaggaatatattttcataatgtgtttctagccgtccttaagaattaatgaagttcttagttccattttttttttttcgcccttgactaactgtggacaattctcaattgtaagggaaagatttacttctgtattaataagtctcactgtctccgaaactcttcacattcaaagggcactcgcattacctggcaattactctttctcgatgagacacaggttggtgatatttgggaatatgactttggggaatacaaactctgtttaagtaatgattttgaaaaaaatctctctgcaccagtgaatgccatgaacagtttcattttcagtaagcgcttgcagccagttgtctagttgtcagaagccgagctcatcagcgggctcctggtgtcggcgttctgctgctggaaggtcagggagttccctggaccccacggaagaagctgtctccatgaaggacagggaccgtgccgtgaaccttttattctcccactgacatggtatgaaggcattttggttttaagcatcttttttcctaatttctcagaaccctttgaagatcttgcacttgacttctaaaattcagtccaattccttaataagtacatcattattacaagttggcttttttacttcttaagaagcatctttaatttgaacttccataaccatatttttgtaattatcaaatggcaggaaatagatgctgactcccgtaattttatcattctaaatgtcacaagaatggcaaggatctttaaaagacaaaagaagttcttcagttaggaattcccatggtaaccaatatagctcaatcttttttttttttctttctgtggctattttaagtatttaaattgatttacatccctgtggaaatgtgaaaaaagcctggatcccatatacatccattccacctggagtttgggggttttgttataagccatgttcttcttttgattccttgccagtgtctgcagtggaaggtcagggttcgtccctaagcaaaagccttttaagtttccttaacttaggaagaagtcgtgatttacctttgtattccttttgcagtggatattaaaacataaacatataaattatctcattttgaattgctcttttactttatgttgaacaatgaatataaatgtattttagcggccagatgttagaggataacactggcttaatttgtgctgagtgtggagccccttctgggtgcggtgagggtctgagcctgtgaacctcgtatctgcccagctcctgctggacagcatcagagatctgctggctcagggtccagccagtctccacctctttctggagcagaacactgcacaccaaattcactggtactgcagccacaaccctggacacctggacatgtgcattttcccatcttctgccacactggccctttgcctgacctcctcctggccttcagtctgaggtccgctgggggccatgaatgcctctgcaaagttgcaggtcctgatggtgggctatgggtgctcccagctgagcacagtcatgactcccacactcactgtacaaggaagtgaacacagtaagtgtggatctaccagatcttcactaagcctcagggcaaccctaaagagaggacaggcatgtttatcctcatttcatccatgaggaagtggaagctcaaagaggtcagatgctgcatctggggtcagtgtggttttctgcctctgggaccccctacccctgaggccagtgtccatccccctcagcaggtgtgtggagccctccggacacaacatcttgctaggaattgcatgacagttactgatcatttatcttttaaaatgggtcaataggctgaaggaaagatgggaagtttctcagatatcacatattggcagatattacagccaaaatacacatagagggaaacattttggggaaggttgtggccatgataaaaatcagtatttattgagcctgtgatatgtggcagacaccatgaagggtgcattgtagacattaccacatacaccccatgcagccatagggtgaccagccacctacttagccagggactgaggggtttgctgggatgggggattttagttttaaaacagggatggtcctgggcaaagcaaggtaagttggtcaccccacccgccaccccaaggttaagatggacttaccttcattttgtaaatagaaaacccatggctcagagagttgaggtaactgcccaggctgctctgatggcaagaggtgcagctgaggcctggaccaacacctgtcagaacccaaagccacattttttgaccacgacacctttgtcatggccatgaagagcagtccctcctgcgaaggaagtctcaaggtcatccatatgaccaacaccttgaaaagatttaggtgataaaattgagattcttaattcttttgaaaaaaatgattaaaatcagaaaattattttcagataaagtttatgccaaaagatacaaaggcttgctctgtaagagataaagcgttttgtggcaaacaaacaaacacttcaagggcaaagtcaggccaaccgtcctgctctctgccatccggtaagtctctccatgctcatggtcatttgtcgcccagtgtgaagactgctaagggcagatgacatgctcagtgtttctcagttgaccgtattttttaattgagtttttagacaaattaaattaatgaatttgtttgcttattcatgtagagtaaaaagcaatacccactctactccaaaatagtagctcaagctatgattttgcaaattgctatggtttggctgtgtccccacccaaatctcatcttgacttgcagctcccataatccccacgtgtcatgggagggaccctgtgggaggtaattgaatcatggcaacaggtttttcccgtgctgttctcgtgatagtgaataaattctcacgagatctgatggttttataaagggcagttcccctgcacacacactcttgcctgctgccatataaagatatgcttttgctcctccttcaccttccaccatgattgtgaggccttcccagccatgtggaactgtgagtccattaaacctctttttctttataaattacccagtctagggtatttcttcatagcagtatgaaaatggactaacacacaaattatattaaaatgcagcatccttacagaaaagtctgcaccagtcataagcacacagagctctgaactttcaagtgagccagcacccagatcaaggaatgtgacaggcccattcccccagcccaatccccttattgctcttccagtcccttcatgcctcccttccaggggtaaccattgtccccacttctgacaccatagattagtttcgcctgctttcgaactttctataagctggatcatagattatatcgaagtatttttatgtttattgaatacctactatgtgcaaggccttgcctagctattcaatgaatctaaatgacttggttttgaatgcctcccaggttgctctataggtgtgtgtgtgtgtgtgtgtgtgtgtgtgtgtgtgtgtgtgtgtccctggatataggtcacacagttgtcttagccgtcagccctcaaaaggcaggttcacatggtggccagctcacatcctgtgtgtgttcaggaaggcactgctgccatgcaaatgtcatttaaatgtggcatatctatgaattcaacagggtaatttggttcctatgttgttggaaagttatctgaatgctgaagtcaactgcactccaggcttgagtaaacaagtcaggacaatgaagagaggcagttgctgttaggtttggtggggggaggggaaggtgactttcacaagtcctcttgtacaagggccaccgtgtgaaacctgatgtccagtgaagacacagcaatccaaatagatcactgccttccagccccagggtctacgcaacaaaaagccttccccattgaggccatctggcgagttctgcctccaatgtcctgggagcagtcagccagagctcagggcagggggcctccccagcctccattctgcagatcgttctttctgggcaattcatgctcattcccacacagaaaggtttgaggcaatttgtggaaggagcgttgtatcaggatggtttctaattcaggtggattaaggtatggatgctgtcttcactgctcacttgtcaaataactgaactcctgacttctttgaactctgggcttctaatctgtgaagtcagaataataataactgggtagttgtgagcattaagtttaaaaatatgttgtggcagcactttgcatgagcagaccatagtataaatgccagctccctttccctggagataagaagtgattgtgattgtgcgttaagttctgttttaagcttcctagctgacaaggcaaaaatgaaacacaatggcttatattgttctagtctgattcaaagaatgtccctagtttttcaggaaatataaacactttcctggtgttacattctaagacaactttattttgcaagcctaaatgattcagtcagggtttccaacaatggttttcaccccaaaagatggagaattcccctttctatttccatagcatgtatcaatcctttaaaaaatactaatctggggttatgatagtgcaacactaaattcggaaggcgaacgccatggagctggaattgcattctgttgctccatttctttcaccgtctctttttactggacatcttatgataagaacgtaaatggaaagggcaagcctggagtgacaaagggaatcctccattcactccacacagtgctgttgctgggctcgggacgtggagagggcaggggccgtgaagacatcctggtgcctttgcagggtcgtcatgaggataaaggggatgggccaggtgtgacagctcaggtttataatcccagcactttgggaggctgagactggcagatcacttgaggccaagagtcccagactaccctggccaatatggtgaaaccctctctctactaaaaatacaaaaattagctgggcatggtggtgcacacctgtaatcccagctactcgagaggctgaggcacaagaattgcttgaacttgggaggcagaggttgcaatgagctgagattgggccactgcactccaccctggcaacagagcgatactctgcctaaaaagaaaaaaaaaaaggggggcggggggatgatgcagacatgagctttgtgtgtgttcttgtcatatcacacgtaaaggagacggtcagactggggctcttttctgttacaaaattatacgtctggagaatcatggtgaacgtgaactctgtgtgagatgctggcacgtgcctccggcacttcatgaaggaggctgttggttctggagcatccgtggctttgctcctcaggctgctggccatggggaccctgagtcacaagctcttcagaaactctggtgctggggaggcaaagctgtctcctcctctctccctttgcacagaaattccagaatttggattcttttgtgacctcgagctgaatgttcaaaatgttgaagctgagttctttttttgtttttcatataagtacttacacacacgcgtaaaaaaaagagccagtaaccaagggcttttcccaggcccccagtggcctggaagtccagcccacactcccagactccagctgggagacacaagagggagggaacttgggtgggggacaccccacaatgatgaggtccttaggagactccagggcctccaggaacccagctgccacccaagagcaccctaaatctcagaagctagccaatccaatggaaggacggtaaggtcttttcagtgtaagcacagctttgcggatgaaagggttgtatttgcagaattcgttggaatcagagctccaagcctagaatgtcctcccaccctctacccaccccaggactggattcctgtcctgtaaggccaactgagctctcctccctcattacctgtccccaggtacagaccttcccctcacaccattggtaactcatctgttgcgttttttcatgtatcctgaagcacctacacagtgggcattcaataaatatctgctgagccgtggattacacagtagagccaccgatgaaatgatgcctacgaacctcctacaaaactcctgttttattatatcaaactctgaaaactgacagtttggactattcttttgttaatcctacaatgagttaagctgactaatggacactcaagtttccatcatggctgcgctcacaaaaaagatcacctgatattttccccttgttactatggaagattttaggtggatcatattcctattcgtatcataggaatcatttactggggaagggtcacttcatttcaattatgttttgaatgattagtcatttcaaaaataaaccatccctccaggttaaatttatctgggactcatggttggataagcttctatgtcattaaaattaattgatgtagcaaaatcagctgcagtcattatcctgtcccatatctgtggcagacccaggaaggtgctcactgtctacacacagcggcagaggtctctgtgtcctttgtcccatgcagagaccctgcctgtaagtctcactgaactgaaagttagatcgggagtctccatatgacctgactgagagcttcatgttgtcaagtgtccatacgaggctaatgtgacactcacgctggggctggcgcattggaacaaatggttcacttcaaacattcacatcccaaaaaggaccccagtgggcatagggagcccagcccaagacgaagtatcagggagctgttgggagcatgggtcttacgtaagagacctggagtagggtggggattggcacccccctggagggcgtctccatgttctcgatgcctctgtttcctcctctggaaggcagggagggcccttcttagctctccacactatgtggaggagtcggtgagatgaagcctgcccagtgttttcactcggtgccgccctgaggtgcgagagccccatgcatggtgccctggccttgctgtcctcgcaggtactagcgcattccacttcctttagagaatgagcactggagtaaggaaggtcagatgtgtgcccatcccggcctgcagcgagtgcttgcccctcacaaggcagttcctggggaaagcctccagcgtgcgcgatttgcagtttagtttaaacggaaggaggtttattagaatcttggcagctctagaagaagactcttaactctccattggctacagatcccggccagccatgtgggtggctccctcaggccggtcagatgttcctgctgggatggccatgggcaccaggagagctttcccttagcactttcagacctcagacctcctggcagattcaggtgcagcattgaacttcatgccgttttcctaaattcaacttccggagcttttaccttttcagagacccagcctagtttatagaagcccagcagaaacttttcttcaatttgctcgtgactcttagatgagtttggagccgggtgggaagatggtatttcagcatcctaggcaggggcacatcagatgaactgtgcacttcgaagccatgatgctgcctgaccatgagggtaacatgggggaggaggaatccttgtcagtatcctgtctgtggttggctgggcagtgaccacttcccctgaccgctgcctggggactgctcctccacacacaacttatctcccaggaagcaattccaggcccaggcaccaagggcccagggttttcctaatgttgaggacattattgcccagtggcatagaacatgggatttggagtcagatctggctggatttgatttctggctcaacctcttattgaccacgtgacttcacgcatgttacttcagggtggccgtgaggatcagacaggatcctgtatgtacagtgtctagcacgtgcctcaaggaccatttgtcctcataaatgtgattattaggtagcaaggcagtgctacatgtggccccacccacggccaaccccacggtgcgaagagcagcctttctgtccttacctgggctttaccctcctctatttccaagctcgtccacccaacattctctcactggatcattaccatgatgccgtggatcatcagcaagtatcggtgacctcatgtgtagtggccattgaagcacagagaggtggaggggctgaccaaggtcacccagtgggcagggatctggctggagagcacacgctgctgcttctccctcccttggactgtggattacaggagagaccagtagccatgcaggtggcaggtgggaggcctagggttctgcaggtatgagcagacacacatcagccccctctaccaccggcctttaatgtctccacatcacacagaggcctgggactgtccagctgtgtggtgcagcggctcgagcacatacactttgggatgattccttgagttgtaaagaaagaaaataaatctccttgagaatgatggatgcactgcttagcagtggaagaggagagctgacctttctaggtagacaaaacagaatgcctgtcaaacattacacttttgttgcagtatattgttccagaatggagcactgcatatttttgctataatgctgtttttgtttctaaatgaatactgcagtgttcttttatgtggaggagggattcattactggttcacagaactttttcagtggtggggaaaaaataggtgcttgtcctcagcaatgcgtatcaagcctagacacatttctgttaggagcacagtgatttgtgaattccctgacagcttaccttttattatgagctctattttaaatagagacatgtagcttttcctcttcaagacaatataacagatacctagaatcttctctgttatctctcatttgttttcaagctagcctcttttttgtgcattttatagggattcttatttatgaactagtttaaatggttcagatcagccagttgttgtggggtggaggatcattaaaacaataatatttacaaatgtttcagcaaagtggctagtcgattggcagatttttcattcatcagctttcctaattttcagaatcttcctgaggaatatctaacaaacgtctctgctctgagtaccatattcctgaaaaaaaaaaattgatctgttttcaggatgggtctccccttttctcaggctaatatattttcttagtctctcgctaatatcctctgcatgcctgtgaaggatgcatcattttctgatagctctgcgcctgaacgccacctctgtcgatggcaacgcttcacccaggcccccaagccaagcccacggtcacgcttagcttccttcccttttccccacttctcacatgcctccaaagcttgtgagctctgcttcctctattgttaaatggctgccccctccccggccgcccaccactgcccttgagaacacctgttcatcctgcatctggaccacaggtgtggcctcattagtcaggaatccacagtccacacttagcatggtcctgccccttattcttctctgcagccatcacagtgacctactttgcagagagcagaatgggaatgcccaggcttgcagacttctgcagcccccttgtggcttcagcccaaagccaaaggtctctgcagcattccgggatctgcccaccacacatcccaggctcacagcagtgatttattgggtccaggccttatactgagttctgcgtccggtccttacctcctttactaacccagcaggaaattttattatctctatttcgcagatgaagaaacttaggcttaaaactgttgtgacttgttccaaggtcaaagccaggatccaacttatttgccatttccagaatgttccatacactctctggcttcccggtttttgtttatgtgttcttcctgggaattttcttcttgagaaagatgacctaactttagccaaacacaggttagtgttctgcttccatctttcatggcccctgggcttgccacgacctagcactgctcacccctgcatttcaacgatctgtttataagcctgtcctctggacttcttttagggtaaggaggctgaggttctgtccatgtattttttttaatctctaaatcctaagcaattggcacagaaatagcacatagtagatgctcactaatgttaaatggctggtttagcatattgatgtactcattcaactagtattttatgagtttctggtacatgcacagaacttttcatatactgaagatgttcaagctagagatagcaggttttctattcagaaatcaccaaattagccacagatgctctgtctttggggagggtctgcacctgccttcgtcatctgtaaaatgtggatcatacctccccacctcatagggcagctgaaatggcagcaaatatccttaatgttaatccagagtcctactgtactgtgttgttgtagagacgtgaagacacataaagatggaaggggcgggcggggaacagctaggcaccaggagggatacaaccagggcagcccagagggctcagaaaagatgtcaaggagagagtaggacttgacctactggatcacctggcgtctagtgggtttgggtgagactgaggctttgtgggacagggagcagcatgagggaagcagggggactgtgctgtgttggagccccgtgagacacggttgtgtgagtgagcggcctctagaaggtggatcaccgtggtgtctgcccgacttgatgctcttcctgtgagcttccaaacctgttaagcaatccagagggctgtttaccaacacacgctactcttcttatccgtgccaatctcatcagcaaacatgctatttcccttattcgtgaataataattattattatttcataataaaatgatctttctgaataattatttaatgccagagctcatccattctgccttagtgaatattgctttgccctggcctctggccacaggttaccgtggacagccgagtgtcaagatcatcaccaaccaggcccttcacacacatgcttagcctcatcgcagacctagggtcacctggtgaaaggcaggtgtgtttccaattggcacgctgaaaaagaaaacctgaaaacactgatttaacatatctgagtattagagatcaatcattttctctggggctcactgaacaggaattagctcaagaaaaacatctttagcgtgttcagttaccattagcgtcaggcacccagcaagcttgtcctgaatacatttcagagtccgagcccaattggaggagtgaggcaggtagaggggagtaaaacaggccttgttttcgaggactgctgctctgaagtcccactgcactacccagtgtggggagtccttgtggcaagctaccctatatctctgagcctcagttccccctctgcaaagtgggtctaataacaaactcctcatatgagtattgagaggatgcagtgatccctgttgggtgcttggcggggagtctggcatgaagttcctgtccttacagtggctgtttcttctgcaagggtcttctcttggtggcagttaacaccgtccatccctgtcctcaaacactagatcccctgccaagaagctactcatagggcaaagatttttttaaaaaacatgacagtgactgtcagtatctgagaagtgtccatgcccagcgccaagaggtgaacaaattcatagctctcccctctggggcttggagggcacccctacacctcggaagggagcctggaatcaaattgccatgtttccaaatttgatactgataataatggcatagacagacgaggcagtatggaaaccagcagacactcgtacttgcaaaggaggatttgtctggctttctaatttgcatgtttcctaatccaaagagggtgcctcaaccgtggagtaattagagagtgtgtgccttggtcgggggaggagggagtttgagaggcaggcagggatgcacgtggatctgtgctgagcagctgcccatgaataatttctaaaagttgccaaatatttagaagtcctgctcgtctgtcatagactggcaaaaaggatggttgagaaaaatgggtctttttcttcccccaggcttagcaacattgttttaaagatttcatctccttttcaaggtggtttaacgctgtggggaaggcaggataagattctactaaactccttcatgtcagggagggctccctcccccaagttcagtagctccttctgtcctgtctttcatgcattagaaaatatagacattaacagctttactgttgcctggaaggtaaacaaggaagctgtgagtatgatatcagtgcgaatctgaagcctagatgattcagaaacgttttgctttcttccatcatttgaattacccactggaagcagaatgaagttgtccgatagaatgcagagacagccgcaggggccgtggctgcggttctgtccattccccactacacttaattaaagtgatgaggtctctgttatttttttatttggagtaatgatcctgctctttgaccagtccatctaaagtaatggtcatagtcatggtgcttaagcgttactgtgattgagggtgaatgacagttcttgctaccccagtgccctaattgatcaggacagctcagtgtcttttgggaaaaactggagtccaagagaaggcagccaggattgaggaacttggctccgggagctggtcattcacagtaagactgcttcaaggtcagtatctctggcatttaactgcatgaagtggagttttattccatatcctttctttataaaattttaatacatcatgaaaagttcacattttagatatactcatagaaacatgtatgtaaacatgttaaaataaaatgtaaatgcacttccaaaaaattcttcaaggttgctactcgtttaaaagactagcttggagatacgcatgctacacaagccactcagcaacctacattctgcccactcgaatgcttgtggcgccttaagccaaggttgtgtgtaaaaggcattttccttttgtccgagtttggaaagattggccagttctgttcatctcagaagtaatttgaatgtttcccttaaatggaatagttccgagggactgattctaaatgctgtagttttattttcttctttgcaaggttaggatgcacaataacgtcgctccgtctttccatatcttgtgagtaatcaggacccaacccagcagcctggccacttcctgtgggcgccctcactggcctgaccttgcctgcccctgccccccttcctaagggtggatttcccctgttccgatgttgtcaccatggctttttcccagggccttgtcgggctccctccctgcttctgttccctggaagcagagtggctgcagctgtgagctccagggactcaccagccaaagctccagccaaagctccaactctgtggccaggctggtccaggcctctgtgggccaggctacttccaaagacccacttctcccacagtaaatatatggccatcccggggctttcctttctggaggagagaacataatggagcatcctctaggacaggaaaatattttaaggaataatccagtatcattattgccatctgcagaatgcctttcctacaccattcctacactaaaggaattacagcttcactgggaggaaggagatatagacaaaagaagcaaaacaaaacaaaaacaaaaaaaaacaagcagacaagcctgggtatagtggctcacgcctgtaatgccagcactttgggaggccaaggtggctgggtcgcttgaccccaggagttcgagaccagtctgggcaacatcaggagaccctgtctctacaaaaaatacaaaattagtgggacatggtggcgcacacctgtagtcccagctactcggggggtggctgaggcagaaagacggcttgagcccaggacatcaagcctacagtgagatatgatcgtgccactgaacttcagcctggactatagagtgggaccctctctcagtttaagaaaaaaaataaaataaaacaagcagacaaacatacattgcaatgtaggatggcttcctccgggaggcctagccaggagtgggttcagcagccccgggccggcattgccgctgccctgtctcctcgctctgtgatgctggtccagagcctcaccaagcctcagtgtcctcatctttaaagtgggtctcaccggccgggcttggtaactcatgcctgtaatcccagctctttgggaggccgaggagggtggatcacttgaggtcaggagttgaagaccagcctggccaacatggtgaaactccatctttactaaatatacaaaaattagccaggtgtggtggtgtgtgcctgtaatcccagctactcaggaggctgaggcaggagaatcacttgaacccaggaggcaggggctgcagtgagccaagatcccgctactgcactccagcctgggttacagagcgagactccatctcaaaaaataaataaacaaataaaaatttaaaaataataaagtgggtcttgccttacctactaggatagttgttagatgtgggagagatgccataagcagtgcccagggcactccacagcccgagaaatctaagctcatctctccttccccttgctggaggacaacaacgttcaagagaacaacaggaagctttcccatgagtggaaggatgttgtgtcagcttctcactgaccccacttcacggatctgtctgctcaaaccaacctccccaacccccagcttttaaatgtgcctctttcacagtttccaacttgttgctcaatattacagtagccatcagcgtcgcagtgttggcctaatggaagtcttcacttggtaaaggtttactttagagaacattatgattggtttttgctctaattctttaagaaactgatagttgtggtttcctactatcatgtgtgagccacaaaccaataaaatacctgatctatttgtagtacaaaaattagcggaatgtggtagtgcacacctgtagtcccagctacttgggaggctgaggcaagaggactgcttgagcccaggaggttgaggctgcagtgagccatgattgcaccgctgcacaataaggcaagagttcagtgtattcttgccttattttttaaaaatcagctgcaagtttaatttcaagttatgatttgtgtttgattggggttgtcaatcgtgcaaccattggcaaagtgccaacaggttctaccaaaattggtcttttcccatgtggttttagtctggtttgactcaagcctgctgccactgtctgcagccctgctccagaaacttctgcatggcattgggttttattttacattaaaataaatcagcattgcattggaagattgatcatttctatcaatcctcttgagatattggaggtataacttccattcctggcttcttcccttgcttggccccagtcaaacatcacgagtcactctttttagcatcttttctggttcattttggggagtggaaaggatggactcttgtaataagttattcctacaaaaaagcagttcccctatctgcagtgatcctcaagtaatcatttcttgcccaaaaaccaatgccctctcagtcccctgccatcatgctctatgtaatactgggttccactgcaccctggaaaccctctgtgctttaatatgttactcaacagattttccccggttgttttatatagctgccccagtaggtgctttggcattatatagactatcttttaaattttatttataattgttgtttccatatacaaatccttttttttttttttgtattagtaactttataccttgtgaccttaactcatatattgcctctagtggctatttttgaatcctttgggattttctacatagactattatgtcatttgagaataaagttttatttttttcttttcaatgcttatgtcttttaattctttttcctaacttattgcattggctatgatttccaggataatgttaaataggagtgggacaaatccttgctttgttcccagtgctggggagaggtattaagtctttcaccattaagaataatttgagctgtagatttgcccaaatagacttaaaattccttagttaccagaagtattttttctgcttcttgggcttcaaacacacctcatgggtcagcttttaaatgtataacaatatacatttaaacaattttttaaaaatataacaatttataacaacttttaattgtgtgctgtagagtctttatttgatatgatttaaaatatctagttttgtcaggactaagatagcaagtagtctattttagtggaaaacatcatgtactgcattcactatttaaaaatagtaacaatcaaaacatgcttccacccttcaccagtgcagacgtgcagtgacgactgagcaaggtctcattcacaggtagatagcagcctaatcaataatcccagtgtgaggctgccatgctgaccactcagaacaaaacaagcgagctaaattcatccactgaagaatgggtcaacaaaatgtggtatatccatgcaatggaatattattcagccattaaaaggaatgaagtactggtacatgctacaatagggataaatctcaaaaaataatactattataagtgaaagaacccagtcacagaaggccacgtatagtgtgagtccatttatatgaaatactcagaataggccaatccataaagacagaaagtagattggtgttgccaggggctggggacaggatggagcttgggagctagtgagctaatagtgggtgtggggtttctttttgaatgatgaaaatgttctaatattagattacattgatggtttcaagctgggtgaatatactaaaaaccattgaactgcacactttaaacaagtgaactttatcgtatgaaaattatgtctcaataaaactgtttttttttaaaaaataaaataacatgagagctaatttaatgggaggctgggcatggaggctcatgcctgtaatcccagcactttgtgagcccgaggcgagcagatcacttgaggccaggagttcgagactagcctggccaacatggtgaaaccctgtctctactaaaaatataaaaattagcagggcgtggtggcacatacctgtagtcctggctactcaggaggctgaggcaggagaatcgcttgaactgggaggcgaagtttgcagtgagctgagatcactccattgcactccagcctgggcgacagagcaagactcactccgtctcaaaaaaaaaaaaaattaattaattaatggaattgatcaggctagataaagattaagctagaaagctggagaaagtgagctgccccagaccaggttgtaaaaggctcttctggggggaggatgggctaaaggaactacttgaaggggagggaaccctataggccacagcagaggcagctgactgatggagcatcttgggggctaggtcagtggccacaccccaccatcaactgatcattagaggttgtattaaagtgtggggtaggacatggttaaaagctgatgattgcagccaaaagaagtatcatctagataaagaggtctccagaagaccctgaacaattaagcaaaaatgggatagtcgactagtgctgtacagaaggaaatggctagaattagcagccaactcctgttaaccagaaaactgactttttttttcttctttcttcttcagactatagccttcactttccctcggtgagtacaaaactttttaaaaattatttttgatgtacagataactagtttaaaataatatgtgggatttaattattagaagagcattgttttcttgagaaagaaagccatatggtcagtgtgttatatttgaattttatgccttaccttgcttgagcaggctcatatcacacctttttgttacatcatttgcgtgtgtgtgtgtgtgtgtgtgtgtgtgtgtgtgtgtgtgtgaaatttggctcagctgcttggtctcctgaaatgtattgttgaggacacaatttctacatgctttcctttcactgacgtgtcgttgcttttaaaagggcctagccttatctcaatggcacacatctgaccagcgttcaggagcgcaggggcacataattgcattgatggtaactgcttcttaaattgatctgctctagagaaaactgctgaaaaggagcttctccggattgcatgctcagtaaaagcagtgtcagtggtgtcgcataattttatgccttttgggtccaggcaatggcaaaattccatgaccttgatgtccttagaaaaagaaaactttaaacaacagagcccttttgcagtctacttaatcaatttaatgctgttaaatttcctaaacaaatcgaaggaagaaaatctaagagctttcgcagtgtctgcagcgtgcaggtgagtggcacgtggacttctgggtgtgcttgcttttagcgggcaccatgataccggtcaccaggaagctgtatttcctaaatgtattgccttgtttgaaaggcactgactccgttctgaaatcattttcaggtcaatggatcaattattgttccctggctggccctcttttttaggcagggtgccctttgtggcactgttccatctgggcataaatgcttatggtcgttcttggtgtgatgaaatgcattttgactgtgtggattgtttctttctttcttgataaggaatgttaaataaaagtaatgattgattaagctagagaagagggatgccttcgtttgccacctaccaagttaattttgttgtctatgttctccattgcatcattataagacgttgttgattctgaatggggaactcttcttgggtaaatgtcagcggtgggatcaaagagaaggatcgttactggaatcatattatgggatggaggattaactatatgaaatctacaatccctgatagcctcagaatcctatacaaggggtgttggctggtcgatactggtttgaacgcttattaaatgtggctttcttcaaaagcaatgcagctgcgtgctttatcgaatgcaaatgtgcctaccgtgctagaatgaaatatttgagtgtcagatcccacagatatagctccttttgaaatacagggctcagattatgatttgttacaagtgtgtgacctttgcaccccttgtctctccactcagtactggcccctccgcaccccattttgccttctgccgcttccaaaatttcctattcctcccagcaagttgacctgctccccatcagtgagtcagcagctcccgcagctgagtgatcctgtgacaggtgcttccggggctcctccacctcccggccttgtctcaaaaccggcaagagattcagaagtaggtgccccacccgaaggtcactgaacgtgtgtgcaggagctgacttcctgtcctccctgcatccaccacgggtagttggcggccagagccgcttcagggggcacctcccttttcctggccccacccttcctttgcctccatttctttctttcttttttttttttttttttttgagacagagttttcctcttgttacccaggctgacgtgtgatggcgtgatctcggctcactgcaacctctgcctcccgggttcaagcgattctcctgcctcagcctcccgagtagctgggattacagacaagcaccaccatgtctggctaattttgtatttttagtagagacggggtttctgcatattggtcaggctggtctcgaactcccgacctcaggtgatctgcccacctcagcctcccacagcgctgggattacaagcatgagccaccgcgcctggccctgcctccatttcagtgggaaagtaaagctctgcttcaggaagatcctgagttcctagattaagggtacttctgattccagaaatctttctcttgacacgaggaaagggtatttgaagcctgggtctcctatctgtgctgccttgtctgctgcctttgtttgggacctgcccactgggccactgatatggtttggctctgtgtccccacccaaatctcatcttgaattgtactcccctaattcccacgtgttgtgggagataattgaatcatgggggcggttcccccatactgttctcgtggtagtgaataagtctcacgagatctgatggttttttaaggggtttccacttaacttcttcctcattctcttctcttgtctgtgccatgtgagacgtgcctttcaccttcagccatgattgtgaggcctccccagccatgtggaactgtgagtccgataggcctctttcttttgtaaattgcccagtcttgggtatgtctttatcagcatcatgaaaatggactatcacagctgccaaggtagaataccagactgatctattagcctgttgcattttcactgctaagcatttgagacgtgtacagagcttcaggatatctattaatggaagggaacttattgctcacttgtgggattcagagacgtgcttttgagtcagttagaactaaaaagatagtccaccttgggcagggcggctaagcccactaaggctggagatggtgccacagccaccgcccacactgggcagctgactgcagaggaacctagtcacacgtgctggatgaacacatcagcctgtgcaagccttcttttctctcatctatccatcacttcctaggatgtgatgtgacatttaagtgagatggcccaaagtaagcatttaataaaagctagctatgggctgggcgtggtggctcacgcctgtaatcccagaactttgggaggccaaggcaggtggatcatttgagatcaggagttcaagaccagcctggccaacatggtgaaaccccgtctctactaaaaatacaaaaattagccgggtggtagtggcacacacctgtaatcccagctacttgggaggctgaggcaggagaatcgcttgagtctgggaggtggaggttgcagtgagccaggattgtgccactgcactccagcctccatgacagagtgagaccctgtctcaaaaaataaaaataaaaataaataaaagctagctgtggttatcactgctactcttattatgatcatcatcgcagaatcatggcaactgtttccaacttttaaggaaggcatttaagtggattgtaacatatatgctggtactatagtgggtatcaaaaggagttccctttactagcagtattccaatttttcacttaaaaaaactatattaatatttgacatctaggccgggtgcggtggctcacacctgtaatcccagcactttgggaggccgaggtgggaggatcacctggggccaggagttcaagaccagcctggccaacatggtgaaagcttgtatctactaaaaataaaaaaattagctgagtgtggtggcgggtgcctgtaatcccagctacttgagaggctgaggcatgagaattgcttaaaccttggaggcggaggttgcagcgagccaagatcacaccactgcactccagcctgggtgaaagagcaagactctgtctcaaaaattaaaaaaaaattgacatccaaaaaaatgagtcaagtcttttttcctgttaagctggattaggaagggtctcttgagtggagtcacccattcccatgttttcctttcctttttgtttgtctttaacaatagatttatgaaaataacactgtagttcgtatcagtgatccaatatgaccaaagttccttcaactggagaaagcttgcaactctgtgggtctctcgcatagtatttaatgcaatggaatttcagaattaagaatttataaaagacgtatcgttaaggtttaaatattttctccagactctttgaggtcttatattgttatacctaagggtatccactagtaagtaaaattaaatgattctgtaacttgactatttcactttggttcatggaaatacccaaggaataaaagaaaacaaaattaacgtgtgaatattcagcaactgtgagtttcaattttaaaatgtacttaggcttcccttcactcgcttgttcttctttagtaatctctgtttcctcctctgtcacttttaagaagtgtgattttttctcttctgactcatttgtgtttcttgatgttgatttgaatggctaccatgacaggaaaaaaaaatctgttcgttttaaaataaagctcagggttctgacaggcagggggaccaccccaagctggtttctggctgcatccgctggggtgacgtttccagcagggcaggagctatatgccccgggccggccttcagaatcccagaaacaagtgagaagcctggtgggcagagcacatataaaattaaaactttctaagacatgtgattcctatttcccttcttcttcttatactggggttttttatgagcaccaatggattccacgggtttctatccaagccacagcgacaaattattctcctggtgactgaattagaagttgacagtaagttggaagaatgcctttggatctgacatgacaaacagattaatccttcatttatttccatttccagtcctccctccccccggaaagtttccacattctttcaagaagtgcctcctaaaagagcctagtaggtaatcctttgtcacagagcaaaggcatgggcgttaatcagtcacagtttcccctaagaggaaataggaacacagatttcctatataaactcatgtctcgtcaccgtgttcacagcagacccagttcaaagttggaattcttctagaaatcctttctcagctgtcagggaaacatggattctccaaggccaggatggtttcccagcgtcttcccaggaagacaagaggtaacggggagctcagaggggtctttcttgtctctttggttttgtgtcatggttgcttctaatataatttctaaagtacctaaaaatcaggctaaagaatattaccaggaaggcgtcgttaaatgaaaatttggcaagcctcttagttacctttatccagctctgtgcaggaaatctgggatctatgcttcaggaaaccatttccagtccaccacgcctcagtcgatagtgcactggggatggcatggaggcattgtctgtttgggcctggtgggttgtcagacagccaagaatccaaggtgaggttcacctttttagaaaaacagtccctaacaattgctggggacataggccggctcgatgacatgggaaaatcccacccattgtaaattagacattttgtatctttgtaatcaaaactgccctcttcatttttcatttgaagtggcattttaattaagtgacacacagagcaagtgtgagggacctggactgcaggccaatgagcaggtcttcaaggagcttgtcttcaggctcctgaggccagggccggcactctgtgtgtaagggtttcctgcctgtgcagttcatgttgcgatattgtcggctgcagatgagtgccaactgcctaaggggtggcatcattcatattgggagaaagaagacaagaaatgtataaatgcttttgggtgtatgagttacagagagatttctcagacccggcggtgcatcaggatgaggtctcgtgccaaatgcaagggccgtgggtggaccagtcctacctgatacaggaactcaccctcaactgcagcaccatcccctgggggtggccccctgtggattgagcaacaggaaaggagatcacattctgctcaaaaatgaccatttgcagtgactttttttcttttctttttttttttttttttttgagactgaatcttgctctatcactcaggctggagttcgttggcacaatctgggctcttcgcaaactttgcctccagggttcaagcgattctcctgcctctacctcctgagtagctgggattacaggcacctgtcaccatgcccagctaatttttgtgtttttagtagagatgggttttgccatattggccaggctggtctcgaactcctgacctcaggtgatccgcccaccttggtctcccaaagtgctgggattacaggcatgagccaccctacctggcctgcggtgactttttaaagctgctcatacacatgaacataaagatggaaacaacagatgcggggaactccaaaagggaagagggagggaggagagcaagggttgaaagactctctattgggtactatgttcactattggggtgataggttcaatagaagctcaaagcccagcattgtgcaatgtacccatgtaagaaacctgcacacatactctcgaatctacaataacattttttaaaactgcttattatgttgcagagtttggtaaaaattatttaaaatggtaagaaaggaaggatctctgtggaactactgaacaaaaacatgtcatgtaatagattttctgggtagcttttctccttgttttgaatagaaatgagcataagcaaaaaaacgaaaactggatttgtgtttattttatgatgagggctgtttcagttctaacaacttttaaaaaatatgttgatagtatttaactgatttcaaacaactctaccaagattcatctgctatcagaaatggtgcagatttcatgttcaagtgctataacatatacatatagatagcttcttaaagctatatatattatattttacatatacatattatatatttaaagctatcatgttagcatgttgctgctgagaaatgaatttttttaaatctcatgtttgtgaaattattatttagaaaaacaggatttgctctatttcctgtttttccagataacttacatgccttatgcttaaacaaaaattgcatttctgataagacacatacatatggagcacttatttacaaagcatgctcaaattcatgatctcaagtgggccccctaaacatgcagaggcagcagtccaggcatgccttgtcacctctcccttaaagaggggaaaacagagacccaggcaggctggataagtgagttgtaggacagtggaaaggaagtgccagtccccagcggtgctctctcggactgaaacgctgctcctctccaactgaaaaaacagtcggctctcattaccaccaccaaaggtgaagttcagacctgccaaaagaaaaacttttccgttatgaaaaatattatttgacagttatgcaagtgacagagaacattaacaaataagaacatatcctgtggattctgcaaacggtttgctggttgataattatattttggaacagttttatgatcacttgagttgatcttggccagagttcccaattatttctgcatgttatctgctgaccaaatccagctttctaatctcttttcacacacttggcatgtttccttccagcacagccagtaatttgttcattcgctcactgagggtttatcgggtttatcaggtatctcttgcaagcttataattgtgcaagatattgaaaaatgaagtggttgattctagttctaatttcaggaaatattgcttagagagccaatgtttgagtcctttctctactaagtataaatgtgtgttttgcccaggagcctagaaaaatgattgattagaaagattttagttctggaaagttgaatggcctctgtaatcccagcactttaggaggctgaggtggttggatcacttgaggtcaggagtttgagagcagcctggccagtatggtaaaacctcatctccactaaaaatacaaaaattagccaggcatggtggcacgtgcctgtaatctcagctactcaggaggcagaggcaggagaatcacttgaacccaggaggcggaggttgcagtgagccgagactgcaccgttgcactccagcctgggtgacagagcatgactccacctcaaaaaaaaaaaaaaaaaaaaaagaaagaaaagaaaagaaagcggagtgacttagacttgtcacttcatcactctgagtcacaccttcttggtctaaaacataaagggctgggtgagaattgtttaaagacatcttcaagacctagagttctatgctctagggtggtgctggtctggatttggagttagcaacagaaatccccagaaagtaactactgcatgtgtcggccatgacggggaccagccgcactcatccccttgtcttgcaggatgtgtctgcatgttttggggtgaatgttttgtcatcttcctatgagaaagcagcactggcctaggggcttcctcctcctgcctcgctcatttgtttttgctctctcactgctctccaaaagaagcaagaacatttttttaaaaagcattttattaatggaaaatttttatttgaaatatggtcatttcctttttataatgttgcttctattcaggaaggaaaagctgagaatccgtgggctttgattttaaaactcaaacagaaatgttagttaataaaacaaaggtatttttcccactgttctgagggccattctggcaaatggttccgggggccgcgtgatggtttatgttgctagaagaagtgattcactgggaaggtgaaccacttcatctcgtcagaaaccatggaaaccctcgatatcactctgttcccctcttaggggagttctcaacagaagacacactggaaagtggatgtcaccgggatgaagttagaaatcccaaaagtagactatttgagcaagatcgaattcaaaggcatcactattttcaaaacctgtttttggcttccttccaatctgaagccaacaccgacattctgttatgctgtttcccgttgtgggcggactgacttaatttttaatgagtgattcactacccacggctgtatattttccgcctgctgagctgagaattaagtcattttcctttaaaaaattctttctgataccagctgagtaatgtggttctcagtgtttgagacaaggaggcatgttaatatcacttaagagagggtgtttaacctgacctaggctcttaagacacggcaagcatgacgccatcatgaatggaatgctctctagaaaaggagcctgtctcattcagctttcaaaaacatttctttctataaaaatattttccaaagttgtgcaattttttgaaacattttctgggggtaatacaaatccaatccatttgggaagtcgcgtgggaggtttcctaatgggaagcctggtaatatcaggtgtttccctacagtgttcgcagggtctcacccctgtccactctgatgactctgactggcctctgtccgtccagcagggatctggcaatcctttctgatccataatctttattagaatagcaccggaggtacttgtggccaccagagctatgtagctcctgtcttgggccccaccccttaccaaactgttccctctcctgggcccctcaacaccactccttcaggatgactctgaagcacaggccgccctatctttacagtgagtccctcctgcctgtcctgagcactgaccagtgagcccaccgggtgagcagctgaagctcctccctgtgcccagcacctcggggcccccaggatcagattttacccagtagaacccaagaacctagaggatgggaaacacagctagcaaggaggtggcaggaggggtgcagatcagaggggtgagaaagggaggctggaggggcaggtggagcactcaggagttagtcatggggaaaacaacatgaccagaaaaggagcagaggtggggcctgtgaggctcaggtaccgaatgtctgtgctaagcaaccacgtgggggtcagcaggtcacccctcttctaaggacatccgtctccctagctgctcagtggagtcacctctgcaaggctctagggttctcgccatccaggttgggccctcagaagaaactgaaaagttctcgcacgaaattcatagcacactgaaaatacaaagggtggcagctgggggtctctttctttgggaatgatttgctcttagcccagcatcttgggcctcagctcggggcttcctgaagccgagcttccctggtgaagaggccccctattcagggcagctgctcaccaacgctcctgggcctcggggcactcaggaaacacccgagttaccctcagggccagaccgcaggcctggagcctctccttttgctgatgcacctgcatcagaaagccagacacctgctctagaaacctaggtaccaggtctaaaatccaaatacagcatcaggagcccaaatacctggttagaatccaagtccccattcagaaaactaagtatcatgcaacaaatccaaatacctcttcagaaactcaaatatgtggtcagaaagccaggtgcgtgcccaggcatttgtaataaccgcgtaagtgggagtcttcatttttctccagaacaagtagcccctttctgaaattcatcataaagctaaaaaataaataagaattgttttatttcagtgaggctgtagtgcatttttttaatgtgtctgctgtgtatatcacagtgtgcctgggatatctgaaaaagtttgaagttgccccggtcacagaatctagggtcctgattgaaaatgagcagagggttgaggaaatagactcactgaaattgcgtattcaggtctatgaaagacagagaactacatcaggggtgtcacagcaacccaggggctcctcttctaagtttcttaaatccccaggaaagggttttcttctaagacgtggttagaaggaaatgaactactaatcttgagaaatgaaaagtcaagttcggagaatggcctgacaattcgcgctatcagagagtgcatgttttctctaactcccattttctactttatccataatttatatgatgtgtgacacataacttgaagctaatgcgtggtggggccaccgcagagggacagaaaacagttgatgtggaagccatgcctgactgtcacagacggggatggggggccagggtctcagctcctggagggggcgagggagcccattgtcctgggatccccagggttcacccagcatgcatcgggtctcaggaacctgcgttgctgatggatatgtgaatgaggggatgaacaggcgtggaagaagggggagtagggagaagacagttgtatctttgcattcttcacagagcctggggcagcacttagcacaaacagggctggctacttaaaacccggggtcactcgttcaaaaggcaggaaaaaaagctttttcctttcttcgtgttctctctctggatctttcatagtggtgtgtgtgtgtgtgtgtgcgtgtgtgtgtgtgaccttctatttaatgtcacattcccccaggcactaggatactctcactgccttcaactgggcaggtagaaggcatccatccagcccccatcctccctgttgaggagttgggggagtctcagttgctggtcggggcaggaagtggacagtcaagaacccagcgggatggagcagaaggtgggccaggtgtgagttgaggggtcataccccggcacatgtcccattgccccaccagagttccctcacaaaacacaagttcagagataaaattcttatgacatatgaaggtagcagttacagagcattaaaccccaagcatgaggggctctcttctgagtgagggcctgagcactgctctgctctcgtgttcccgaagcccaccctgagtacgagaagtgagggtcagagccctgcagggtcctgcccatggtgactggcgaaggactttcttttccgggggagcacagccagagctctcttctctgattccatcattagtttctggaaaggccttccctgcccactctatctgatgttacctatccaacttccagccccaagttactttctgtacccccgttttactttatattgtcattaaagcacttaccagtatttggaactgtggtatttacccattctctcacccgcaagaacgcaggccccataggatagggatcccatccctctgtccccttgcacaagtgctggcatgagagaggcacccagtgaattttaggtgcatgaatgaatagtctttacgtgactttgtatccttttaggagcaagctggatataaataaatacatgaagtcaactaacacctccaagtggctcagtcaattttcagtgatttttctctgtccaacaccagactggcttcagtgatttctttcactgatgtggccacatttgttttgttttattttgtggccatgcagcccgatgtcgcaggggctgttggtcctcctgactccctgctggaacgtaagggagagcctcattccaggtctgcactggccccaaactgggccaagactgcacatttcagttcactttgggtttctgatagcagttctctccccagcccccatccctaggattcctaagagctaagggatgtacccaccaatccaagccacctactagcattgaacttctgtgtcttgaaaagggattttgttttgaaccagtcactgggagatgcgttctaaggtgagggcttccgggtcaataaacctgtaggtgtcgcccaccaaaaaaagtaaatctgacctcagcccagtcccatggtggtgcctattccatcagggcagagagtcagcagctggcaagagaggctcaacccccaccactcctgagagccaggaggccctggcattcaaactcaggcttcacagatccacacatctttgttctcagagaggagaacccaaagtgtgtctcccagtgagttctgaggatgagggaattatgaaaggcaccgtgtccacttgtgagataaaccgacccacctggttcctcatagtgggaggtggctcaagtgtcaagtggcccatgctacctggtcttcttggttttcttccatccgcgtccctggagatggttatgtgctttgcttcttactaaatgtatccagaagccaaggcaagctaggaggaggagtgggatctggatctgcagatccagaatagcaccgcaaaattacccagctggggcttagctgactgtccagaccctgacggtggggtttagaattggatagcatccaagcctttctgtgatttcatcagcaccatcatgcaataggttgtttaaacaccgatatgaaaacctgttttccaacgatgctgcaacatttgattaattcttctggatgggatatcaaggtggctaaagcaagcattgcttgcagttatgatgaatttgctgagtgtcagaggaaaattgtcaggccacaaactaatcattcttaggtgcctcatttagcattctgtccatgtttataccaactctacacgagcacacacacacacacacacacacacacacacacgcacgcaaagtattggagaccaccttgaactaaatggatttgacctctatttgtaaagggtgcattagcgtgaaatggaggggggctttctttgagggttcagcaagccatctagcctacatgctgctgtcttagatgccagccttggtcttaaagagcctggtttctaagggaaaattcatttcatggacatcttgttgccaggaatcagtgtgattcacttttcatttcaggatgatgttgagtcctctgtgttattcccagtgtggacgtggagtagtgactgatgtctaattatttggaagggagagagcttctctaagaaggacatgcaatgtcagaagcttccgttgcttggcaacacgtaactttacctatgtttcaccaaaggcagtttaaagggctaaagatgcccattcaggcaatagtagattacaaggaagatctcgaaagctggcccgtcaaaatcgctttccaccatagaaataaacacctaagagagggtttgggacgtgagtggttgcgtgttgcacaccagcaaacagggtgagaaagaaggcagtggtgccatttttccagaatcatactgtgtacatgccctgttaaagttgattcaaattgctcattccttacagtaaaacctccaacctgagactccccttcagaatgtatgcccctgcagcttccccagtttttatgactgtggcacctcactggaacccatgccagccccttcccatccagctagtatgcctcccggcattcggcttcagcctccagccttgtttcatgtcagcagctgagctcatgaaaactcttctttccaatgaaggaggaggctgagaggtgcaccaatggctggatccaggcacacgcaggctccgagttcacagaagcagggccatcatgtcccggctgttgggagttcctgtgaatgttgcaactctcatttctttttgaagtgggtgtgtaagaagcatgtctgttcattgtggcagcctgagttttggaggccccacaacattctttcctatgtggaaagagttttctttttaattcagaaacaacaaaccttctcagcctcaaaccaggccaatcttacagtgtcatggcaaaacaaagaaagaaagaaaaagaagaaattaaaacatgcaaagcaaaaaacaaatagaaaaaaaaagaacacagtgcaacagtcaaaatcaggttaacttaatgaatttgggccgaacttagatttaacatttccttgaagtttggctcccataaatcacctgtctttttcaaacagcagcctctgaagtacaatccagattatttctccccttttgatcaatgcttttcccgggaatcaaacccagctcttaagagcatttataatgaaagctaaagacagctgaccactaactggccctgaacacccaggtaaactctgagtttgcccacaaggaaaagttatggcgtccacatgctccaaaggggactccatgttcaaggtaatctcccaagtccctctgctgctgctggctgtgaggcatcaacatcctcccccaacctggactcaggggctgcagcctcagaggaccagcgtcgtggagttcaagttcagttcagcacttgaatagtacatccttcaggaagccagggcactgaagactgaaaagcagaatcctaacattcatgtatattttaaagccagagttcacaaatcggagaccttaggaattaatataagtacatgtacatgtatttgtggctatgtgtactagttacaaataagagacaagaaaggagatatacaaataggagaacaaagcatattcaaaaatgaatatggcaaaagttcaaatgaatgtgaactaacaacaaaaaaatatagtttctcatttctaggcatattacttctgctttttcaaaaccatttctcaagttattgataataatacgaattctgtccttaaattgctcagtgaaggagagtaaattaatgtattttaagatgatctttctgttttgaagtcctgctgcttccgtcacatttacaccagcagacacggacacttccatctgtccccattcgtcatcactgtgagatgaagctaagagttcgattcactaagttttatatagccagtaccatgtgaaacacaggatttgatttaagtgtgtggtgtgactgcaatgggaagcagtcgaacacacagcagcaatactgcaccatcaccatgacaaccagtggaaataatggccccctttgggaataaaagagatctcaaatcctgttgcagtcagtagcgctggctgtctgcagtagagatggttttcaatgattgtttcagaaattccttatcaacagaaaatgaacgagacggggagttttcagaaaataaatggatttgcagacaacttaacgtcatcatcgaagtcaccaaagaaagcaaagcagcgactggggaagctgaggctgaagtagcaagggcatgccacccaggctgctattccagtcgctgtgaaagcctggtcactgtctttgccacgcagaacacatctctgggaatgctgtcgatctatgcctccatcttttaaaggctttccatttctgtctggattttttctttatgggaggcagaaataatagtgaattgaatgaaatggagtatataagtgtctagcacagtccttggcacatagaaagtgctctgtaaacagtacttcgcatcaaattcttgggatgaatgaaagtgagtgcctggcgctgcacataagaaaagacgtggcagcaaaccatcctcccgacatgacgtgctgcgttggtgcgtttacgtccctgttccttctgaaagactcaaaattgtgttggagctactggtgcacctttgtaagacctgcactaacgaccgcgccactgggaagggcacttctttatgaagtcgccgtattcccagggagactggtcaacccatacaatgtgaaaaaaaaagaagctatgtgaaaaaatattcccctttgtcatagagaaggagaacttggtgaggctgggcagctgcaggagcctcagtttttcagataacagaacagagtagaccttgagggtccatttccctttttgttttaggaagtgctgtagaagggggcaaagagatctttgatatgagaaggtatttcttcaaagcagcatcgtgcctgaaatagcattgttctttacgctgagagaggaggaaatgggaatttggtgttcaacgggtttaaagtttcagttacaagaaatggacaagtccgagagctctgctgtgccacatcatgcctaaagtcaccgagactgtgttgtacacttttttgttaaaaggtaaatctcatgttaaatgttgttactacaattaaaaagaagccctaggctgtgtttgcagaaaggcactaaccatacatgtgctcaagagcccttttgtgttttcttcacttcatgttgtagttcaatttagttttgctttgcaaggatcctcggaaagtgtatcatcagcaatgacttttattttagaactaaatgtgaaccacggggggaatcatgatcgacattgctcgttgtcctttcttcctccctgtgggctgtgaatccaactcgtcctgggagcagggcgctctcgccttctgttcctctccgagctcagtgcacagaagcattctgcttacccagctgggactgctgactgcaccatcgagcacgcaggttgcactgttctcagcagctacactggattatatgccgcctttcttactgactgattatgaacttaaaacaaattcactctgctgctgtgaattatacatttatttttaagcatttatttcaactcgagatgagcggtctctcctgtaaatttctccctgctggatctttgctctggtttctggtgacatagtgtgagtgccggcagccgcgagcctcagaaggaaaattacaaagggaatactcagtaaatgatgtattgcctttcgcatcagtagcctgcttggaaatgttcaaattatcagcccaggagactccagtgctgtggacatgggtctgaacgaattgatcacctaggggctactgagaacgcggtgctctgtaagtatccatggatgcacagcgcagacgcggaaagggatccccagaatgttccttctgttgctggtttagattgtgaggaaaaaatgcattttccatgagtctttaacttagtattaaatgttgttactggttgataatttaggaatgtcacagcagttctattccttgtcaactctgcttgagcctctctcccggtttctaaaatgtaacatccattagttggtggggtaacagtttggttcaaatgattttctgcctgttttatgtcttcattaaattgatacttaacgtataagtaatccctctttcacctaaaataaaagagctaaattttctttaagcaaacagaacacccttagaattttggacccgcacccttcaactaacatgaaaatgttagattcattttgggaaatattttatatggaagctgactaaccaatgatttgaaatgtcacaacacaaaattggaggggagattttctctagctgcgtttcttttctctctctctctttttttagaagcatactgcttatagtttaagaccatatcctagtgaatgaatagcccaagttctcagagactgtatatttgataaatgctcaaattgtttttaaattgctaatgctcccatgtgggtaagctcagatatattatagctcacctatgaattggttttgatacttatgatgagaacagacttcctgctgagaataaatattagatttcattctatgtggtacttcgtttaaatcagtttatccctgaaccttggtttctttcctacaaagtgaaggaggccctacaagctcttgcactgcactcagaggaagagtcgtccctggcactgtaagaattccaccaagcctcactcacttgggcaactgcccagaagggctcagcagtgttcagacacctcatgtctcagtaggtgaccgtgcccttggacaggaagctaccactccagggccgtgctctctccattcagagtcatggatagtaggagagtctttataaatctgaactctgcatgtaccatcatgagtggctacagttcactctcaacatttgctgtattttgttcacactaagagagaatatttggctatttcatattagagaaactaggctaaaacaactaatcacgttttacctgtaatgtgaaagggcttccattaccttctaatcaacttatgttccatcccagttactctgtgtgcagagagatctgagtgtgtgtgtgtgtgcatgtgtgtgtgtgtactatgtgtgggacatcacatggaaaccagggaaggaatgcatttatagaagtgggaagttctcaggaagtcttcagctttggatctgctttcacactgagcacttggtgtcagtgtgctggagaaaggctgatagtaagtaaagtgtaggcacggctagggcgccggaactttccttgcatagtattttatcccagtcacgcactgggggattgtggacattttgtcagacccccattttaatggaaatttaaatccttccacccccggaattgcttcttcggggctgttcagtgctgctgtgtggttcagtggcctgccctcgtccccaagagtgcctcctacttcaaaaccccaggccgacccccagtacagtgcacaggcaggggctggcagctgctcaggtcccctgttcctggaggaaactcctcatagaggcaaattaaggattatgccctcgcttttctgacctaggggtctgccatgggatgatgacatgttctgggagataacgtatgggaaggttcttagtattaggagctgcggaaaccaggatgctgtggaaaccagccacatgttagctgggcaaacgtaagaaagcacgctgtcatctggagtaaggggcactggaaacatcaccggggccctatgggttgagaaggctgtgggctcacctggtttctcctctctcccgtccctcatcagtaaaccccatgaccctttggcagcagcaggggagatggcagtgttgcctctcgcctgatctctgcaggctggagggctgttctgtcgctggctctgctcgtacttggtagagcacagccactgcctcgggagcacagatccaggccgtgccgaggcaggactgtgagccccagttgtggggacctccggggcagccacggtctcagccgtcgcccccgctgacagccagagcctatgtgtctgtggagggaagagcaaagctgtcagcatgagtatgtgcatattcagctgaccctggactgctcctgcctgtttatttctgctgtgacctcagggtgctgcgggcatcgagggggaacaaggccatcaggaggaagtgggcaaggacaaaattatttccggggagtttgtataaaggtggtcatttgcaggggagctgcctagggagggggcagggaagacactgctgttcaggaggaagtcagtagtggggagcaccctctatctaattccaggggccctaccaatcagaacaggtgccaaggaaggaagatgcagcagtgcgtaggtaggcaggaaaagtcagtgataccagaaggatggatacaggaagggccagggcctgctcctggctgctggagccctgcgtggcacatggtgcaggctcaggcagccatgtctgaatggctgaaaatgatctgatgaatgatgcaatgtcaattgtctttgcagtgtttgggagtcacatatctttttttttttttttttttttttttttttttttttttgagacagggtcttgctatgttacccaggctggagtgcagtggtgcgatcacggctcttgacctcctgggcttaagcagtcttcccacctcagcctctcaagtagctgggaccacaggcgtgcaccaccataccggactaattatttttattttttgtaaagatggggtctcactttgtcacccaggcgagtcttgaactcctggctcaagtgatccccctgccttggcttcccaagatgctgggattacaggcatgagccactgtgcctggcctgggagtcatatgtcttatggatgttgggttttgtgcctctgcagatatgcatgcacagatagaccatttacagtcctgaagagcagagtgggctgtggctcagacactgggttcaaatcctggcttgtcacttccttcctgacctcgggaggtgacttgactgctgtaaggtagtatcctcctcattggtgatgagagacatagctgagatgattcttataaaccactcagcacacgcctgcacgtgagtgggccccatagagtgtagctgctgctgttgcggctgtttccctctctgtgttctcctaatcacactgggtggttgtcattttttatttcactgggaaaaaaaaatttaagtcagctgtactttgggaaaagagatgttaaaaaatgttttccaatacattaaaaatattagcactgttgattcttttagaatcatgctgtctaactcttactttgaaactatactctgttacattcatcctggtgatactgtttaacaaaaaggaaaaagaaaaaaaagaaagtagcataataatatccataaacagtttttaagtgtgaaataatcctgaatagctagaaaattcagaggacattttgcaccatgcatttgtggcagttcacgcgcggacatcaggctctggaattctgccagtgttttaaaattagaactaaagaaatgcgccccaacttaattagtataaatgttgccgtgcaacttctaataatgagtgtaatttgcaatacatgctcaccatgtaatttagcacaatggggcccgcagactgtaggactagtgtttaatcaagagaaatgattaatacagaaaggaacaaagtttagcaattggaagcctttgcaggggcctcatggatgcccattcggatgctcccatttatatcaccccattggcaacaccccacccattcccaccccagcgcgtctgccaggaccacagagaggaagccatgtcatctacttagctgtaggacaatttacacatgagtgggtgcctcagtttccttctctgtaaaatgaaggtgataatggtcctaacctcttattgttggggggattaaatgggtcaatgatgtgaagcacttagaaagggcaaaatgtgctgcgtgcaacaaatgttaggtgttaataacgatgatactacccttatgatcatctttcaagagtcattctccatggggatcttggatgccaggctgaggagggtgcccttcatcccaaagcgcagtacatgttggtcctggggtgatttatctttattgaggtaaaattcacataacataaaattcaccgttttgtacattcacagtgttgggcagccatcacctctacttagatacaacatattttcatcatccaaaatgaaacctgaacccactaagcaatcaatctccatttcccccttctcccatgctggcaaccgccaatcagctgtccatctgtattgatttacatattctggatattttccataaccatccagtatgggaccttttgtgtctggtttctttcatgtagcatttgttttgaggttcacctgttcggtagcatgtatcaatatttcattcctttttaggctgaatcatatctcattgagttactgtgttttgtttactcattcatcagtggatgaacttaggttagtttctgccttttggctatgatgaattatgtgctattacgataatcatggatgagtttttctttgaacacattttcagttcttttggatatatacctaggagtggaatttaaacatcattttatggttaaattttgaggaaccattaaatctttccgtggtggctgcaccatttgaattcttaccagcaatgtctgggggttctaattcttctacatccgtgccaacactgggcttccttttatttttttctaaattatagccatcctaagagatgtgaagtggagtgtgattatggtttgggtttgcatttctttaatgaatagtgatggtgggcatcttttcatgcactttctggctgtttgaatgacttctttggagaagcgtctattcaagtccttggcctgttttttgggtttatttgtctttttgttgttgagttgtaagagtactttatgcattctggctactacgtccttacgacataaatcatttgaaaatacgttttcacattctgtaggtcatcttttcactttgctgacgctgtcttctgatgcacaaaagtcctgagatgattctagacagagactgagcatagtgatgaaaaacattgcatcataaagggaaagactccttcctctcttcgttctcttccacccttccgtatacccagagagaaaggctcagcttggtgctggtgtggccttaacacccattcaatccttgctcatctacctttttcacaaagagagaacaggctctaacccaagagccttacacagggccagccaggaaattcatagtctgtcttccccatcttcactggtgatactcggcctcctatttatactaatgacaaagagttttaacataatgtatttgatgtctgaaaaaatgggtgagtgatatgataaggcttgtgagggtgctaagagaatagcagagtgtgagaactgctgctggacacctctgggcgtccccgagcaggtgacagatgggggatgcccaaggaccctcagtctggtgatgggatgtggggcagagggaggacgctgggcaggccggccataagccagcagtttactggaaatgtaatggctaaaacaatagaggtgtgtggtcccgcagttccggaggctgcaagtctgaagccaaggcgtcggcagggctgtgctccctttcaaggctctgggagggattcttccttccctcctccagagtccattgggtcccgcagtccctggcattccccagcttgtggttgcctccctccagcttccacctccatcttcatgtggccttcctctcagtatacatgtgtgtgccacctcctcttcttataaagacaccagtcattggattagggtccaccctaatccatgatgacctcatcttaactaactacatctgcaatgaccctatttctaaataaggtcacattctgaggttccagatggtcatgaatttgggggacactgtcaacccccagtactgcattgtttgcagctggctgatgacccattcccactgaaggtcttgaggcatgactgacaccactgagtttcccaaaaccaacctggtgcatccactttcactctgaagttctgacctaaattggcattggcaccatcagggtccctgggtatttcacagaagagcggggaagcagattttcacagacaaggttcaacctgagcacaggaattgtacgcctaatcacctaatcaacttgtaggtgcctctcaggtacttaacgttgacttgaaaatcattgcttaatttaggtctgtttcctgtctgaactaaatagagtccaggaggtttatagtctttcatgcttgctaaattgtgttttacttggcttccaactaaaaatgagagatcaaactatacttacgctatgttgatacagagttccgtctttattgcaaacttcaccacgtggagctggaagacgtctgagttcagggatcatgtttttgtctttgtttgcctgactctgccagacctggggtacagcagcaaggagacccataaacatttggggggataaaagaatagagaaaacatagtccgggtgaatgaaggggcctttcctgcaccccagagatggtgtcaagtcccacaaaagactcttttataccagaagaaaagtatttctgtcatggctctgccataaagtattctctctcctccttccaacctccccattgtcactgaatttcaaataaaatgatactctttgctcaaaaacgacaccagagtttgatacagctcaagtacaactccacggctcctagtcaggtcaactcttatttgacctgaacattgctaagcacaattgaataaactcaaactctcactgcctatttcctattttcccattacctgattttctagaagattgtgacatatatttattttgaggtttctctctctctcttttttttaagtaaccaagcaaggggttctctctcaaaagacatacaattctgtggctctacattgataaatatttgaggggatgtggctgagtgtttatagagacctgggtgggggaaaaatactgctcaactccaaccttttttcataaaccttttggctagttcattcactccttgaacaaatatttatgaagcacttattttaatgacgcaagggtttttccaggtaggccagaattaaaattaagttctgagtggagatgtttagaatccacaaaccacacagtattaacctctgttagtgccaaaataatccatggatattatttgggtagggggaggagttaaagtaaatatttccaatggatttctggaatttacaaaatgtgtgtccatttatcctgaaaggggatgtttgtctgtttcaatagagcttcccatacttgtcccgataaaatcttacaatgtttcagaataattcccacgtcttatgagctatgaccctggagatgtgggtttctgaagtctggttgctttcacactgctgggatttgaattcaggctctgccgttttaccagctgagaagccttaggcagattacttaacctctctgatcctcagtgtgcacagctggaaggcaggcaccatgagagtcttgtactgtctcagagagctgctttgggatcagatgtgttctgtagagaaagcgccatgaagacatcatgccctgatcagcatccgcatcttgacttttgctcatctgtgcaacttgctcggcttctgtacatgattgtctctgaaataagagggcaccttctgcctcacacaccttgttcctacattgataaaccctcctacatcccaatactgacttagggatggaaccccgagcttctcatcacacctgctgcttacaggggttgcactggggctggtagtcagcttcctccaggaagaaggcatctctcaccactggggaggcacaggaggcaccacgccacgtgtgcctgtctgcagagtcccctgcccagggtacatgcccctgggaaaactgcccaagggaaacagtgcatccaccatctctgtctgcagccccgctggctcgtccgccctcgcctccctccctccctttcaccctccctccctctctccctcattccctccctccctccctccaggtgcctttgcagcctcagggcattcacactgcacctctggcctcctcctggagcttctggaaggtgagataaagtccctgggatgccaagctctctctggacctgaaaaagcctcccatcaaggagagaaatcctagagatgcttagcaaaagtttcagtagccagggataatgtcaaacagccagtcccgggtttctaaacccagttgatcaatatcccctttattctagtaggtcaggggactctggagttgggggtggtatttcctgggagacagccagcctgggctagtggagcatcccgcctttgcttttggtatgggaaggagcccgacacacctggtctttctcaactcctgcaagtcacgtcttcccagaatctactgtggtaattccggccaggactcaaggatgtaagaagtaggagacgcaggatcaggggcacagagctgccagccctttctcagaagcacatcagctgaataaatgcaccaaagcctccaggcatccagcctgtgtcctcatcctgccagggcccctgctcctcctgtcactgatgaatgcagccagtcagtcaatcaacaaacctgcatgaattcagtgcccagtgctaagtcccagaagtgacagagagacagagagaggagtctctggtctggctggggctgggttactttgtttcctgcaaatcttaccaggagtgcaccttgtcagtcaggggttgcttggaaactcagtcctggaggcccggccagctacagtgtcacctccaacatggtgctggctgtcaccgcaagccacagaagcaccttttctcctggcagctgggagctgcagcatccaggaggggtctcactgtccagcagcctgcacattctggaggttcatatctttgggactgaaaattggggtcccctttaaatttccgtctcctgctcaggaatgtcagtgcataataagagaaataaaatggattttgttgccttctcgtttggttgcctttgagccaacatattttaaagtgtttgtttacattccagaaaagggtaaaacatcaacggcaggtgagcttgatgttctgttaattcctgagagatcagggatgttttcttgtgttcgtgaacaactcggggagagctgaagggtgcggcaggttctgtgagacttggtctctgcttcagggcacggagctgacatttgcaaaggccccctgtgtgccagccagtgccaagggcatgcttcttccctgtggagcttcccccgaggtgcagcgaggtcactattgtgcctgttttactctgagccggaaagagctggcccagagctacacggctggtggactggagctcgggtcgtcctgaacttgtggcccaggctctttgcagtgcgtgtgctgcaaaggacagccctgaaagatgctgaaaagaattcagtcatttaggttttaaaacttgggctttcccagctccttcattgtttaaatatcaccaatgaaatggaggaaatttatttagcacataattgtagtctcgtttcatatgaagacaacaacatttctctcttgtttctgagtggtggcctcacccccctccatggccaggagtcagggggacatatgagtcaccgtccaagccctgacccttatgagagaaagcaggcaagactgataattgcactgagcaatgaccatgagctgagatggtctggaactcacaggggcacgtggtcaccctatttatagaacatcttacagtgatgagggccattcattcattcactcactcacttattcatccctcaagtccttctgggcagcccctgggtgccaggccctttgctggccgtaaaccaggccgacttgtccccagcccttccagcctggatacctgagtgggggtggtttgtagcccctctgttctcacaccagagattacttcccattttataggttgccaaatgtacatgagcgcccacacacagaaaatggcagagcccagggactctgaagcctggtggttgaggtatgcccagcctttgctaaagacagcagagaatagcttggcttggggaattgaaattttttcttgcctgagaaatatgagaactcctccctttgccggggcacagatcccatcaccaccaggtcagggaagagaccatgcggttcccagcccagtgctctctgcctttttctctctcctacttccttctcctctcaactttagatccccagccacaaccgtcaaaccctgttccttttcttttcttttcttttcttttcttttcttttcttttcttttcttttcttttctttccttttgagatggagtctcgctctgtcgcccaggctggagggcagtgagggcagtggcgcgatcttggcttactacaagctccgcctcccgggttcacaccattctcctgcctcagcctcctgagtagctgggactacaggtgcccgcggacacgcccggctaattttttgtatttttagtcgagatggggtttcaccgtgttagccaggatggtcttgatctcctgacttcgtgatccacctgcctcggcctcccaaagtgctgggattacaggcgtgagccactgctcccggccttaaaccctggttccttaaacagctggtaacccatccattaagcggaaggcaggcagaaggttcgtgtcccaggagccacccgtcttcctgaattgccacccctgtcctaagcatgacacttcatttgtacatactttgagttatagtctccagaataattaattttaatatttatggaagaatcgattccgtgggaagaaagccaatttcctgaacatggcatgcggtttaatgggtaattctctctgtcattctaggcaagaaaagtccatttgggtgttaaatttcttggctggggtagagataacagacccacagattgtaaaattccaggctgggacatgggtgtgaggatgacttttgggaattcagatgaatcttagaatgctagttcctaattaatcactgtaacacggcgagtgaatggagaggaaaagctatttaagaacaaatgtttgggcattggtgaagtggttacgtttctagagtgatcctgcaaggatactggttgaggtgactgggggaccccggaggaggcgcgggttaggaaggttctgagcgtggcctgggcgcaccaggcgggtgcgcggtagacgttcctgtggcttacccgacggtgccaccttctggtcacctctggcatagcacccgggcttcaagcttggcgcatgcgcggaagcgtccccgtagcccgaccccatccctaatgcttccaaattcaggtgctaagttgagcccataaaatgcaaagttataacaccatttcactagaaattccttttaggacactcctgtcactctatgcttcctctatctgtcctgttgggctgtgagcatcctaggggctcccccctccaccccaagagggtgccatggctggtgcccagccaagctcagcaactgtgggtgcctcacacgtgccagttcacaggcggtggcctaaacacctggaatgtggctgtcactgtccccctcccaccagctcagagcagaacctgggccagagagtccacctgtgtcctcacccatcctaagggcggaaactgtcccaagatcagagaagggaaaaacctctaagagacagatgacatgcccagggtgacaagatagacagcccaggtgtgaacccaggtccacctgtctcctggctcagagtgacaagattgtgagcctgggtgtgaacccaggtccacctgtctcctggctcagagtgacaagattgtgagcccgggtgtgaacccaggtccacctgtctcctggctcagagtgacaagattgtgagcccaggtgtgaatccaggtccacctgtctcctgtgttggggctcttttcagagtgctggccgcctcctggagcctcccaatgcaactcacctttgcaactcaagggtgattttagggcaataaaatgctccaggatagatctgaccttgtggtcactcaagagtccagcaacttcctggccaataaaccaaacttctccttgccctgcacctgtgaggtctggcccatcctccccatgagcctgagctagtaaatatccagtgtcacctgctacccttgctttgctgagaagccccagatgaagctcctcaccatggcagcgaggcacccacccagccttgggagagaggctcatgccatcagctttgtcctaacagctgtgctgttgaacgcctgggtttctgctcagctcaggagtcattaaggtgcacctgctacttgctaggcatggacgaggcatcatttcctgtccttgggagcttcacaagagcagaggtgggggctagctctggtggcatattcagcacctaggacacctatgtcaaatacaaggattccagtaatttttcaaaaggttggcaccagccactccccacaaccctaccttgaacccactgaagtctttttcaggggagtgtggtctcccagttagactagaaatccctggaaggcagcaaggttgtcgaatctggttaattaaacaaggcctccttccctgctctgtatccagaagacagtcagtaaatatttgttaaacaaataaacacatttctattactggctcttggtcagtaaaatcagcatttctttaaaaattcatgagcgccgtagtgcttcccactgtgagagcaagccatgttatgaaattggcatgaattttctattaaagagaagagtctatttaataaaatactcccaaagggtagctttttgggttactgctgtgctgcattataattttctataattacatgctgttgactgtagtttaccaacagagtgtcagtaaagaaaaacgtaaccctggaactgtattacttcaagtgtgtagccttaccaaatggaaactcatcggttagctgggtcgagggtggcaaagagagtgttctccgaagtcgtgagtagaggaaacataaagttgccctgcagctctcaatgtgtgcggtcaaaacaaatagctggggggatctgttaggaaacctgttgggataatctagaaatggagggagaatcctatcttggagcgccactgggggctgctagtagaaaggagtttgatggacagcagctttaaggggcagcacctgctgagaaaagcaatcctttaaacggtcacatggtagacagaggagggatgtgctatgatctgaatgtctgtgtccccccccagatttatatgctgaaatctgatcaccaatgtgctgggttgaggaggcggggccttgggaggtgattaggtcatgaaggtggagccctcttgaatgggattagtgcccttacaaaataggctccaggggacctatttgttgaggacacagcaaaaaggtcttgaacaggcagagggccctccccagacaccacatccgctggcaccttcatcctggacttctcagctttcagaactgtgaggagcttctgttgtttacccagtctaagatattttgttatggcagctgggctgactaagacagtgtgtagagggagtttcccgaaggcagggctgtgtttgttgtgttcacctttgaatgcaagtaggtgccagtaagtagtggaatgcatgcatgtgtgcgtgcaggaggctaccacggaattagacaagacccaatgtgcccctacctctgccattctcttgaagtgtgcctcaggccaaattgcctgtcctctctgggtcgtggtcatctctgttctagatgaggattctgatcctccgtcccagactggctggcaaagcaggagatgcaccaccctaacaagtctgatgaggaccagggctttggcagggaccccagctccacaggtcccctccaggcactggcagagggtgcgtcccctcacagctggggtgtccagggaggttgtgaagcagcttctctgagttataaaatatggagcgttctctccttagttgcaatttggggtcaaatgttctcccaaacaaccggaggagcagttataaataatgcatgcacattgtttggcccaattaacattcttcagaagatgggggcaattctttgaagtctcttccttcaaacggcgtgtatcgagggggacattgacacacccctgttgggctgggccaagcttttgccctaattagatatttacacaagagacccatgcgaggagggcggatttatttttaataaaagaagattaaaatctgtgtatctgcagcatattaaggaagactgaaccaaattaaaaattctcccacaactttgaatagtgggggcctggaaaaggaagcatttcacttggaatttactaaaagttgttgctttgagtcaggaagaaaaaaaatcagcaatcccccatcccccgtctcaaccccagcttcaccttggcttgttggcgctcccagtgagggcactgggggtggtcagcggagccctctgcatttgacgagccactataaacccaaaccctgtggctgggcgtccatttgtggaactgcagccccaggctggtaggaaggagacagtggagatgacatggctgggaatgggatggggtgggggccatgctgacactctgcaagctcagggaccagcccagagggtcacacaagagtgcatgccacacccggtcttcccgagagaagacagatctccagactttcatgtggactcctctgattctaaatatttcaaactaatttaaaacctttgtaaacatatatacttcctcttccaacctagaaattccacttacggttgttgaccccaaatacatgaagaaatgtgtccacaaaaagacctgtacccaagcattcatagcaaagacctgtacccaagcattcatagcagctttgtttataagagcaaactaactgaaacaactcaaatgtgtatcaagaggagaatggggccgggcctcgtggctcacgcctataatcccagcactttgggaggtcaaggcagaagaatcgcttaagctcaggagttgaagaccagcctggacaacataggaagacctcttttttttttttgagatggagtctcgctctgtcgcccaggctgaagtgcagtggcgtgatctcggctcactgcaagctccgcctcctgggttcacaccattctcctgcctcagcctcctgagtagctgggactacaggcacccgccaccacacctagctaattttttgtatttttagtagagatggggtttcaccgtgttagccaggatggtcttgatctcctgacttcgtgatccacccgcctcagcctcccaaagtgctgggattacgtgagctaccacgtccagctgagctcatcttataattaaaaattggccaggtatggtgccacatgcctgtagtcccagctactcacttgggccctggaattcgaggttacagtgagctatgatcttgcaactgcactgcaacctgggggacagagcaagaccctgtctctaaaactaataaataaaaggggagagctggagagcagatggcagcacaatcacatgactgtatgctgttctgcagtccaaaggaatgggctgcggtgcccatgagaaagcggatgggccttgaagcctgtggcactagagaagctttaggacacgagctgcgtgtttccacttagaggaagctcaagggcaggcaagggcatcttctctggaggtggagatcagaatggtgtgggcttcctggggttgcaggaggggactttttggtagactgaaaagggacaagaaggaggtgtctaggatagtgacagatgttcctccaggggaccagggcatggaccatatgggggtctgcagcagacatttgcccaaactcatcataccgtaggcttaaggcccatgcacttaactctatgtaattacagcttttcaaaaaatgtaaaactttcaaaacacagaacaggtcaaacccagtaatacaggtcacatttagtcagcgggacccaatttgcagcttctgttacagtaaatttgtactcttatgttaaccaggcacccccagcccccaggtggagaaacatccttcaccaccagccatccatgtggtgagaacctaaaactactctaaaagcatgtctatttttttagaccagtgccactatgcctggccaattttttttttttttttacttttttagagatggagtcttgctatgttgcccaggctggtgaggagacagctcagggtccagggaacagcgtgggccaggctgacggcggtgagcagagggcagttcagtggcctgggaacagcacccaggtggccgagatgtgtcggtccctgggaggttggcacagctcagaggggaccacagggacagccagaaaggtctcatcccaccaaatcactgcccacccagtggccccagtcatgctactgttttggatttgttggtatgacttgccttttcacacaggtgagaggaacagactcaccttgtttagcccaacgtggctgaggcacagcagcttcctgccttcctgccggggagacctgtggccgctgtggagccggtgccgccctggccttggctccctctgccccagaccaaatactcaggggtcctgtgaggtccctcccactcctcctttaccttagaagagtttaggaaatgtgggtggaagatgaggcacatcttggaaagtgtaaggcagacctcgtcatgcacacgcattgagcacctgctgtatgcgagtcagactgcagaactgaggggtcagaatgctgggaggagacagcccagcatccagtgagcagcgtgggccaggctgatggcagtgaaaagagggcagttcggtggcctgggaacagcacccaggtggctgagaggtgctggtccctggagaggttggcatggctcagaggggaatggatcaaaagagtttggcggggcaagtggggcgggcattaagaacattaagaagagctgagagctatagaaattggaggtaagaggcctggcacgcttgctggatgggccagtgtgcacattgtgagggctgctgcccgagctggcctcaaagaggagtctgggttcaactccaagggcagtaggacagggtgagaattttttttctttctcacagacattttttagaggagtttcaggatcacagcaaaatggagtggaaggtacagaatttccatatgccctccccacacaggcacagccttccccaccgacaacatcctgaaatggaatgggacatttggtaattggatgacctactctgggacaacgcagtcacccagagtccatactctatgccactctcagcctcggtggccacattctgtgggtttggacagatttccggtgaccaggacccgccaatgtagtatccaaggggcttcactgccctaaaaattctctgtgcaccgaggcttttggaggcgcagaggctttcactctgaaagctgcagggggcagttagaggggtcaggctggaggctgtggtacaggaggtgggtaggcctcctcccccagcctggctcagacatccactgggcgtccttccacaaaacgaccttctcggagctccactcggactccactcgggcatcctgcatgcttcgcatcacacacagggacaggtgagggataaagtacccggcaggagcccacaggggctgtgacacaggagggtctggcacaaactcgctgggcttctcacgcccacaacagatccagtgcctgccctgcagagcccagcagcccgggctgagagtggaaattcccagagcaactgagaggggtgcctgttccggaggtggtaggagctttggggctgggggcgtgggaggtaggagctttggggcggggggcatgagagtgacttctgaaactcggcatcctctgaaacctcacctctaaatcgcacggcacattccttcttgactccagctgggccagaggctccctcccggctgctggatgctgctcctagcagtgctcatcacaggcaccagacccccaggggctggatggacccatctgcacagcagttccaactgcatctcacacacgttaccatcatctcgcagatctgtgtcatcctgacgcttaaatttcctgtcttgtggtccaatcaaaataggtcttactgacccagccaaaatctatattcgtgaggctttgacgatgcagatgtttcctgctattcctagagcaggaggcggtgttggccgaggccctcgccaacagctgttcccagaggaggggggctgagagaaactcggagggaggagaggccgcctccccacagcctccatctcctctgcgaccagggaccctcactctcctctgctgaagcctaaagctgctcccggccagttctcccagatcagcaccctcaggaaacctcaagagttgaaaaccaagacagccagaaaatgggggcttctcagcctagtggggagtactgagccctgggctctccaaccctccaagccactccagtccccatctctcacactctctgcatctctgtctctctctctctcacacacacacacacactcacacagcacatacagatagacacacagatacacagtgtttcagcccatttctacagaaatgactaatgtgcacactgcaccagggaaacaccacattgaaatcaaggactccagtgggtcaggagccgagggtgcatccacattgaaatcaaggactctaataggtcataagctaagggtgtattattttaccccaggcattggggcatcccctggtccctgggccccctctcccctcccagccccagacaggatcgtgcagcggttccatcaggacttgggaagctgagaggcccgacttccaatcccagccctgccccttgctcactgcatgacttgggcccattgcttggcctttctgagcctcagtttccccagctgggggagtgaagatggcagttcccgcctcataaggttgtgaggacaagacaagaaaacgcgggtggatcgtgtaggctgacgcccggcactcagaagatctccacgcgatgctgtttttgcggggtcactgccctcctctcatcccagcgtggcctcagccaccaggaggcctagaactctgggaaaggagcagtcaggaccggacatggctctaggcttttcttgtttctctaaaatactcagagtccagggtccttcgtgggatctgccttgagtagccagagctggcacaaagggaatgggaaccctgaacacgggtttgccattccggggctctctggtggtgtgtcctatgtcagcccattcattcattcattcattcattaagcacgtgttcatcagctgccccctgagcatccaccatgtgcattaaggttctccccaggcctctgttgggcggggagctcagcctgaagccaggctgtgagtgggatgggagggggtgccagacagggtcctgcgagaggtgttgggcccacagcacccacggtgcctctcccagaggacccctgcccctctcatctgggcagtgaggatggttggggtggacggcctggctttgcccaagcccagagcaatggtcccggtacagtgattgttattaagttctcagagaaatgcccagagtccctcaggttggtcgacatgtgttccttggactcctcaaaggctttgccagagggtggaggctgtgtgtgtgtgtgtgtgtgtgtgtgcacgcgcgcacgtgtgtgtgtgtgtgtgcgtgcacatgcacgctggacacagggctgtggcgtgattgtcagatcggaggcagagtaattgtgctcaaagcaagaataattaataagcccacacttttccacagcggaccttcttattaaagtatcagaatttaagcagcccaatgttgtacatatggatgtaaatgagatacacattgtccatttgaacagctctaactttgtttctgtctcaagtggtacatctgcactaacacaaatccattttttacttgactttgatttgctgattaatattatgacgctgagttcaggtatatgatcaggttacaaatataatcagtttttcactgaatggctgttatttggtttccaataacagaaacctgtttaaggatatttcaacaaaaaaacaaacaactgctgagtcttactgtggctcagtatttgggttttagtacaagagtaactagataaccctggacgtattctcttcttggtttatattttttaaaaagaaaagaaaaacagctcggttttgacattaaggaaatggccggtagcttctggtttctctgggcagccctgctgggaaatgctggtccttactcttctgctcactgccctcctggtgtcccagtggtgggataatccagagcccacctcagacaagttctaacccagatgagctcacagtactgccatcctgctgcatcctgagcgggcagtgggtttccagcgtggggccccattgtgggtgatggaatttagaggaagcggtgtgatttgataggggtggttcagccatagctcagccctgtgggtacagtgtcttttttttttctttttttttttcttgagatggagtctcactctgtcgcccaggctggagtgcagtggcgcaatctcagctcactgcaagctccgcctcccaggttcacgccattctgcctcagcctcccgagtagctgggactacaggtgcccgcccccacacccggctaatttttttgtatttttagcagagatggagtttcgccgtgttagccaggatggtctcgatctcctgacctcgtgatccacctgccttggcctcccaaagtgctgggactacagacgcgagccaccgcgcccggccgagtgtctttttttcaggtgggatggtggtgaactcaataagagataattttgcacatcaggctagaccctgcatctgaagtggcagagggcattcattctccaggtgccacacaggcctctgaagggactgtgacctcctgggggcaggggtgtgctccccgacctcctgcgagcctccttagcactgagcaaaccgcccccctccccgtgttcagggatattcgctgaaatgagccaggtgggatttaatggactctgagtacaactgtgtagcctcaggttgccttcagcatccaggccctcggggcaccgccatgctccccagaacatgagctctcagaaaatgcagtctgtacccagcattagcacaatcagagccctggtgagaaggtgaaactactgtccttggcctccaaagcatagaatgcccccaagccaatgagtggtcatgaaatttcccacctcctgttcttctcaccagtcagtcagagacagcgcctgctgtgagactgtgccccggagtctcaccacagcaggtcacgggaccacaggtgcctgctatgaaggagggaagacaggccaaaaggcacagaaaaaataatcttgcagttctaagtttcttgctgtatctcttaccacgtgcttcccgtgaggctgcttttggctggagggtcagcttctttgactctgatggcgagtcttcattcctgttcgaggctttgatttccagtagttggccgcaattttcaggactgatcctagagtatgcattcaattattgatcatcaatagtttattgtcccatcactgcgtctcccctggacgcggtaatggaagtattggtttattcatggatcctgtttgaaggacgtgacaaattgattttctgacacagcccagataaagtcaaatgaaagtcacaaggtagaagaggtggtcttgacctgatcatcacattgaaagtgtctttaccatgttcggaagccctggagaatctcacagcaccacccaggcccctcctgagtcggcagcactgagtccccaggtgcacctggcaccccgctccctgagaaccactcagacaggacctgagacaatgcccagtgaggaaacaaggcagggccagggctgcccccaggccttgtgaaagtgggagctgtgcttctcacaaccttcctgtccctgaagggggaatcccaaggccccactgggcattgtccaggcgttttgtgaagctcgggtccagaacaggagttgcctggcagctttggaatcgacggcccagggcctggcctgccccgtgctgactcccccagtgagagggaggcacacacctccctgtgctcctcctggtcaccctcccacagtttcactggtgctgctgctctggactctgccctgcacctccagaggcccctccagaaagtgcaagaccatgagagggccctgactcacaggagctcatgttcaagttcagagagaaaagcagacagggaggcacacagcgcagtggatggccagccatcatggccagcggagacagctagcagggcttcccaggcgggcacaggggcctgggaggggcgctggaggcaggtgtgatgccagagcggagtcctgtgaacaagggccaggagatgacggtcgattggaaagaaaccgccatcgctgctccaaagtcacccttggaattgtagtaattttgacaggctgtggcagctgaacatcttcattaatgtgaagacaatcatgaagacaatgaaaatgactctgaccacctgtcccagggagtagagagcgccatctgcatttgctacagtggcccccgtccgtggttccacttccacagtttcagttacccacggtcaactgtggcccaaaatacatgagtagagtgaacaagatagtttgagagagaagagagagaccacattcacgtgacttccatgacagtatattgttagaattgttctattttattattgttgttaatctcttactgtgcctgatttataaaataaactttatgtaggtatacatgtataggaaaaagcatagtatatatacattatataggaaaaaggatagtatatatacatagtatgtataggaaaaaggatagtatatatacatagtatgtataggaaaaaagatagtatatatacatagtacgtataggaaaaagcatagtatatatacatagtacgtatagaaaacggcatagtaactggtctaaaataggtgagtagagtacaagatactttgagagagaagagagagagcacgtttacatgacttccatgacagcatattgttagaattgttctattttattattgttgttgttaatctcttacagtgcccaatttggaaaataaactttacgtaggtacataggtataggaaaaagcatagtatagtatatctgtggcttcaggggctcttggaccgtatcccgcacagataagcggggaactgctctacataaatcgatggtgctttccattagagccacggcagtttctaaaggaaaaagtaacaagactgcaaaagtattgagggcagtgtccttggtgtctgtgaattgtggtttacttttgtctgtggaggttaaccttgctgtcttcagggcacgctttcgtgatcataaatagtctactctgtaataatattttggtcttggtaagatccaaagactatcccaaacacaattatcttgtcactgcttaggtggcaatttttaatgagtaaagaattcaaccggtatcttggtattggtggtattagtggtatatattatttgaaatgacaatcagctactacaaggatgggaaaaattaattattggtaatctttgaaactcatgaagaattgtgagacattgtacattgttctcaaatttgagattaggtaaggaaacctttgtctttcatctttggttttatgtgacccccattcaggaacgaagagttatcactttaaggctctcaagggcttccttgctttgttctttcaagacaagaaggataatttttctctatagggaggaaatgtatacagtaaaagtctagctatatatagtccattctgtcttatttggccccagctattattgtaaggttcacttctttaaatgggtaattagccattgggcttgttggttgttgattaaatgaattcaagtatggctttagggtctgagaaagcgtgctttcgagaaggttccttgtgtctccagctatctgtgggtctgtcatctttattggaatccagatagacttaattctcacaggataagctctttactttttattcattttcaagaggacactatgcgtaattggaattacgcaaattagaggattagagtttggcacacaggaaattgaaattatcccttaacagacttgctgactcgccagcgttcttaccggtccttggcctgggtggagtgctgttgcgtcctcgggcagaccctgtgcctgtgctggtcccacccctcagcatctgggcctgcccagtccaagccaggcagggagccccaggaggaagcccatcaggggacttcctgcggctttaaaatttcttttgctttttaaaaaattatttgataaaataaagtttggtgtataatccacaggtgtgcacttggggcttctgcagtgtttatataagaaagcattgagcagtggctcacacctatatttccagcactttgggaggccaagacaggaggatcacccgaggccaggagtttgggatcagcctgggcaatatagcaagaacccatctctacaaaaaatataaatgaaattaggcaagcatgatggtgcataactgtagttccagctactcaggaggctgaggtgggaggatggcttgagcccaggagtttgaggctgcaatgagccatgatcatgccactgcactccagcctgggtgacagaatgagatcctgtctcaaaaaaaaaaaaaaaaaaaaaaagaacagaaaaaagcactgaaatgaattatgaagcattgttaactcttagacataatggattttttaaattcttttatgacaaattgccacttgctgttactctgccagcatcagggaatggggtcagtgctgtaactccccagtgaggacccacggcttcagcttctctgtcttagctttgctggagcttcttcttcactcaaggaaaccccatctgcagattccaagcctcccactggagaggtgaggtcaggacgtggtcatttgagtatggaaatagcgatagattttattgccccactttacagacgagtaaactgcagacatcacctccgcagtcatccacacagtcaggagtaggcctgggcgtcagagccggaccctgtgcccccatcctgagctcctcccagaccctgcagcttctccatgcagcctcatgtggagggagcccagtgccactcttcatccccccaggaactccccaaaccctggggcctccctgcctgcactggattcgggtctgagggcagcactgcccacagagccctacatgtcgggctggactttgccaccaggacctgctccaggggacccagggaagcagcccctccccagctcccagcagcctcctgggtcaccccctttcccagggcactgtctgttccccagggacctcagatgcctctgaacacacctggcttgtgtgtatagggtgcagggggcatgtttatatggggagggagacaaatatttttgtccatggctgcctttctttggcagccagagccaggtacttccagaagtacaatctcccagggtgtgctcagaattcactttccagcaccccgagagtctcccatgtatctccagaaaccccaaaacaacccatccctggcaggccaagcatgcaggcatggtgggtggctatgtggcctgactctgcacggcccaggtgggccccaggctgcagaagaaagaacacagcacttcctccctcaaacccccagcgcctctctggttggccagccaggtgcggtgggcaaatgcttcaccatctctgacctccctgtcctcatccatctgtgttccaaggcaaaggggcactgcctgtctgggctactgtcaggggagggtctggcgagaggccccctgcacgcttgccagccagcacaaagcagtatttatcccttcctcctttccacctggctggcacctgacctctccccagtctgtcttcagtgaaggaagatatagaacaacgcccacttccagtgggtcagctcgggcttgtccggagcatggctggtcccctgcccagacccctggaggacactgtggacccattcaggtccctgcagtgatagccagaccagggacaccaccaagcccctcatccttatttctctgcctgtttcccctcccactttttctctcttaacactggacttctttgccagtcttttagtagtgtttcagtgattttacatttagacataggcaattacttttgttcaaaacattcagctccaaccttcaccaactgagataaaaagcaagccctttgcatccttttctctttaacaagcaaagctgtctccaaagaggccagctcaccgtggctacatctgaaacatgctgagtcaacaaatttttaccattaagggttttttattgttattctttaaatctttcatccatgtaagtatattcacacttgaagcttggaaaatgtctggattttgtttctccttcagaaaacatactttgagcttttgtttttctccatgtgtaacaaataatcattttgccctatgaatcatattgtcctgatttcatagaaaacaggtgcagtattagatacagacgcagagagggtcaacccacagctgtggttttcatgtctgtgggcaggacttatagtagtccctatttcctagagagggtattagcaggcaatgaggtgacgcttaggttagaagcgcttagcacagggcctggtgtgtactcagtgcccagaaaggttgatttgtattattagcaattattctgagaaattaactctggccttgctggcctgtgcttcctgcagtgagaggcctgatggagcccagtggtctgtgtggctgtctgcttcctagcactctccctcctcggctgcttttgtggggcctgcatggtggagggatgcctagcaccccagaattcagcccctactgaccagcaccccacaggaggcaagtcaaagtgaggctctgagctgtaggttaaaggaggtgcttgtccactggccaggaatgccatttccctgctgtaatcgtccttgttgaggctgttctgctctcgggtttatcagaagataaaggggtcagcctccgcctcctggcctttgctttccttcctaatccagaaacatgtgggtcagcgcctgcatgaccaggatggatactggaagagtgggctatggagcctttggaaaggtatccgggcatcatttccacaccagcattcgtgttatttctccgtgcatgaatggatgggccttgaagagcccgaaaaagcaggctgagctctcctgaaaggggataatccttggtctttctctttttgccaaaagatcctggataaatgaaccgagagagaccccaatctggaccagagatggtgcccctgacgtttgagcccacctggctgaaagagggcaggtgacagtcccaggacacccacaggaggctactcaggagcctgtattttgggcagaaacaaagaagctgagaggcacagtgaggtgggacaccagcacgccgagggtctccacctccccaaggcaggacaggccatggcagaggcttcaggggagggttccggctttggctgggggcgtgggagtctccagaggcagcgagcccaggacactgatggtgcagaccactggatttctggagaacactgtacttcgccagcctgcggcagacacattattcacagaactttctccaaaggaggttagccatgtttgtcaggctcagggagaagtgaggaggcctccttaccatcaattaaatatgggatccggatcaccctgcgcctgtctcctccccagtcctttctgcgacctcaggtggcctcactcctggcaggcagaagggactcgggtcacacacagccacactcggggattaggacctgaaggatatcattgagcccgcgcccgccccaggctggaattgctgggccgtgatctcctccatcttttctttctccagctgcctctgaaggtcacagaatctgcatttcttaggaaaaatggggcaaaggtgagatggtacacagcacacctggccctggctcagccccccaatgtggacaggttgcagaaggccactgcctcgctgcaggaggctggccctcagcgcccagcagaagcggcagccccatctgtccccgagaccccaccccctcaggcacagctgagcagcccgccggggcccagggttccttggtcttgggttctgatgccttcattcccagaacacgaagccaaggccaggagtcgggatctgctcccaggaagaagcctccatccctgcggagggcttgagaccctctgggatgcgacccagtccccacccatggccactcacttccaccctgccccggcccagccctggccaccccagacgtctggccctcgtcccgaatgctgtcccctctggcctcagctgtcctcctcgaggagcgctatcctgctccgtctctgctcagggtccccccagaggcctcccgctgggatttgtctccactttgcagttgccttttgccccacatgccccgtcctgtggttatttaccttatgggggcatcctccctcttgattgcgactcctcggaggcagataagagtgggtggctttcatcttccagctcccaactcccagcccactgggctgctgtgctgtggtgcacgtgagtcatcagatgccccaggcggaaggctcgtgggggctcagggccccagctgggggcagagcacctcaagaatcctctcaactggctgcaggctcctagttcttggtgacttagtggatggaagacccacctacaggtttccaagctgctgcctttctctaacacatgggcgggtcctggctcagcactattgttctccaccagccctgacccagcacccactgtgagccaggcctgtgggtgtcagcactaaagaccagaagagtcgccagcccatggggcgtctgaagcaggtggcacaattgaccctctcagcccagacaccacccagggccttctccctgacctcggctacagcagatgagaaggacactgtgggagaaccgagtcaggatgcccaaactggatgacttccctgagggcggtgcactgctgaaggcccgtgggtctccgttctctgggataatgccagactccagcagaagctttagtctatttctgaatagagaaaatctgctgaaaaacgtctattttccagctgaataaacaagcctttcaagaagaggaggatgaagaaaagacggcatgtgtccaagttgagctgagacggactgtaagcccaggcctgcctaaggcccccacagtgggcatcaccagggctggggtcttaggggccgccagcttcctccacccacctgcctgcacagacagctcctgggcatcaatgcctcagcagtcagatccgcccaggctgcttctgaaagagttttgtagagagattgctcttctgggggcggggacaggacacttatctccatccccccaccaatcatcacaggaggatgaaaaacctcaaagaaagacccagggggcagacacaggcacagatcccagtggagatgcaggctccggaattgcaggctcctttttggaaacggcagaggctccccatgtgggcttccctcacccctccgaggccttcccaggaagacttggtggcagagaccgtgtccactcagcaaacaccaccgttcgctttgctgagtttgcagtttcccgcagcatggctgctgccctggcgaacaacggggccacgccgttacaataaccagcccttgcctgatgagttacagtttacaagactcactcatttatgatttcgtgggattctcttgtttcactcattgggaagcaggcgcagagaggttaagtgttctggaaaaggccctcctctgggggtagagggaggggaaagagagagagagagaaaggatgagagttaatgagaaagagaggcagagagagacgtcgaaccagctgggtcttcaggctccgtggcccgggcccttcagaaagtgccgtgagttgatgtgctggagagaatccacgtgtcagtccccgacaccttatttcttcatggcgattcctttaaaaacacccgtggagcacctcctctgtggcagctctgagaaggcaccagggtagagacctgcatgagagttggcctctgctttgagcagtgccgcgtgcatggataatcctgccggcaaggtcttcctggacatctctgaacactgagggttggcgttgccaggggagactcctggtcgcccgcgtcctattcaggttctgtgggttcccagggccctgtgctctctgtcccctgcaggcctccctcacctccccagcctccttggaccggctgactccctttctccccaggcagccctccagacccctctagacaggggcaggcaccctgcagggcgcccctaccacatcgtgtgcttcccccgcctaacacatggcagttgcattctagttattgaagtcttttctctctctggctgaatcgcaagctttggaagtggggaggtgggaggaggggccaagggcagtgttggtcttgtttagttgtctctccacatcctggcagtcaactcttagtaaccaatgctgaatgaatgcatggatgaatacataagccaaccagcaggtactcttgagtctacagtctccctcaactggcagctgatggatttctttgaaatcaaaagtgtagcgtaaacctacccacagaagtttagtccagtcatcatcacttttggaggtctgatccagggtgggctgtactcagcgaggcctggggtgcagctggccagcgtctcctctgtcagccacacccctgagcggaggctccgtggaggggctgcaggcctcagctccgggtgccctcttctcagtgggagacagcgggagggctgtgctgtttccaacattcccaacacttccattgtttcacaccattactgccgagccccaagggcggatgggtggagccatgttgtgtgggccctgctgttttcctggccagggtgttttgggcagtggttctgtttcctatattgatgtttcccacgaccctgccaggtagcctctgataaagcacatctcttctgagtgagcaatggcctttgggggccatgaagtacctgtgagtgtgactctgccagatgacgggcaggtgcagccatcagtcggacctgagcaaggctacattccttacctggctcaggtgtgaatcttcagggcagcaaaatgtggatgagactgagtaaggggagaatcaatatgtgttttgttgagagaaggaaaaatatgagcaggtctcatgacagaggggtcagagatctaaatcttggagggccccagggctcagttccaaccacgccaccccttctctctgcattctctccagggggccgtatttccctcttcaacagagacagccctattttctgcttgctatccctgtgtcctgtccactttcacatttgctccatatttttcatcttagagcaattgaaaattaaacctttatttttttgaaacagagtctctttccatcacccaggctggagtgcagtggcgcaatctcggctcactgcaacctccgcctcctgggttcaagcaattctcctgcctcagcctcctgagtagctgggattacaggcgcctgccaccacgtctggctaatttttgtatttttagtagagatggggttataccatattggccacagtggtcttgaactcttgacctcaggtgatccacctgccttggcctcccaaagtgctaggattacaggcatgagctaccatgcctggctgaaaattaaacttttaatgttgaaatgatacttgcattaacagaatccaggaaggttctgtagactgtccacttgtgcctccaagcttctgctgtgctctcctcataggatggagacacctgtgtagggaacaggctctctttaatcatgactaaatccggaagatgacagccaccgtcttctctctcttcaccaccctttcctaacacaatgtcagtaacacttacctttcaaggacaacaggcaggttagaagagaaaaagtgcccttggagaagagtgggttagaaccaactcccgttggcctcccagtgtggcgggaggaggcttcagggttgggactcttgctggccacttgtggcaccagccagttgagctgcggcccacaccatggcctgtgagatgccatggtcatcagcacctatcagaaacatgagaaattacagggtagaggattttgaaatatttgcaggaagtcagtacaacttgtaaaaaacaaacagtctgaactctcttcttccatgggcttgggcatttatcatatggtgtgaatctgcaactctatttaaattatgtttcaatagaactttctgaatttgccttaaacttgtgggtcaggaataattagaaaaggcatatcaagcactgatttttttccagaaagttgatgataatgttggtataatttgtaatttatacaaaatacttataaacatttactaactacctcgggggctgtaatggtgtcgctgaccacgtagaagccaggaagaaataaaaagctactaagagatcatcagtattcactaagcggctgcttgaagaaccctgcacctgaggatgataaattgaaggtgctttgccaactgctaacaaagcgtgacttttcacttagctcaaacgactattctcagctaattttgctcatcttcaattccaggtttcactgtgtgcttacagaaggtgaagtgatagctgttagtgctcccaagggtagaagaatttcacgaaccatcagatgatgccagtgttacatcagtgtcattttcaagcaggaattttcaaacaaaatcagtccattcccatagcagttttattttatttttttattcatttcatggaatcccaatacaacttggatgttcctcctgtcaaaggcaagaccttgacttaattactaatgtcacaggaaaggcagtggaagagtcagcatcatgataaaattatttgtgggggaattatgaatatgattatataagtttgggtaaagctcggcatttgtagtaaatgtattgtacttggaattgattatggtgtacacatcatttatttacttatttatttattcaagatggagtgtcgctctgtcacccaggctagagtgcagtggcacaatctcggctcattgcaacctccgcctcccgcgttcaagcgattctcctgtctcagcctcctgagcagctgggattacaggcgtgcaccacatcacccatctaatttttgtatttttagtagaggcggggttttgccatgttggccaggatggtctcgaactcctgacctcaagtgatctgcctgccttggcctcccaaaatgctgggagtacaggcataagccactgcacccagcctcacagcatttataattgtgtccaaattggacatctcatcagttaaaatagaagctgttgatgtcaaaatttataaatagttacatgtacacagagtaactaaactgcaaattcctggtaattaggctgatgttgaatttttaaaacactgccgctttgtagtatgcactttctctctcctgctcatcatcaatcagattctagaaatgttcgggccttcaaagaattattttgtaaataaacctaagtgtcctaaaaagatggtgaatctttctgcaaacaaggccctaagtgtgagtttagtttagttccaaactagttggaaatatattatgggaggattcaataaatggagcacccaaaaccctcccctccacaccaccccccccaccgacacacacacagaactcttggcttttgaaacttttatagagttaaaattattgaaaacaaaggttatggctgggcatggtggtggctcacacctgtaatcccagcactttgggaggtcagggcgggaggattgcttgagtctaggagtttgagactagcctgggcaacatagtgagaccccccccatctttacgaaaaaaagtcttaaattttgccagtcatggtggtgcatccctgtagtcccagctacttgggaggctgagatgggaggatcccttgagcccaggaggttgaaactgcagtgagccagtctggcaacagagtgagactctgcctcaaacaaacaaatgaggttatgaacaggaagacactaaaacttatttctacaaaaacaaggaagcaataaagtgaattaaatgatgagagctcacaaaatgctaatctaaaaaaatgcaggcaattttattttaaaaattaaaacatgaataagaacattgaaaaatatattgaatgaaacatattaggaacagataaggctaagaaattgatcagagcctgtgaatgtgtgctgagaataagtattattttacgttctcattttattttcagataatcaatacaaaaaggtttttttcttttatttttatttgttgttgttgttgttgacacaaggtctggctctgttgtccaggctggagtgcagtggcatgatctcggctattgcaacctccgcttcccaagctcaagtgatcctcccacctcagtccagcaagtagctgggaccacaggcacccatcaccgcgcccagctaattttttgtattttttgtagagacagggttttgccatattgcccaggctggtctcaaactcctgagctcaaagcgatctgtcggcctgggcatccaaaaaaagttttcttaaaaacatatatatgtatatatatacacacacacacacacaaaatatgttattttgttttcagaaagattgtttaatttttaaaaatattttgtgaatagaactacttaatagcctcccagcttaataaaatcaaatcattggtcaataaatgttttagagaagcatatattttgaatcattttagccccctcctttgctctccaagaagtcctggtttggatgagaaattacatgggacccattccaggggctctctttaagtgcggtggctttgaaacctgagtatggctcccaaatcattgtctcctgcttccttgagaagaaccctcatctgtttcttagttgaaagccaaacagctgcaggttttgaccaggtaggtgatgggttcgggctgcagagagaaaacactaccctcttggagctgcagggggcagtgtgggtcagtccactgctggacatcctgggccagctggaaagggcactttcgggtttggtagggccagaggggtcagctgggcaactcctgctcagaggcactggcccagggatggccccttgccctcaaatgccctgaaagctccaattattgaggtgccggagagaaagtcagggactgggaaacggggacacaagacagcccctacactctggggtctcctgggctggttgagacgtccaaaacccaaatcaccttacacagggccagacagtgtgatgccaggaaggactccatctcaggtcgctcaacctcaaaatctggtggggtcaagtaaagggtgaggagagagaggggaccactccaaaagaggaggcagggatgttgggaagtggacggggatcaggaaaatccctttcctaccctgggtgtgtacctcgacctgccttctgccctcccccgagcccagccaccttttcccagtctcctgccgagctcccttcctcgggccctagtgcagtgacttcctgcagctcgccaccttgaccctggccttcctccccaataacccccacaaggagtgcctcccccacacgctgcacttgcagcccacctccccttctgacaaggccccagaccccagatgcaactcctacagacagtctccccaggaatgttccactgtcctctctaatgcaacctttcatcttcagtaacaacaggacattgctcataggatttcggtgagggttgatgaggtcatttatctcagaacctcaggtagcttatcccgcttcataggagcccagtaactgggagcttatattattgccttatgcctccagctaaaaatcatccttatccccaccctagagcccccattgtccttgtctcagctaatgaatgatgctccctcccaccccaactcccaagatggaaaccccgatacctttgttgccccacttatcacccacatcccactgaccaccactgccagggaccctacctttgaaatccttctaaactccctccctcctttccattcccattgcctccggcttggtctttcttaatccattgcttagaccaatacgtctcaaatattaatgagcagaggaaccaccgaggaatcttcataaaaggtgggaggtctgggatggtcctgagactctgcattcctcacatgctcccaggtgatgctcgggctcctggaccactctccggccgcaaaggctatcctgtgtcaggagctgacgcgcagcatccagggctccctttggaaactttcctggcggctcatgactcgtagccaagattttcaaacttcagtctatataaagccattattccccagatactcggatttcttccatctggagttgggcacaggagtgggcatcattccttagtgcccccaggagactctaataatgtagattgttaatggaaaatgagcccttagggccaagccaaatctagcatagcattgaggacctacccaattcctcttcagacttttcctcctcactcatcttctctcacatgccagagaactgtgaactgcctggacagtgggttctgtctgggctcccttcactcctctgtcccctggcctgcgtctccctcgccttccgtcctgaatgactcactcactgcactgcatttctggggaaggtttcattaactgccaagaggaatcattgctccctcacctttgctccttggcacatggccttgtctccagagcatgggagtggggtatcagggtggctgttcttctgcctgcccttcctcctcaatgagctactttagggctgaaacaagactatattctttgcatctctggggcttacctggctgcctgacctaagaacttgcccagtgaagaatattaaaaagacatcagatggaataaaaagacagatttataatgaagtagatagcaggttgactgttgaggggagtaaatatacaacctgctttatcataaataaactccttttctcatctcagttctagaaatcacatgcaatttgtgctctacatactcagcatttggtaggctcacaacagaaactgatgaaatacaaatccttaaaattctgcatttttttatatgagtctcgctctattgcccaggctggagtgcagtggtgcgatctcggctcactacaagctccgcctcctgggttcaagcaattctctgcctcagcctcctgagtggctgggattacaggtgcctgccaccatgtccggctaatttttttttttttttttttttgtatttttagtagagacagggtttcctgggcaggctagtcttgaactcctgaacttatgatccacccgcctcggcctctcaaaatactgggattacaggcatgagccaccgcgtctggcccagcatgattttaatcactgtttcaagcatcatttggaccaattcatgtctgtgctcaccaggtcacttatgcaagcccactgagagtgaatggccagggactggcaagttgtcattggccttaaaactattgtggaagttagtgtggtgattccttaaggatctagaactagaaataccatttgacccagccatcccattactgggtatatacccaaaggattataaatcatgctgctatcaagacacatgcacacagatgtttattgcggcactattcacaatagcaaagacttggaaccaacccaaatgtccaacaatgagagattggattaagaaaatgtggcacatatacaccatggaatactatgcagccataaaaagggatgagttcatgtcctttgtagggacatggatgaagctagaaaccatcattctgagcaaactatcacaaggacaggaaaccaaacaccacaggttctcactcataggtgggaattgaacaatgagaacacttggacacaggaaggggaacatcacacaccggggcctgtcgtggggtggggggaggggggagggatagcaataggagatatacctagtgtaaatgacgagttagtgggtgcagcacaccaacatggcacatgtatacatatgtaacaaaactgcacgttgtgcacatgtaccctagaacttaaagtataaatatatatatacatataaaaaatggggacagacccgggctccagctggtggacaggctttgaattctgcaggttgtcgcccattgctggtcatgtcaggaaaatcacctgtggctctcctgagcacttccggacctcagtgtctaacagatgaacaaaatgatctttgtctttctcaagggtgtcggcctcctcttagatcactgagcatttggagaggagggttattaaattaatgcatgagataagaaaatgtttcaactaggaattctgcatctctggaattgtattaaaccaattaatactccccaatcaattactctgtaatttactcaagtatattaaaagtattgtggcagtgtgcaataccagatttttaaaaacagtgtgtgcctctgtgggcagagctgcctgtcgtagaagggccagggcagcatgcagcgggggtgagggcttctgtctccagggttcctgggttcaaatcacagttcctccatatcctccagcctgactttgggccagttctctatccttcgggaacctctgtttctcagccctgtggggttattgtgcggataatacagatataaaatacccagcatatagtaggtgctcatggaattatttgtgtatgtggctcattttacaaatctaaaatgtgtgttttggaaataaaaaaaagagggaagaagtaaaagtgctgattgccaccatcgtcgttgttctgggctaattgttataatatcctcataatggtttcatcttaatagtggtgattactgaaacacaattaggatttttcatgctcattcagatgtcttctctaattacaagcattagtgtttaacatgtgagcagccggggaatggatgtttcttggcctcagttctgaaatgggtccatttgcatccctgagggaggcctcaggcaggagggctgctggtggggacaggctgaccttggacggggttcagggggtggggagtgggggggccacacctccactgcatgtctgcattgtcaacagcaaatcccattcagcaggtgccactgcccacctgcacctgccagtgagcctctagtgaggggtttccacagcaccaagcagtcactgccacatttagcgatgctctgatgttttggcaaaatggagtgccaggtgaagatctgaggtgatggcccacaggtcctcagcatgaaagagcctttttctgtgctgagccactttacaatctgcgtctgcccctgggcattcccaccccctacccccaataaatacctgcatcccagggtactcaattggctctgtcaagatgagtggaccgtggctccatcctcgcagaggcagcttacctccacttcacctgagagtttagacatggccatggtcagatgcaagggtcaagctggagccaggcagagcatgctggagccggaccaagcatgtaggagctagaccgagtgtgctggagtcagactgagtgtgctggagcagcgaagaacagagaacttggctgcagctgggtgatgaggctgcatgaactaggccctgaaaggatcgaggtttcccaggcagagtgaagggggatgaagaaaccgattgaaaagcagtgtcttgctgggtgtgaagaggacagcgtggccagagaacagggcttgaatgggaggggtagagttagcagggcgagtggagggtggatggtagagggtccaggatgccaggctaggtcacccagatgtgatttctgctaagtggttccagggagggcaggggtctgggatgagatcaccctgggttccagtccctgatctgcccccactaaccatcaaccaagcaggtcctttgagtcctggttccctcctttgagtgaatgtccacagtcagtgactgtatccccctggtgttgagaagcctcagtgagatgatccgtgaaagtgacaggcaaagttcttggctcagagaaagccctgaaatgaagttggctcttctcctcatcatcactgcctggcaccggagggtcccacagctgctgctggatgacctctgagcctgtccctgcctctctgcaggtccaccatggagcccttgtgtccactcctgctggtgggttttagcttgccgctcgccagggctctcaggggcaacgagaccactgccgacagcaacgagacaaccacgacctcaggtaaggacccctttccctggctgcctcccctactacctcctcctaagctcctgggaccattcagagggtgataaaggggcttagggtaagagaagaatggtgtggctgaatttcttagtgtgcttttaatagtttgtgcctctaaaaacaggcaggctaaataagctagtttagcatttggttgttcagcaaagcttagtgttctggaggtgacccatctacaaccccagctgagagtcagggtcagccttggctggaggcaggagtgcaaaagggttaaaaatcccccaaaatccccttgtgcagaaaaccaaccatgaacatacatggatgaggcgatgtgacagttaatgataggaactaaagaattattcttaggccgggtgcggtggctcatacctgtaatcccagcactttgggaggccgaggtgggcagatcacgaggtcaagagattgagaccatcttggccaacacggtgaaaccctgtctctactaaaagtacaaaaattagctgggcgtggtggtgggcgcctgtagtcccagccactcgggaggctgaggcaggagaatcacttcaacctgggaggcggaggttgcagtgagctgagattgtgccactgcactcttgcctggcaacagacagagactacgtctcaaaaaaaaaaaaaaaaaaaaaaagaattattcttaatattttaggtcagatattggcgtcatggttagttttatttttaaaaagaagagtccttgccttttgacatgcctgctgaagggttcacgagtgaactgtgatgtctgggctttatgcagaaaagagcaagagggaagtgggggtgggggcttgtgaacaaagtcacatcaagagccccacatgattccctaaccctggacaaatgtcctgcaaaccctggacaaatgtcctgcaaatgtaccactggccccaggaggaggaaagagtaaagatttctggtgacagaacctctagcaaggagagcagttctgagcgcccacctgtctttttcctcttcatgttgaaacctcagagaaatccaaaaccccaaaaatgagagaccagaagctgcccgcaaatattaacttgcctctttgcaagccagcctttcaggggcaggtcactggtggttcaaagagttatttcaacccacaatcccgacttttcttcccaacgctaatcgactggccacgtagaaacatctgacaaactgcccggatgtaccctcacatccaggagccacaatggcagaacatccgtttgcgcaacagtggggaagaatctgcccgagctctgcagacagtccctcgggtggcactgtgggcaccggcaggatgacgtccactccacatctgaggcttttcagtttatttgagaacaaaattattgggctcacatattgccatagacatggggtgttacttgcaggaggaggacactgtcatgtgacctcagcacccagagcagaactaaatgtgaaactcacaccttggtccagcctctgccagggcctctgcgtgcttagcaaggctgctggtccacgagcaagagggaaatgggcctcgggttataaggcgcagacgggctcgtttgacctagaattgtggaggggaacctgaccctgtgaagtgccctttaaatcttcatctgacccctggaagaagtatgaaggaccatttcagatgataacacgtttccacagtgtgccaaaataataggaagctgtttcatttgttcatcgaacaaaatatattcagtactcatgcagacaaattcttttacagaaggaattgaaggtaaatgtttacaaattatgtaataaaatgttatctataaaaaataatacgtaaaagaacacagtcgaaaaatgagtagagaatatgaccaggtagaatacaaatatctaattatgtttcactaatcatgaaaagatgctcaactctctagaaattagagaaatgcaagttaaaatgacattatcattttacctatcagatggaccaaaatgcaaagggttggcaaaatatcccagagaagagaaactggctccatcgcacattatgggcagcattccgcaacctttgtggcaccagggactggtttaatggaagacagtttttccgtggaattggggtggggggtggtttggggatgattcaagtgcattatatttattttgtactttatttctattatgattacattgtaacatataatgaaataattatacaactcaccatcatgtagaatcagtgggagccctgagcttgtgttcctgcaactagacggcccctctgggggtgatgggagacagtgacagatcaccaggcatcaggttctcttaaggagcacgcaacctagatccctggcatgcgcagttcacaatagggctcacggtcctgtaagaatctaatgccgctgctgatctgacagggggcggcgctcaggcgataatgcctgctcacctgccactcacctcctgctgtgtggcccagttcctaacaggccacagactgatatccatctgtgtcctgggggagttagagacctccgctgtggatgaatgtagaagttggacacttggggctgccatcttggcaattgtgttaaaatgtaacaggcgtacaggctaacacagaagctgtcctacagaaacacttgcgagacacaaagatatatatatgtgtgtgtgtgtgttgcagaattgtaggtaatagcagaaaagttggaaacaacttaaatgtccatcctattttggtctatccaaaaagtggaatccaagcagctattaaacagaatgaggaagcttatctgggctgacatggaaactctccaagacagacagccgtaccagaaaagcaagctggagaactgccccgtggtgcatttcatctgtttctttcatatttaatgtggctatatggggacgtgtcttaaaattggtagcacttcacaattataatcagtatcattttttttctttcttagtggttcttaaaataacgatactttttacagtccgtgaagctgtagatgaaacgagaggagtagtatggtctatttatttcccaaacctgcatatttatgaacgtaaatttatagaagaaaatgtcaggaaagatacgctttgaaatcttaattatgtttaactctggcaaagagaacaggttcctgaacattgaaaattttaggccggagtgagttgggaccttaaaccattgtctgcacacctgtccttgagtgagccacatcttttcagtatggacttgctccgcctctagggcccctggggaaggagggcttggaatgaaggtgggagaggaaaagagggatggagataagataggggacacagtgagagcagctgtgccctggggcagaactgaggtagtccctggaagaccccggctcttggccagagctcaggatcagcttcctgagcagagggtgctgggtggctacactccagccaaggttgccattctctttgtctcctccaaagtcacattcaagcctaaggttttcaactttcaggatcagattctatgtaagcaaacacacacacacacaagttgcaagtgtatgtatgtataaaattggtgtgaacatacacacacttcactttgggcaatagctagacagtcatacaggaagaaggctgcttcaggatgaccaccctggggactggccaccctgacctctgtcccaccccgtcagagccacaataacatgaaatgaaaataaactgtgacaggaatttcttctcagatgactccctgactcctggctggaccacattggtgcccagaggacatatttttgttttcttcctggtccacaccatttaaaaaaaatgtttttaaattgaatttcttaccaatatttaaaaatcagaaaatgtttacataaaaatatgaatttcttctttaggaaagtgggaagaactaggcactgtgggcaccccttgtgcttggccccagtgggctggaactcagaagtagccatccctgcaggcaggacatggggagtcccaactctcgcccccacctggcctccccacaccacccagggatgttcttacctgccccttgaaggccattgggtttctgatcctgatctctggcctcctgaacagaggtagctactaagaaacaccaggaacagagctggggaagccactggccctgtgacccatcccttctgcccgtgtgcacggcccctttctgggcttgggtggttcagccccgtcttctatggaagtacccatgtctgtgaccgcagccttcactacaggcaggaacgtggaggccagacccacggagggctggtggggcccaggtgctccctcgtgtctctctctgatgagaggaccccatgagttggcttggactaaacttagtagtcaccatctctgcagaagctgagcccagagcctgacctctgtgtgatgcagaagtgggaagtttcattgcctggggccccgggagatgagggcagatgtacctgggtacattcgagagggaggagggggaccgaggcccaagctttctggctgagtctggagtgtgagcagcagccaggccctccgtggggctgggctccaggctgcccctccctccgtgtcaggggtcttcccactcagcctgtcggagttgctccagggccctggcagagtggagaggggtgctctctggagctgcaagtgtggaagcctcaggccagctcacttccccagggaagctctgctgtgggcaggttggaggtcaaaggcgggggactgtggcagccacacccagccactcatcctagcaccaaccgaaccttgtgtggggccagaaccagctcctctgggccagggtcacagacacctgagtgtgggggctgcagaggacagccaggctgccaggctactgacactgctagccagatgggggaggcacggaccccacctggaaggtgggcacttagtgggtgggccaggtgaacagtgccctctctcacggctggggccacctccgcatcacagaccagctgtttcctctgtgaacttcaacatctaatggtcacccacgtccctaaaacttcatcatttatgagaaacgatggtgcggaccactcatagggtgccagagtcagtgccaggcctgggagggtaggggatgagggaggaaaagccacaccttccctggggagtttataacctagggtgcaaggcggaaggcatgagggtcccttttagaatccagatgaggggtgtgaggtgagcggagcctctggggctgcggagccctcccagtgcccagagcaccctcgggaggccgtgccagccctcaggaggaagcgcatggaccctgcgctgggctcagggcaagtgattggtgcttctgggaacttaaagagttggaagcccggtcgttgccttcgaggggcttccccagaaacccgggagccaaggcagtcatgctgaggcctgttcactcatggcagagcgaggtttgcgctttgaggcatccagggcccctctgggtccacaagagaggagtccagtgggcttcttggaggtgggggcctttgagattgtcctcgaggagtgggaacattttggtgatgagggggctgtgtggccagcgggggaggagcaggaacaaagtgcgacgttgggagagtgggtggggtccaaaggtggcagcgaggccaccagtgtcccttggaatttgggctgatgagccaggggtgggtcctgagcagcaacaaagccacttagctgggcctggggctgtgggtctctttctgggtgaggaaggtcaacctgtcaggtacaaaggacacagtaagaggccggtggtggctgggcactcggcctctgacaggtggaatcgggacctggaggctctgaaaggtggggtcacagtgcgccagggccacaggcctctgcccagccccagggccaggccgcctccctgtgcctgagctcctgcccaagcccaaggggccctaagagctgagctacgccgagtcagcctcccgcgctgtcctaggaccctgcagtggacaccggccccttcacccttctccagcttcttagcaggagagccaggcagccaggccgtgtgggggtctggggaactcacccctgtcatgcctgccccagggatcttggacaagtcacctcacccactcctcagtcccggattctttctctgagtcaacagcaacaactaaagtcgcttctctgttacctcgtggggccttttcaggatgatggatccactttacaaactatagtttggggttctggtgtccaggaagaagggcttatggagggagactcttttgcaaactgtgaagtgaggtcaggggttagggtctttctgcttctcctgcaggccctccggacccgggcgcctcccagccgctgctggcctggctgctactgccgctgctgctcctcctcctcgtgctccttctcgccgcctacttcttcaggtaggagtgtcccggggcactgacttgccccaaccagctcagaggaggaaatgagccttctgatgctgtgggcgtgggctgtgcagcagagggcagctgagaggctgggtggctgggcctgggagacacacagaggccaggccttagcgcggctcagccatgagcaacaggagtagcttttcccggctcacctggtgggtatcactgtgccgagcgctgttggctctcggggaacctagaagtgtggaaacctaacgcatcctgtgtctctaaggttcaggaagcagaggaaagctgtggtcagcaccagcgacaagaagatgcccaacggaatcttggaggagcaaggtacagaagctgctctctggctggggcttgggggaaaatgtgttcttttttagcagacactgaggtgctttctgcctttaacgttcaaagtaaattttgaggtgtgccttgccactttcatctcactctacctggtatgatgctgtcatttagaatttcactatttcaaaactttaaggatcatttttctctcgggtgtgacatggacgtttgagacatttttgtttgtggctttttttagagagactgttcatatcctgtcgttttcacagggtgttgacatgtaacacttttcagtgaggccttacaatcattctcagataagactgtctggctcagaaactattcagctgggtttgtactgctttaggatccagctggaaaaagagactcgctctcctgaagtgcttcatgtttacagagcatcagagtcagctgggagcatttccaacttttccatccgaagtacagtttcgaacttgttgtcgctacttacaaaggaacattgtttttctctccatacatagagatgagatgaccgagaaacgtgtgtaaggcagaggccacaaaaatattgcttcacaccccagtgactacaacttcctggagtcagcttcctacctaactgtagtcagttctatggtttgggggaacacacgtgccgtcagactaaaatagactcttaaaacggacccttagatcattaaaagaatatcaccaacaaggacccagctgaaatgtagcctcccagcgctcgcgggacccgagacctggttagacgataatgtggcaccaggtgctgtcttcctgccctcgttccagtccccggttccctgccctgaatgtttcaatagcaggaacggaagggaggagggtgcggctagtgagtagcagggaagctcagcatcactcattctgatcccatctgtcacttggaggaatgagtcttgggtgaagtttttggctgggcttcagaatggctctgcaggtggggacaggcccttttgcaagtgtgacagctgggttatcatgttgaccttgtcaatatcagctcattctccaggaagagaaagacatgtccataactgttcttgcctctcactccgaacttggggaaggaatgtgtccaagaactcccttataacgcgtacttctccttctcaatgccccttgtcaccctccccagacaagggtggttttcccttggagcttatggggtttgaggaaccaggaatatttgttatgaagaagaaaaggctgagagagaacgttctgagtttgctcccagaagccgtaattactctttcttatttccaaacctggaaagctgagctggagagtgaggccgtcttgaatcctttttggaaggagcaggggctggagggaaggagaggtgggagggtgggtggatgagtggcctcgggagggggacaggctgtctccaatgggggagagcaggtgacactgggcagagggacgcccgtcacttgtaaatgatgtggatgcctcacaggaggcgagtgtttggatacagctgctcgggacccggcttagcccagctatgcgatttgagagaactgttccagctccagcctggtcatttcttcaggaatgtcgttggtcagcttggttactcagtcgcctatccaggaatgtggctaaatggcccccatgtttcttttgatcccacagagcagcaaagggtgatgctgctcagcaggtcaccctcagggcccaagaagtattttcccatccccgtggagcacctggaggaggagatccgtatcagatccgccgacgactgcaagcagtttcgggaggagttcaacgtgagtgtggggagggctctctgctgggtgccctgtggtggagacctgtgaaatccagtgttagagttcaggatgaattatcccaaagactcagaacccttgcatcagttatgacactgtcccatgaatgggcgtgtgaggaaacctggtgtgtggtgcagtgccctttgccaatgcttatttcctcatttataagatgagacagttgagttagaggtttgtgaagcctccttacacctccccactctgagtgtcaagttctaaaatcaactgtggcagaaacactgttatctcgataacacagaaggctaggacctgagcgcggcacggtatgacaatatcatggggaaagtaacagagccccaaaccatcctttcatggcttctgagagctggagcacctaatcagagtaggcgatgttcctcttctgaaccaccatctcggcattaatgaagcagctgtgagctgccttgagagaacactagctatatctgcttgtgtatcaacatgggtgggtgggtgggtggatggatggataagtgggagggcagagggatggatggatggatgggtggatggatggatggatggatgatggatggatgagtgggagggcagatggatggatgaatgaatgcatggatggatggatgagtgggagggcggatggatggatggatggatggatggatggatggatggatggatggagtgggagggcatatggatggatgagtgggagggcagatggatggatggatggatgggtggatggatgatggatggatgagtgggagggcagatggatggatggatggatggatgggcagatagagaagtagacaaacagatatgaggaagtattgtcttggattttgctattcagtatttatccttggtcgtgttttgaattttatgcatcttcaccttcttgcatgtggctgtgctaagtgttgatcttaaagaggatagattttcagcaggattgctaactggtcctggctatgcctgttgcgtgctggccctggcacatcagttaatttccttgaagctgtcttccaccacctaggaaggggcaatggagatgggcctgtcttaattaccttgaagttggaatgggaggctcagacaatggattttgtaaacaacagtgttgtgcagttgttatatctgaagatggcatgaattctgctgcagaaatgagactttacccagaagcaacgtgtgaaggcatgggaaggtggtggcccatgtaaactgtacattgcttgttttttggtgcaagcctcctctgcctttatcttacttcctttttattgtttccaaatgtgtccccttttttggagaaattaggtcatattgaaagacagcttgaagcactattgtgttgcaatctctcagcctgacaacagaccttaattctcattttcaaaataactatccaagttttcagctagcagatcccctcccccacccttctcatcccatttccccttgcacttttgtttccccaagtgacaggggctgggcttgctgatgggggtgtctgagtcagaaccagctcaaaagagggggccactcccagggagggagtccaggaatagggtggggcaggtgagacactcaccccaggcacataatttaagacagcaccaaaagctcagcagtgggataaattatattttaacataacacttaaaatatcaaaattatcagcaccacaggaaaggtaacaaatacaatatcaaaatgaatacaggcagtccctggtgaagaaaataacacgaccataaaggaagacaggcttgggccgactgattttccctgttgccctgggccctgatacatacggcttgtcaccacacagctactcatcctgccattagttaaaagtttcatattttggtcatcatagattttgtgccttgatttggacttttaaaaatattgcattcgaatattatttcccctggtttctgaattttgggggcaccccattaaattttgcacccagaggaagttcctcattctcttctgccactgggtggcccttggctgaacattggagtccttgtgctcagtgacaggcagggtagagacgcggtggaggggaagaacactggacccaaagtcaggatcacggagcctgatcctgtgtctggggaaccctgggggagctgcttttttgtcatatttttgttttatttgtttgtttgagatggggtctcgctgtgtctcccaggctggagtgcaggggcctgatcacagttcactgaagactcaacctcccagctcaagtgatcctcccacctcagcctcccaagtagctgggactacaggcatgtgccaccatgcccactggcttttttactttttttgtagagatggggtcccactgtgatgtccaggctgtgcttttctgctcatctgtccagtgaagggctggccatgtcctgagtccacgttgatgcagcacccgtcctctgagagcactggagcctgccatggccagctctctcttgggtcctcagagggacatgctcccaaccccatctttcttttctcttgccgtctgatctgagctcctctccccaaaatcatgaaagggagacaccagagtctcaaagtggccgatccagttgagttttgacatgtgtgcattgccaattcaaagtgcaggcaaacttggtggggatgaaaaggatttgatattggggtcagtacagtgaatgctggagtcggcctgagtgtttgtcccggctcagagagcttgggcaattaacctctgcctgtttcctcatctatgaaatgaggatactccctgccccccataggattgtgataacatggacatgaggttggataacctggacatgcaactgaatccttacgagaccgcactctgcaatctccaccctgcactggtagaacaccatcctaggaaagtctgcttccaggccccagagtaagtcctggaaagtgagcaccactgggccaaggaaaatcccccgcttcagacaggctcgtccctacctccatcctagcaagttatgtcaagccaagtgcctaggactaacacactgatacgtgctgtaaaagtgcagagggaggtgtcaaccgcaaagcttccagcacaacaaacaaaccagaaccattccctggagctccatagagcagctggggcctcttgcagaactgcccacacctagcttcttgtacactctcctgctgcctgcccgacactaccgagcggagagagaaaggaacgtggctcatgagttcattgaaatgaaatctctaggccgggtgtggtggctcatgcctgtactctcagcactttgagaggccaaggtgggcagatcatttgagcccagtagttccagaccagcctgtccaacatggtgaaaccccatctctaccaaaaaactacaaaaattagctaggcgtggtggtgtgcacctgtaatcccagctactcaggaggctgaggtgggagaatcacttgaacccgggaggcagaggttgcagtgagtcgagatcgcgccactgccctccagcctaggtaacagagtgagaccctgtctcaaaaataaaaatgttaaaaaaggaaagaaatgaaatgaaatctcacctcaaacagacaaaccacaaacaatttggacaatttacataatgggacagccaatcacacaatatttattggccagttactatgagcaagccccaagcaagacactgcagggctcatccaggtgtgcagacccctccaggtgctctcctttcccctgggccacctgagcagctcagagatttgagaccccagtagactgacagccagagaaagggctgcagagtccatgtgggtggttattctgtgcacttggatccaggatacatacgtgtgcggtgcacagggcccgatgcccctccccacttcaactttgaccctctgtgcatctgggtggctacgccccatctccatggtctggatctctgcagctgccaggaacacgcaaccgtggggtgtcagagcttggtccatcctcgccatccaatccctccagggagccttctcaatttcttttaatttatttatttatttatttattttttgagagagagtctcgctctgtcccccaggctggagtgcagtggtgaaatcttggctcacggcaacctccgcctcccaggttcaagcgattttactgcctcagcctcccaagtagctgagattacaggcgcccaccaccatgcccagctaatttttgtatttttagtagagacggggtttcaccatgttggccaggctggtcttgaactcctgacctcaggtgatccacccgcctcgacttccaaagtgctgggattacaggtgtgagtcaccacacctggcctaatttatcttttaacagactttattttagagcagttttagctatacagaataattgcacagaaagtacagagttcccatatgcccccttcctcccctgtgagcagtttctcctattattaacttcctgcatttgtgtgtttcaactgctgcaattgatgaaccaacactgctctgttgttactagcagaagtccacacgtcagggtttgtgtgttgcgcattctgtgggttttgacgaatgcacagtatcatgtacccaccatccggtatcatgcctcccgtgtattttcagtgctggggccaaaaaaagcttttgcgggtagaaaaagagaaggctctagaattttaccacagatgtcaggcttagattaggtcaagaaggtcagtattaagatagccctgatgaagaatcaggaactacaggcggcgtaggtgctggtggctggggatgaggccaagaaccacctatcacccttgccacagtgccgccagacaggtccctccacataggccaccctcttgcctctgctttgggaccaacaaaccccatggcctggaagggcctcaacctgtggccatggggtttggtggccccaaagcagaggaaagagggcggcctacggtgccccaccatgagctccagctggtcagatctgagtctgcaattggagaagcttcctgccctcaggagaggaagactcgggacacctgtgggtggcaggtcaggctgtgctctgcattgtgagcaagcccaggcctgcacggcttggatccaaagctacgcagtgaggcctgctctgctctcctgggtagttgcagcgggacccctcacattctcctacatttgaagaagtgaacatcctcctggtagtctgggtgccgctccaggctcctgccccttgcttgctgggtgaccctggacaaatctataacacctcgctttggctttcagtttcctcacccataaaacggggaccatcctagtatcacctaatgataggtgagttgcaaaggctggggcagatgacccagctccttccaccgtacctggcgcactgagacactcagtgcatattcatgcatgttactggaatcccagtggccccgggtccagccgctggtcgggtgtaatgtcaaaggacaggactcagggcttcaagaggctcttcacactgtgcattgtggggagctcacctgagcagcgagcagacgcaggagacagctggagatgaccaggaatcagagatggcggctgcaggcggcagaaagaactagaatgcaggccaccagagttcacgctcggttatgctgctcagaggggataggggccccgcggcattccttgcacacctgacttccctgactgggacaaaggagttggttagcgtggtgcttcccaaagacgtgtgcactgaagccctggggatcatggtaatgttcgtgctgattctgtgggtctggggtgtggacagagcatctgcatttctaacaagcaccctcccgggagtgcccaagccactggtccacagagcacacctggagtcttaagcaagatcaggactgtatctaaggctgtttcccgccccttgcctcccaggaccgctctattcatccttcagccccaaagtcacagcatcccgctgtaaaccctccgcatgcctgtcctcgctcccccatctcccggttcacagttctgtcgtagtcagttcttaccaaatcataggcacctgctctaggccagggtccatgggccctgagataccatggaaatgcaaaggcaagtctccgccttcatgcagcataggatctggctgatgagaccatcactttggccacaccactgttcaccccacatgaaagagcaccctggggaaagccagggtctgtgtctccttcattctctgccccatgcctggtgcaaggtctgaggcagagacggactatggacagcaggtagtttgctccacgtgttttcattaattcctgtgctcagtagggaaactgacatgagcatggtgcttgaatccatcacatttcatactaacgctacattttcttccagtcattgccatctggacacatacaaggaacttttgaactggcaaataaagaagaaaacagagaaaaaaacagatatcccaacatccttcccagtaagattttattttatgttttgcatgatcaatggtgtttgcactaaactcagctttgccttgcagctccccgtgactgcaggccattcctggtgctcagaggccccaaatcagtctaactgctcagcatttgcacctaggactccagaacgttcctctttaggtgcccatctccctgcacaggccctgggtaccttggttgctcgtgggtctggctgccaagcctgtgcttactgttgggacctgggctgcctggggcccagcgggtaagggtgctgcttcgtggccatgggtgccagctggcagggcccctcctgtggaactcaggcctggcacccagtctaggcctgccagtggccctgggcagctcccttccctcagactcagtgcttgtgaccacaagctgcaaatccctagagttgtctggggtcctggaccaatgacaaaaataatagaatacgaaatttgtaggtgggcagcagctttgtaggaaggctctgaatcgacctgatttaaccccagcagtacaagtgggcatgggctggggagcgtgggtgccaggaggtggcagggccagagagcagacggatgtgtgcgggggtgcgtctcggtgacctgctccagctggatgggtcgtgacctgggggcagctttcacagcctgtcttggtgccaagacaaaccctgtaggttctgaaccgcctttgtaagagctggcccgggccgggtgctgtggctcatgtctgtaatcccagcactctgggaggccgaggcaggtggatcacctgaagtcaggagttcaagaccagcctggccaagatggtgaaaccccgtctctactaaaaatacaaaatattagccgggcatggtggtggacgcctgtaattccagctacgtgggagactgaggcaggagaatctcttgaacctgggagacagaggttgccatgagccgagatcgcgccattgcactccagcctggggaacaagagcgaaactccatctcaaaaaaaaaaaaagatctggcccagcagcaggggggcggggcgtgcagttggggatccttcacctgggcccctcccatcatctgctttgcccatcaggctaacaaaatggcatcctcaaagggctccactaagttcaggtttaaatcccgaacctgcagcctccgcctggtccacaaagggagtccatcccaccctgccagggccttggtgggatggaggaaggcagcccatgtgggccccggaatgctgctccctgctgcatttttaggactagaattgagttcatctgctctgtatgtcagagcagctatgatctgtccgatctgtggtctgtccaaactgtgcactttttagaaataattctgtcccattttacatgcgtgggattgatatgtggttttcacaaaacccactgtgaacccatgatccaatgaaaactgggagaaattcatcaaatagtctttcattcaacacatatgtgtaggggtggccaaggcaacaccaggaagatgggtcaggaggtcatgtggtggccacacagctgagccttgacagtggctcagacatggctagatgctgcacactttggagaggatttgttgccaatgggtagaagatatcacagaaagaggggaggcaacttacatggcttgagcagctcaaaggaaaggaaggccgtggcaggaggaggtctgagatctttggaataatgtgtgtcaaatttgggatatttagaaattagtttcactgcttaatttattaccttaattgagtggttttaagttgtgccttgatttgccaaccatatgtgttaagaaaccgctcagtgctaagcacattcctgaattcctcatttctctcaatcactaaaccttcatcccttaaaggtaacatcacattgttaattaagactatttagctgggacctctgtggaagcagaatcatggccaagtgtgggcattacctacacccagtccccttctcaaagtgtgatggcccagggcagagcagtggcctcacctgggagtcccccacctggaagaggccgggcccacccactgcaagtcttctctgagccacgttctcaagtcttctctgagccgcgttctccaggttgtgctgctggagtcagttggcatttcctccaagcctgaaagtgtagtcagattcagaatgggcttttctagattcccctgtaagatctttcccctgctcctggcaggagcaccacaccatgggaaccccagggcccacgcagctgcccgggactgggggaccaggacatggcacttctcacatgggtggaaagatgggtttacagaatggtggcatggagacgctgtggcctggcaaggatcaatggggtggcatctggcattagccatcaggaagacttaaggctgaagggacattgggcagggagctctcagggctgctccacccgcccccagggtgacagcccatagtatcacttagggtgggactgagagtcacctgggggagaggagagaaggggcccaacttccccagcccctagtatcacttagggtgggactgagagtcacctgggggagaggagagaagggacccaacttccccagcccctggcaccttccctgcctttcccagtcttttaccagagtcataagatggtccttggctctgggcaggcatgtggccctggggagctctggggtcagaggtcaaggtgctttgcatgtcaggcaggcttgacttttgcctgtagaaagactatagaaagatggcaagctaggcctcttttctggaaaagtgccaacagctgataattttaggaaataatgttttgaatgtgaagtgtgactttttagaataaaaagacaggaagctcttagaaactgcaagattctaaatctaagcagaaggctatattttaccctgtgcttttctatagctgtcctcaaagcgtaaaccattccaaattattttcaactagtgttatatgtgttcagcagagctatttctgcctgggcattgccagtccctgagcaggagggtctcacagtgaggtctgcaggactgtaagtttggggtctgactccctggccaccctgtgtgggctgtgactgtctctcagagctatacccgccctttctctgctggcagcccgacagagctggctcaaccatcggaggtcgcaggccaccagcccgtggcccacctggcagccttccaggtgaaggtgagacaaacaaggcatgacctgggggccgcccggctccccatcacaaacgccacaaacaccacaaacacaacccaccctgatcagagactaagcagagaaagcagggagaggacctagagttactcagtaatgactcaggaaggagaccctaagcttctaccacatgccagactctgtgcccagtgcagcataaacgtcctcagaaccagcctggtcccagcctggccgagccggacgttcctgggaaaggttacaggaggagcagggccaggcccacagcacttttagaagcccatgaaaatgtcttcatttctcttcaaatcacaaacaaaacgtgcaaaacccattctggagtgcatcttttcactggcgaccaacccagtcctaagataaccttcttaatagttctatggaggaagctgcaaaggcagaagtgactacaacccacaaaagtcatgatggagccctgacgtgtgtgtacacacacactacatgcacacacacacacacaacacacacactacacacccaccgcacataacacacacacatacacactccacacacacaccacacactccacacaaacatatcacacacataccacacacatacacaccacacacataccacacactacacacacacacacacactacacatacacaccaaacccacatgcacacattcacacagcatacacactacacacatgcacaccacacatacaccacacacactacacacatgcaccatacacaccacacacacaccacacattacacacatacacaaccacacacaccacacacacaatacacacacaccacactcactacacacacaccccacacacagagcactccacggtcagccttctaccccggaaaactgcttgtgcaacaggctggatctaccagacgctcctcactgtgctcgccttccagctctggggcagactccggtggtgggactgagggtcagagtccccaatcctagacccccacatccacttgtcctcatggggctggtgctcatttccctgggaagcctgggagagtggacccagttctcctgtcctggggctcttttaagtgcacccacacttggcaacactggggctgggcccagtgcagggttcataaaatacagcccttgcactgccaggggcctggcacattctgccattcttgctatgtaatgacccagcagcccccatcctggatgctgaaatcctacccttgtcgtcatgccacagctgagacagtcagtgttcaccaaagcaggtgcattctctctcaggacactagtgttctccatgggaacgctgaggaagaacatctctgccacccccggtgtcgctgtgaagctgcttttgcccttcccaggagctgacactgcagatgaagagacagcactgtgatttctggaagagacagcactgtgattcctggtcctaatatcttggctttgtttgggttttttttccagatgaccattctagggtgattctgagccaactggatggaattccctgttcagactacatcaatgcttcctacatagatgtaagtgggcagaggtttcttgttcccctggcccagctggggcatgagcagtaagcactttcttgtctggtgcccggagtgtaaattgtcacaacctttctgggcagtttggccacaagcacaaagggtacggaactgcccgtactttacacactggcatcagcatctgggaatttgatttcaagagacagagatgatcacagaggatgttcactacagcattatgtatattcctgaccaaatagaacagggagcatgggtagttaaacagattgtggtaaaaccatgtgcagtggactattagaacttgatttgtattaatctttaaaagatcatttaatatcaattataaaattcccattaaaaatacaacataaaataaattgtacatgttcacccaattagaggacagaaatgtctgcatgtctgcttgtgggtgagtctgggaaaggtttggcagaaaaacagactagagaggggacgtatgaagtaggatttgttatttctggaattgctggtgagttttctttccttcttaaccttttcctgtgttttgcaaattttccatggtgaatatgtactgctttcctaacagcaacaccaacaaatcctttcagcaaagataattctgaaaaaatataaatctgatgttattttttctagggttacaaagagaagaataaattcatagcagctcaaggtaagctttttactaatttctcaacgtatttttggtaacgtgaatagctcttatttccttctctgtatgccaacaagaccaaggacttatactggatttgtgtgtgtgtgtttacacctaacagacacgttagatatccattcacacaacggatatgtgtagtcagagaaacacacacttattcccacacctatatggtgtgaacacagggcacgcagtggccccggctgccattccagcttgttaatacttgcatcagataaccttgaatttctctcagctggctgagccctacatggcaccccaagtttgggcgaggggttagtggggtgaatagcttttcagatcaaggccataactaagaatatacttcagctgtgaaaacgtgcccttcaccttgcacagggctaccttgtgtgttgagtactgaatccagcatcactccgttccaccagaggttgtcatctgcaggacctggtgtacgtgcggttagatatcagtggagctgaaaccagattcctcagacttcctcactcttaggccaggagtctttagggcaatgagctctgaaagtcagcgtccatcaaaatcacctgggaagttgttacaaatgcagaatctctaagaaaaaaggacacacatgtgcacacgcagaggccatcaggaatgtgcccagctggaaacctcaggaaacctgacgatcctggctgaagcagatgaaagcatgtgtttctctcttgccagcagacacccacagggagctagcccacggcaggacagcagcagggccaggggcttccttatctccccgcccatccccctcagcacgtagcgcttagctcgggactgcaaaatagccgcagctcagacaggaagtggataggggcagaggactttctcctagtgacactttgtctgttgttcacatccccctcccgagggactttagctcatatcgtattggacagcaccatgctgagagtaagattttgacaaagaggaggggattgggaatgcagggtgaggctggccagtctctgcctctcgcaaggctttcaccagctctcccacacttggctgtagacccagccctcatctgaaccctgcttcttacctgtgaacgtcataactcaacctgggcccaattatcttgcccactgaggagttcctagctggagtgggtgagtggcaggacaggcagcccctaccggttccggaacgcttcagggcatgacgtgtgtgtccccaacaagcctgagaagggagtgaacagctgtccaggggccaacggccagggtgccggggctgggaccccaaagggacttcccttcatgccttttgacttcgaaattgtcctctacacacaggtcccaaacaggaaacggttaacgacttctggagaatggtctgggagcaaaagtctgcgaccatcgtcatgttaacaaacttgaaagaaaggaaagaggtgagttccaggcatctggccccggtatcacttcctttcagctgctgctgccgggctggggatgttcttaccacttccttttcctacttccctcccttcctcccactatcactgcagaaaaaaacccaaacacatgcagtggcttacagcattttcttcacgaaacaaatcccctgtgtccccagcatctcactgttatctaatctgtgataacacaatgacacaagagtttcctttttttcccaagtaagagtggcccccggctggccccatggctctgcctgcctgatgagagacatgaatcttagagttttaggatgttgagcgtgtcatgcggcagagctcagactagaaatgaacatgatttcgcgcttattatccagactagagaaatgcttttggaaaacgttggtatattgaagaaatgttgatttgtcatccgaatatatttaattagctgtttctaattcaaaaaaggatgcatgtacgttataagaatttgaatcattgacaaagaagaaaagttgaactgattcgtttcctaatgtaacaagtactcattagcatctgctgtgctgggccagctctgtcccaggtgcaaggagtaggggctcaaattcagggctgagaagtggtggctgtggggagcctgggtgcgggggtggggttgagtgacaggcagggagccatgccataggcagtgagctcactctccagaatgaaagaagaactgggagcctgagggacacttaccacaggtggggcgaagttaggaggctgtgcttctggcgtgttctggcatgaaggcccggttcagtgggagccgtgtgtcctgcccggccctgctcagggcctgctgtgtcctgagctcctcagtcatctgctggcctggccccagcagttcccaggcattgtagcgaggactgtggggaagggctgccatttttagatgggagtaccaggccttggggagctcagctggggcagaagatgggtggcaggagcccacaggaagggcaggctgggaggtgctctggtccccgcagtgccagcttactaattgccacccaaaacacaggaagcagcctccagccaccgtttctggtcaggaataggatggaggctttcattctgctctggggggagctgaaacaggactgtggagggccacccctttgcccttgcaaatcttgcccttgtcatgctttgtcatggggaagagggaagagtgacagagggaagtaggggattcccagcccaggactcttcactctgcctgcgctgtagcggccatggaggaggacacccacgcgagggaaaaggaggctgacccttcatcaggagcctcagggtcccccgtgacccatggcccatagggaccagtcttcctggggttggtgctccaagcatgagaccagcacagaagcagtggggctcaaggacgccctcacttccctctttcagtcattctgctgaaagtgtcactggcattttctctccatcttcccccacaacctcctactggatttttccactcctgtgactcagtgctgggctgctgccgcgtcctcattctcaccaattcagatgaaatcatttctcaatagagttccctttttcttaattgctcacacttctgttgtggtttccttggcttccacatcctgggctctgcattgcaaaacacagctgccctggcatctcatgatcgggtgggagggaggcagagggagggggtataaaaccagccaccaacactgagcccttgagaggctgacacatgttctcagttcctactggagagccttcaaggtgagaagctcaggagggaccccagggctccccatagggccaagactcacccaaaccgggacatgtaggcatttgcaattcccctgggctgcatcagagatggcctgtgacccgcagccccgcagccccgcccggagccaggtgtaaggagggggaagttgtcggtagccgtcataacacaatgatgctgctctctactaaataccagatgctgtttgtttcataagactgttaatcctggaggcttgaccacgagctgtgctgctcaggggccattccctggatatactctctgactactggcaggcttgttccattccagacatgtttctctggcagatgaagtagatcttttcccccttgaggtgggtcctcattcactcgcgaagtgatggaggacaccaccgggcaggtgctgcgggcggtgctgcaaaatgaaagggctcctggaacgtgtattttgggtcattcttgcttcagaggtcgggaaggtaaagaaatgggcctgtctgtagcaatgcaccctcttctgcagactccacggcagcctcgtccctgctagagaaaaatgaagatcgttagaccaatcataggttcatcactcttgaatggcagactggcagtggtgcaaattaactttgtccttagtgaactgagcaggaaaaacacaaattgctgaatccagtgggaaatgtctggggggagcaccgtccttgccctctagcctgagggtcacttggagttaggtgcccagctctgaaggctacaggctcagcataactggttgatggtcagttaataaaatgtatgggattcgtgaatgaatgaagaaatgagacattgttgctgtctacatcagaaagccttggggcatcctagtcatagtttcaaggctgctgttcaccagttacgcagcctcagtttccccattcaagaggtcgacacacgtgaacttgtttctcagctgtgggagctgtgtgactccagctggtgtgtgtgaggccttctgtagttgggtggggggatgtcatgatgcattgcacccacagatctatttgcttctattaaattgttccgtgcaggaaaagtgccatcagtactggcccgaccaaggctgctggacctatggaaacatccgggtgtgcgtggaggactgcgtggttttggtcgactacaccatccggaagttctgcatacagccagtaagcatctctagttgctgcccttccagaaagatcattttcagagagcatcatgcccagagttaacatccttctgcatttatgaagtgctttgctcccagcccggcactgtcgcagccctggctgagagggtgcagtggccaggctgtgataggcagacatgcaagagggccaagacaccagaggccggtgcacaagggtctgcaggcagtgctgggggctcctaattcctagtgactcctctgggcctctccaggaggaagaccagtcattggaggggcctgggggtgaggtcctccctcagtagcacagtgacatttcacacactgactgggaggtggggtttttttctaacactttccgaattctgtctgaaacctcctcgttattttccacacttgggttctgctagttccaccaccccaaaaggtttaagagagagatcagtaaaaatatgtgtatgcaaagcagatgaaatcaagatatagaagaaagtttaaaaccatagagaaaagacagaagaccattttgtcaggatttaaagatagagtcattggcataattaggtcacaaaataagtgtctgaggttccaagaagccacagcaaaaaaggaaaaggatgagctgattattcttatcctatcccctgctggcatctctcccagaaatgtgcacacaggcgcacacaggcactcacatgcacacgcacacacatactcccacacacaggcacacacatgcacacatgcacatacacccacacacaggcatacacatgcacacacacccacacacaggcacacacacgtacacctacccacacacaggcacgcacatgcacatactcccacacacatgcatgcacatgcacacgtacacccacacacaggcacacacatgcacacacacgcacacaaccgtacaatgcatgcacgttcacacacacatgtgcacacacaccccactcacatgcacacatgcacacattcacacatgtgcacacacatacacccacacacattcacatgcacacacatgcacacacgcacacacattcatgcacatgcatacatgtgcacacacacgcacccacacacgcacagatgcacacatgcacattcacacatgtgcacacacatacatccacacacattcacacacgcacacgtgcacacatgcacacattcacacatgtgcacacacacatacacgcacatgggtgcacacgtgtacgcacccacattcacacatgcacacacatgcatacatgtgcacacattcacacgtgcgcacatacacacattcacccacacatacatgcgcacacatgcacacatacacatgcatacatgtgcacacacatgcacacacatctacttccaaatacgctgtgtatcaccttccgtgatctgggcaagggaattaaactcatgggctctgggtccaaaagctgagagaggctctgagggcaggtctgggagactccaaagagcaggccgactgcatcatctgtcctcccaaatgtaagacagctttgcccaaggaaggatgtgctgttggtgattactcagcaccaccggcctgaggtgggactgtccaggcaagatgggccatggccgccctgcttgcacgggggtctgtgagcacacagaccaactttggggatgtgtctggctgcttgggccctgcctgacctgggcatagacggttgctgcgggccctgttctgtggccccaaaagcagcacatgttcagagtcggcaggggtaaggtccaggctgtctggctcaggcaggccctctgtggatgggcccctcccctacgcagccccagcacaggggagcccacggcggcgtcctcagaatgagatgctgggggagcagggggaggattgtttcacccactcttgtctccccgcgtcccccgcagcagctccccgacggctgcaaagcccccaggctggtctcacagctgcacttcaccagctggcccgacttcggagtgccttttacccccattgggatgctgaagttcctcaagaaagtaaagacgctcaaccccgtgcacgctgggcccatcgtggtccactgtaggtacgctgtgggggccacggggcgggaccctcaagggcaggccacagtgggatgactcatcctcatgggcaatgccaggggaccaatatcagggtgggcagaggtttgggcagggctgatgtgaacacaaatgtcagtgactgagccaggccccaagaaccctacaggagaatgttcagagagccccctcttcatcccagtcgataaaacccaccaaagccaggaggctccggttgatggtgggaatggagttctgggcaggtctgcttggccgccctcacctctccccgggaatcccaagtcacctctgggaaccaagatggaaatgagagaaagccccctggtttctacaggaagccccccaacaacacacaagtcgttatggaagagcacaccatgctcagatgggcccccacagcagagtcttccagaacacgctgtcctggagaccagggtccgaggaccaggctgcccctcgccagctgccacttcagcctcggtttcctcacctgtgatgggaaggacagcctcggcggagcctgtgactggcatctgggtgggctttgcacaacatgaagaattactcaaatgtacagccaaggccaccccacaaccccctgtccacagagagccccacttgttcctggcagtgattggcctcaccagggtatcactttgattagatactaagtttccatctgttacagacaggttcattctgagtatcacagcactgccagggacaaaagccacctgcacgcagtgatgcaggcgctctgcacctgtcatgcaggtgttcacgagaagccgtccaggaacccccgaagaacgggctttccccaagtctgagcaacactcgcttgctggggccaagcagaggctggaccccaccccacccaccctccagtgtagctcatactgggaagaatttgcagggtcagataacagtaatctgacagatgccacctcacttaatgccccgagtcagatgacttggtttgcccagtttgacagagagggaggctggataccagagctgttgcatagttgatctgaggtccctctgctcccagggggacagatctaggatgccaatcacacatataagaagaagacactgtttggtaagtgagaaaaattctccacacagcctaatccgaggcttactgcaccagctgttaatgtgcctcttagtagagtgtcggtggctatcagaggaccggcctgagatcactttactgagaccacagctccctctggtggccgcactgtagctttgctcctaattaaccaaaaaaacaaaaagttgcatccagtgacctgggtgcgcaggccccttcggggcctttcatttacttcgggaggagtgtgactcacgacgcagcatctttctctttccccaaagcgcgggcgtgggccggacgggcaccttcattgtgatcgatgccatgatggccatgatgcacgcggagcagaaggtggatgtgtttgaatttgtgtctcgaatccgtaatcagcgccctcagatggttcaaacggatgtgagtcatgccttcctcttgccctgatctagcttcccaaagcaaacccgatgccttcgccacacaggtgtgcagggccctggctctgatgggcacgtggcaaccagcctgggcctggcctggcttcgctccccatagccttccctgcccacgcgtgggacctcagggactccctcgtcctcatctttccctcgtatcctcatgtgagatggggcaatcctactcccccaaacggtgcatgtacacagtgcgtggcgtgctcaccaatgtgaggctctgctgctaccgttctccttactcaagggcataaatggtcgttatccgtggccggtactctgactcttgcctcacacctccttgtgttggcaaaaagagaaaaagaagaaagccgccctctttggtctgccaagctccacgtgggccaagactgcagggcagagttgagggtgtgggcacccctggcctctctgcagatgcagtacacgttcatctaccaagccttactcgagtactacctctacggggacacagagctggacgtgtcctccctggagaagcacctgcagaccatgcacggcaccaccacccacttcgacaagatcgggctggaggaggagttcagggtgagtacagctgaccctcctctccatcctggtgtaagcagccaagggcacgaggaaaacaggtgaccatttaaaggaagcctctttcaatcacttgccccttaactgacctcagaaaaagcaggggcaatacctgagccatgatttacaagggaagaaggatcaggtggctttcagagcctcatagcagccctactaggcacacatttgtatttcccaatgctaaggaggcttcctgggttggagagtggtttcctttgagcaggcgtccttgccagcagcactagtcctcggctgagcaatgtgctcaggagtgtcagaggtttaactgtgtcattatatccttctctgctgcagaaattgacaaatgtccggatcatgaaggagaacatgaggacgggcaacttgccggcaaacatgaagaaggccagggtcatccagatcatcccgtgtaaggcacccgtggcgtggcttgggcagggctggggcggggctggtgccggaggctttcatcctggagaagccattgaccgcttacccctgtgcaccagggtcaaaagcagggtgtcctctggcctcaggctaagggctcctgtgtgctgtaccaaatgtcaggtagaaaagacacctgtgaagcaccagctgacccagacagtcctgcatgggtctcaggcaagctgcttcggatatgagcttgcagatgcgggagggcagccgaggctgatttcaggggagggcttcacagaagctggagatttgcggcaggcacgacttgggattccttgtctcattccttgtctccccaagcctgggcagaggcccgcctcccccttacacagaggggcctgagccacccagccgaggccatgcaggtgaactcagctgagaccacctaggaaaaggctgtggccttgaggaggacaagaaatgggcctagggtagagtcaggacactggtctgccacccaggtcatgggagagggaaggaggacctggcaggtgtgggaggagtggaggcaaagctggcaagaagacagggccacatgcagtgggcaggggagtgggaatcgggaggctcaccaagtgggaaaaagagaaacttgagaaacccggccccaaagcagactccacagggatccgaggaactagggagggaggtgggagatgccccgcttgggaggagggtgtgcctcgttatagacttgtcctcgacagagtcacagctcaacaaacaccatctggaaacagctgggagcaggcctgctgcagcagggtctccccgagcactgcaggcgagtagagctccccggggtgctgccatcttcagactctggcccttggttttctggggccccggtgtcctgctggccactctagattgcttgcctggccacattccatttactccttcagcgcaatatttttagtgcttgtattttggtatgtattatatcgattcctgaaaaatgaaaatgataattgggtggttttcagagttttccttcaaaaagaaaaatacccctgagccactttaattatcgtctctcataacgtaaactttccaaagagttggctttacgtagtgattttattaataggatctatattttgcaagcttgtagcaatggattaaagttagcaaggtgggaccctttttgtaataactaaaggaagataatgctttgcagatgacttcaaccgagtgatcctttccatgaaaaggggtcaagaatacacagactacatcaacgcatccttcatagacgtacgtatgctggcctgggttgtgtttatgcagatgtgtttccttcacatgtgaccacagacttgattagcttgttttcacaatgagaaagaattgacatgtttccagaaactcagccatttttgttagcagaattacttgcttaaaaaaaaaagtggcaaggcacgatggctcacacctgtaatcccaacactttgggaagctaaggcgggcagatcacttggggtcaggagtttgaaactagcctggccaatatggcaaaacccgtctctactaaaaatacaaaaattagctgggcgtgatggcaggtgcctgtaatcccagctacttgggaagctgaggcaggagaattgcttgaatccgggaggctgaggttgcagtgagctgagattacaccactgtactccaacctgggcaacagagtgagagcgagaccccctctcaaaaaaaaaaaaaaaaaaaaaaaaagtggactttggaaatagaaggacatagactcgctgctaagtaattggctcttttttcattctgcttttaatatatagttatttttcttttacatatctgttacacaccaattatatatccactgcctctgtgctctttctcttgtgtgatttctgcaatgtgtacccacgtggacaatacaattatgtgttcagggcacacagaggctgtcttcatgcacagtggagttcgcagaagaagggcaaaagggggaatggcagccaagtgtgtgttcatattgccatttgcagatgagaaaattgtaccagaatccggtgggctccatgctgatctagctgaaacacacagaaacatgttagaatctaagccaccaggtgctgttcaggtggccacaggcaactaccagttcataatacccatttgttgatgacctcaggggctgacggtggccgttatggtttcagataagcgagcttcttgacctgcttgtcaggtgtgtgcctgagtgctcgtgccaactggggtctggtgcagaccatggaggatgagagagttttcctcattaggccttaggctgtcctaaacttagggagcaggtaatggagccaggatggaaggaagtcagactctaacctctgcgcctccatttgaagggctaccgacagaaggactatttcatcgccacccaggggccactggcacacacggttgaggacttctggaggatgatctgggaatggaaatcccacactatcgtgatgctgacggaggtgcaggagagagagcaggtgaggagtgccgcccagcccggtccctccagggcagcctgtgcacctgaggcactgtccccgttcattacaaatgtcccacctgccatcactgcaaacacatgggtgagaccaagccaggaccactagggaaggagagagattggaaatgaaaaaggtttcatttcaccctttccctttttgggagtgaggtttaaccatagctacccgctgccctttatccttagcctacatgttatttaacctgccctgaaattctgccatttggtattggccaagatcataacctgttgaagaaaaagacatttattgacttttttcaagacatgaagacaacagtaaacccaaggtttaccaacaatgtacatctatctgggttctcccccaagacataactactgctgtgtatttgtgtttttatttctttgctctaaaaaggaacagctttattgtgatataattcacctataattcatgcaattcatctttttaaagggtacaattcagtgaattggagtatattcacagagttgtgcaaccaccaccactatctaatctgtgatcattttcatcaacccaaaaggaaacctcgtaccattaacagtcactccccattccttccttcccctaacccctggcaaccactaatctgcttcctgactatgggtttgtctattctggacattattataaatggaatcatacagtatgtggtcttccgtgattgggttctttcacttagcatcatgctttcaaggttcatctatgttgtagcatgaatcagtaaatcattcttttttactggcaaatagtatttgcttgtgtggatatactacactctgcatatccattcatcagttgatggacatttaggttgtttccactttggagctattataaatagtgctgctttgcttggtgcggttgctcacacctgtaatcccagccctttgggagtccaaggcgggcagatcacctgaggtcaggagttcgcggccagcctggccaacatggcaaaaccccgcttctactaaaaatacaaaaattagctgggcatggtggcgggaacctgcaatcccagctacttgggaggctgaggcagggagaatcgcttgaacctgggaggcagaggttgcattgagctgagatcgcgccattgcactccagcctgggggacagaacaagactctgtctcaaaaaaaaaaaaaaagtttcttgaacattcaggtagtagtttttgtatggacatgctttttcacttcccttgggtatacgcctaggagtgtatatactaggagcggaattgctaggtcacgtcataactctatgtcataaacttactgtttaacatttttgaggacctgccagactgttttcctcagtagctgccccattttacattcctaccagcaatatataaggttctaatttctccacatcctcaccaacattgtcattgtctttttgattaaagccatcctagtggatatgttctttgcttttttaaaacatcttttaaaatcacatctgtttatgcctacgtagactgttgtttagttttacttgtgtttgaactttatagaaagagcatcattacagcatgttgtcttctgagacttgcttcttccactcaaaattgtgcttttgatattctatgttgatgcttatgctgtggttcattcgtcatcattatttcattatattccactgcacaaactatatcctgcattagctcaggtattccttctcctgtcatgggcacttgagttggtttcatttcgttgttttacaaacagtgctacctgtacattctttttttaaaactttaagttctggagacaagtgcagaatgtatagttttgttacataggtatacatgtgcatggtagtttgctgcacctgtcaacccatcatctaggttttaagccctgtatgcattagctatttgtcctaatgctctccctcccctcaccctccaccccccaactggccccagtgtgtgttgttcccctccctgtgtccttgtgttctccctacctgtatattcttgtacatgtcttatgctgcactaggactaagatgtatcaaagagccaaaatgcttcattgaagagtatgtgaaagtttgaatttgcaagataattcctaattgctttccaaagtggacatcaacaatgtataagagatatcattcatctacatacctagtatggtattctcaaggtgtcctaattattgttaattgaaaattaacaaaatattgttcattgtataattattgtataaatactatctttttgtggctctgatttgcatcattctgattccaaggtcaaccccatcacttcatatatttgtggatgacatatttcctcttgtgtcaaatgcctgttcctgcctttcactgatttttctattgtttgtcctttcttattgatttataggagctctttacgtaatcttgatactaattctttattggttttatgtattgcaaacatcttattgcaatctgtggcgtgtcttttcactctgttaatgatgtttgttgatgaagagaagtgaatgttactgtaatccaatgtttcaaattgttgcatcgtgattggttagctgtttgggctcttgtctagtaatccttgtgtacctcaaagtgaaaagatatttcttcttccaagagtttcacagttttgttttttaccttaaaccttactccatctgggtgtatttttattaaggttcaaggccatgacacgtggaagtgcagggtgtacactgcccagttctaggaagagctgggggcactcacatcaaccctggtagggaatgagtcagggatccaatttcattttccccaggtagaaaaccaatttttccagccccacatattgaagaatctctcctttctgccatatgttaaggtttcatatatatatgtgtctgtttctagactctgttctgttccctgggtcaacaagcattaacaggcatttatattcatattcatatgtttttttttttggtcagatgaaatacattaactggtttgagaacaattctgtgttataaactcaaaatcgccagcagcaaattatttattacaagacttaaatttttattttatcccctaaggataaatgctaccagtattggccaaccgagggctcagttactcatggagaaataacgattgagataaagaatgataccctttcagaagccatcagtatacgagactttctggtcactctcaatcaggtattgttgaagtagctctttaaacgcttgtgaatttagtgaaccacgccctccctctgggttctgcttgtcattgaaccagaatgtggccctgcacctgtcctgctccttcacctagtcccattggctatgaatggccaatgggtttcagagacagtggcaggcctcctgtacaattcccatctccctagctgcctacctcccatttatctctcaggagaattacattagccattagctgtgagaggaagaacaaaggggactaatgaagccacaggggcctctctggggccctcctccaggtgccttctcagagccccccaactgtccccatttccactgggtccttggttctgctcatcctctctccttggcaaagaatgagaactcggggtcagctgtaggtaggatgactcacttgtacacaggtcttgatgctgagctccaaacagtcagtatcacgtaatgcacctgccactgtctcctccatgccagccacagagccaccctggccaccagactcagatgctgctcatttgagctctgaagggaaatgcagggccctggtttcttgagaaagtgattcccttctctccagcagagctgccaaggatcccgtaggggttgggcagtcctcacagggatccaggggatgtcctctggacggctcgctcccccttgcagaaggaagcacagccagccacctgccttcttctttaggacaagcaggtttcagccttctccttcaggctgcctcggtggggatgttggcagcacagaaggctcagggagggctcccagccttggccaatccctgagagggcagatggggctggggcctgttccccggcaggcaggcgacgctgagaccccctctcctccctgcagccccaggcccgccaggaggagcaggtccgagtagtgcgccagtttcacttccacggctggcctgagatcgggattcccgccgagggcaaaggcatgattgacctcatcgcagccgtgcagaagcagcagcagcagacaggcaaccaccccatcaccgtgcactgcaggtgagcccccagcccgaagccctccaggtggggtggacacaggctgcacccccccagtacccgcagctgtgggcagcagagcctggtcgctgcccctggccatggtattccctagagtctcctctctacctctccttacacacatgcacacacgacttcacttaagtacatacatgtcatcgtatcatacataagatgcatgtgtgtcatcttaacataaatgcagaatgcacttcagagggtggagttgggaaaccactcaaacacacatttccatgtgcttttgaagtcatcaaaaaattgccaggcagggctcggaggaacacactcctggacttcaagttcctgggtgggttttgagagactgccttactgggctgcattggcctacacccgccctctcccatgggctgggattcctggccatatgaggagtcccaactgggattgtagccacgctggtcctgcagcctcagcctggctcccaagtcaggcccaaaggcagagggacaccctgggcaggtgggacatgcttagtccgcaggtgaaggcgtgaaacacagcacgcccaggggcagatacgcaaatctggtcaagcccaccggccacccacttgcctgccttctgtgcctctgtagttctgatcctgctgcacacttctgctggcagggacctcgacacccggcaaggttcttccaagcaggagcttggggtgtttctatccttgggtggtgctaatgtgctcctgaaactgcagttccatggcttgtctcacactggtggcgcccactctttgtgactgcctttcacccccacccactgtcccaccccttatagctggcagagctctctccctgcctggaccccaccggggtgcactcctggcctggccagtaggtggagcacacacctcggtttttggttttcctggtgccttccaagaaatcatttaggataaacttgaaatgagttccatagggcactggagatgcagaggtgaacaagatcccacctgtgagaacgcagatgcggggccgatcattgcggcaggacaggagccttggaataagcccacatgtgagattatggagcacagagggcagccaggcatctccagaagacctgctggaagaggccggtccaccccacctcctccagcccagtacacctgggctctcctacgagggcctgggctctgctcttgtggggtttatcagcaaatgaccatggtaaatggagatgactcaaatcggccttgctgggaagtgtcagttgactgttcctggttgtgaatgtccttaaactgcccctccctttcagcatcacctgtttcagaagacacccctggcacagtaaggagagggtatgccaagattacctccttcctagacctgaactgggagggtttgcatttctggcaagttcccaggtgccaactgtgctgctggtccagggaccacactttgagaaccattgccctacacaaggaagaggggaaatggtgatacttgcttaaaaacttgtcactggtcctgtctcattttataaaatatcggtctcctgtaattagggaggtgttttaggaattttacatttgctaaatcttgctcataagttacactacatacaaatgatcaaaaaaaaattcagtcaaactcagatcattttcagcgattgttgcttcagtgctgatatgcaggggttggctgtcagctctccatttctcatccccaagtgcaagtcggatgatctgcattaagcgctttttctctgcagtgccggagctgggcgaacaggtacattcatagccctcagcaacattttggagcgagtaaaagccgagggacttttagatgtatttcaagctgtgaagagtttacgacttcagagaccacatatggtgcaaaccctggtaagaatctgaataaggatgttaccagaagagtggagaattatttcatgttgtatttgatgtatgtttcattaaaggaccttaagtacatgggggaggtgggaaggtaaaattcccaaggaaaagagccagctgcaatgtttcgcagtaaacctctgcagagccctccttccttgggtctgtgacgtgggtgtcttctgggcaagacccgggaggaggggcctgtccgccagtttcaatgtctgagaccactcggagagacgcactgaggataggagcttttgtgtcaaagtgaactattctacgagagtcctgtgtgcactgaaaaacatactcttatcaagttcaaaagcagcactgaaatttaaaatcctggtccttctcatttcaatgttatactcgtccatgtggcttgttttccctggcggggtctcactcagcctcaagataccgtccacgggctgcaggaatccctaatgtattagtagttttccccgtacattctttcatttcaaggactcctgctttctggttttcagaagcgattcctcctcaccaaatactatggctcgtgctgctaacccagcgagtacaattttaaagcctgttacaatgcatcctttttaccaaagcttcccacttcgcacctgtcctccctgcctgctcactctccacgctgacaatcctggctcacgcagcgccctgtgcatagagaggcaggaaggaggcccttctacgtccccctcacagcaaggcgcagcaggagcgaggacacctgagctgagggcgggtctgtccatccacacccaacgacctacagcaaagaccatctctctaagcagtagcatacagagcttcccctagtctttttagggactcacagctctcattaatctgcctggtctggccaatatattctatcttcgagagcatctgtcatccaggtgtcctcccgtctcagctgtgctcttcctgaccgcagcttgcccctccatgctccctgactgagaagctgccctcagatgttgtgtggctgtcatctgtgctctcttgcctggtaacagcttgacagagcactttgtagcctgacttttagagtaaagggtctagtccaatgcctggcccgtggcgagggctccagagcaagtggtgaatcagcaaacgaatgagggagaagagtcactaaataaccatcaggcgttgggcgcagtgcaaccaggtgccttacagatgtctttctcatttcatcttcaccatctgcttgcccttgtgcctgcttctgttcacaaggagtgttctgcaggtgcctccagttaggacggttgaggggcctgcctgagatcttcaggtattaagtgtcagaatgagattcaaactctatctgattccagaagggaaaggcttaactagtactgtatgctgccagatctaacatttggcagggagattttggcaaaaaaaaaacacaggcacaaaaatattattgagtaaagagatgattgctgacctgcaggttgatttagccctgcaggtgagcacagtggcccaagaaccagtttccaattgctgagcactcagggaagacttgcttccagcatcctaggtaggctttggttggaactgacatttcaaaggccacaagtacatctgttctcctggagtctgtggattgaccagaaatgtctgtctgtgacctgaggtgtggcttgtatcatccgagcacactccaaagtacacttcatccatcactggccccaatcacttgtactcgagactacgtgggatggtcagcagttagctgctgtgttagctatgaaaacagagtaattagtgatcgtctccatttccatcccagactgagccagctttgatattcagtcaatgttgctttaagttggaaaagtcaatgttgctttaagctgtttgcctctttaaagagagcctgtatatttattgagaattccttctaagaattcaattccctttccttctgaaggctgggtgatcagctgcgtgtcttagtagccagaagtgaggaccctacaatgtggtcttggctcttccaacaacttcatgcaaattcagaagcaaagtttcaggctcaccttttccttctctggaaaactcagctccttcccatcctggccagaccgggactcaggaagggctaagctagctgtttggcatctttccacccaaaagcatttagatatttgttcactgtgtgctgagaagagcccaagtgcaatgtgttggaaagaagcagggaggtgctgaggacagctcttggcctctccggctttccaagcccctgtcccggccccaaactcacatatcccacccaggggtctgggaggaccagcctatatataaaacaatgtcccttttgtacagtaaatgtaggctttaaaataatctagatatgcattttatttaacttttatagatcgctttatgaaatttatctggcaatgttagtactctgatttttttctctttctctcttttttttttttttttttttttttttttgagacagggtctcactctgtcacctaggctggagtgcagtggtgcagtggcacaatcttggctcactgcaatctgcctcctgggctcaaggaatcctcctgtctccgcttcccaagtagctgggactatgggtgtgcaccactatgcccagctaatttttgtatcttttttgatagagatggggtttcaccatgttgcccaggctggtctggaactcctgggctcaagtgatcctcctgcctcagcctctcaaagtgctcttattacagacgttgagccattgcacctggcctggttttttgtttttttttttaaattcaaaaatagttgttttccagtttcaatgtgaaagccacagacatttaactcagcccattaaatacactaagttgaaatgttaatacactaactgacacattctacgtagaaaaacagctttatttggaattctgcatgtgcctaaaaactaaattacgatgtgcataaaggtatatggtattttaatgaatagtcacacttatttatgtcttgtttttgagtatttctcctgattaatcaaatatatttttgggaatatcattttaatgtgtccttgtttgtcttttcaggaacagtatgaattctgctacaaagtggtacaagattttattgatatattttctgattatgctaatttcaaatgaagattcctgccttaaaatattttttaatttaatggtcagtatattttgtaaaaatcatgttaatttatttcatagttgacattaatatcttccctaatttctttgtatatattttgttatgccttaaaggccacctgctatacagttgttaaatcttaaatatgctttttaaaaattggaataatgtattaaggtcaaataatatcccataaaatatatatttctgctaatattagtaaatatcttaatttttcattagattcatatcatttaatttcacatattcaacacctttaaatgttgtaatcttaatatgcgaagtgtgcctctgcaagatactaacacaaagctcatgttaagaaaacagttgaggactcagaagtcagttgaaaatgcactttcctaacagtgaattcacaaccctgaacagcagcatttttggaaggcaaactgttcgtgatggtacaatgtaaatggggacttctgtaaagttctcagtttcggtccatgtggtttatctttacattttgaagatcaaagaagtctttacaacctgaatccaggtctaaaacacactagagtagctggtgactataaataatatttaaaaatgctgtgtctacaccatcaagactgtgtctacactatcttggctgaacgagaagagatgtaaatgctgggtggtcccgttgacccacggcgttgggtacaacaaaaccagccatcggagttacaccccaaagcaccatttgctgtccagctgcctgtcgtttggcccagaccaccctcagaaaaaaaccagctgcctctcccattctcccctcccgttctgccacagcggcctgggctggtccagtgctatgcctggaggctcaacacaaaacttcccatccaaacattcagatgaactgagcgtcttacacacgcagtacagaggagcacacattgggatagaaacagtagaataaccacgggcaattaaactttaaattttctgagcagcattttggtatttaaacatttcttgtaaaaagctgagacagtttgtaagaaaagaatccttaaaatctagatttataccattttttaaagtcccacctttcaatgtttaataaaacaaaaagagaaatccttaatctaaaagctaaattatttttgaatggaaatactactgagaccattgacactggataacagtaatgatcccattaccagataagattgactgacggggaaaaaaaaaaaaaagaatggggtgtgaatgtaccaacactgaatcttacagcagttatctttctatggccattaggtacctagcagatgtgcacaatataaacaaaaagatatctggcctaccttactactaaaagcatttaacacatgcatttttggtacttttttttgttttctaaaagctacataaaggccttatttgacattttcactgataactgatcgcaccctcgtgttgcagtgttcgtcccctattcattaacagtgtgtgcaaatgcaaccccaggacacgttattgttctgatagatgctcacagggaatcaagcttctcgcccactccacggctctgagccccatccaagggcaagacttggtgcccagctggaaggacgaaagcacactttgtgaccgccatcctcaccagctgcatgcctgggctgcacactgctgaacgtgctcctctctccttctctgtacaatgattcagcatctcggcggaagaggaaaatggagctttttgaggctcgccaggtcccttttgttttcaccattaaaattccaaacccaaagcctttgtttgactgaaggagaagagagggaagtaagcttctgttcagcacctgaaccctagaaaaagagccagtttgctacgatgaaggtgacatttctctggtcatttgagagttcgaagtcaaagccgaggggcacaggctttggttcatgtctaggagccctctgtcagaatccttgaagccctttaatggtctaactggcatctcttgtatcaagaagtacctttaaggtagaccttttcagggtgccctcaggaaagggccctgctcatgtttttttcctgtccccttagaccaaccccaggtgtccactgcaggggttctgcctgttcccaaactttttccattccaggaacaaaggagaagccactttccccaggacgcaagactctcccctccactgtccgggacagcgttcgccctttagcggggaggtcattacagcctcatggcctctaccaaggccccagatcacaggatctcctgggccttggagcacctcacgctgggggaatcaatccctgagggactcagaatcttctccgtgcaacctggaaagttcatctcttgtttccttcagtcaaagaaagtccattgtacataacaaaacagcccccaaacagcccagtgccgacaccattgttcctttcacactttcctttgttgcatgcagttgggttcaaatgccaaatagtgattagaagacgaccattctgatctgtgtgtgatctggtcactatgtgactgcctttacggtttctctccatgtgctatatgaatgaagaatgcataccagtgttttaaaaggtatttttatgtgtttttaaacacttttttaaatgagcctgacacctgtgtttcagcatttggagacatccccatgttattcttttaagtgtataattactgatacttttttgtttgtttgtttaactaagttgtgtttaacttatgtgcagtctttataatgtatgtatgttattacagtttcaactatcatattttctttgattacatttataatttgatcttgctctgattataatgccagtgaatgttgctgaactctttgtatatgcaaattgcaagatttaaaccattctgatgcaaggataaacctttactttgactaccagcctgtgtttttgtctttaaatctcttaatttcattcctctgcaaaaaaaaaaaaaaaaaaaaaaaaaaaatcgcctgctgtgagatggtgtttgctgttgtgggcccttttgttaccagtttctctctatgggtctgtgggtcccaatgttccatcctagacaagcagcatccactctgctgtggatgtggtcttggcccttcccctggggtaagcagacctggatacatgaaggtgcaggcacagctggacacagtggggaggggcagagggatccaaggaaaaggaggtatggaagaggcataaaggaagtcaccaactgggcctccaccaggggccaatgaacccaaatagccctgcctgagcccaacgcctctgaaggagctgaggtctgcaaaagtacgcttgccagaccagcctcaaaggcagctactatcaacagaaatacacagataggacgctgagtgctgagggacctcaggagagacagacaggtagccaggggcaccgattagtgtgtgtgtctgagcaagccactcagaggagcattactgagaccacactgggaactctactctgcagagatgtgcgaggggcctccccacatcttctgcatgaaggagcaggatgctgcagcactgacccacagctctcgcccaccaggtggaaagtttgttccagggctgtcagctccctggcacatgcatgtcccacgtgtgggcctactgttgccaaaatcagaggaacacccagggacagtggcgcacaacatcaaggcatctgctgtggtcaccaagctcccaagcttggcctctaacagcttgcatattgggcgtggcagctgtgtgtcagtcgggagcaatgttcatccctgggggccctcaggccatctgctggtttgctgggagggcagcttcagggcccaagacagccatgccccagccagggctcacattgccacttccacattcagtgcccacagctggtctcccacttggcccagggtctaacagagccaactgcccctcgtctcaaaggacggggcaataccagcaatatagggagacatgtttgttacaaacattcaaaccaaacagaaacacaccaagagcatttagcccttttcctaattcctctccccatctcaatccattggtaactttggagtacatctccaaacagacaacactctgcaatttaaatctgtatagttacagaaacatatacattgtttgcttttatgaacaacagtcaaactcctggtatatcatcaaatccaggactaccattgtcaaaatcactttatgctctgctaagaaagcaaaaatactgccatttattcctgtaagatcccaccaattttgtgataatcctgatgttagggaggttaatatgtgaaagtactgtgtcttagaagtgactaaatctgccacatatgggcagttttgcagatggccctctttggtcaacattctgcctggacatgtcagcacgtacacagcttcctacttctgtttaatggctgcttggcattccacagtataaacataacaaagtctggagagtcacctccacctccccagtgacagacattaacttctttccacatgctgcaattctataattcaactgtataatgaatactcctgcatgtgtgtatgtttgctaacgtgcaaactagttctatgggagaattccctagaagtgaagtttctaggtcaaagggcacattttaaatttaagtagaaaccaccaaattgtcacctccaaaggaccttcccgggcaccaactcaccaatagggcatgatggcgctgtctccctagaagtcactcacccgggacgttgcacacctgagaggcaaaaaaaaaaaaaaaaaaaaatcagacttcatgttaatttgcatgtcccagagttctattgggctgagcatgttttcacaagtgggttgtgtttcatcagtgaagcatcattcatagtttcatccattttcctcattgcaccaactgagttttcctcgttggtttattgtcaatctttttttattattattattttgtttgtttattgtcaatcttttgaaaacacgggtactaaccctttgtctttcctattataactatgccccttctgttcctttatcagagtgtctctgaagcctgtttaatgcactttccaggaagcagcacatgtgatgcctcgacacctgtcacccagcacattgtggcaacatactagtctcatctcaaataagactctgggcttcttccaggaatcagacgaagtttcaagaaacacttcacaggatcaggttcccctccagaattctaggctaaaggagcccgtctgtgccttagaaaccaagacctgtttccctcttgcatatggaccagcagcctttgctataagcactcagcggccccagcggaggctggaccgaggtgtgagcttcacatttggctctgctctggatgctgaggttacatgacagtgccctccttctgaaagtaacacacccccactctgtccatggtaatattatcagccagcaattttgtttccaaataaactgaaaagccccatggatgaaagtgatgtcatcctgatggtgcctgcattgccacctacaggagtgtctgccaatgaccgtgcacctggaggtttgtgtcactgagcggccagcatgtggctgaggtattaggctgccgctcctttcccaaccactgaatcctgtccaaggttgcctagggcatcccgccctcactgataaccctttcctgagcaaaacctccctcaaggatgcaaacagatgccattcagaacagaggccaacaaacgcaacaccagttctttggggcccttgtgtggtgagcactaatgcttgtgattaaagaggatatctgaatgagcatggaaaatcccagtgctttctcagtaatcactattaagatgaaagcataatgagcacattataacaactagcccagaacaactatgatagtaacaatcaacatattcacttcgtttctcttttcttattttcaaaatatgtatttcaggtttataaagtgagccatatacacagatagttctcgttccatgagcacctatgtgctgggccctttatatgggtattatctgcacaatatcccctcaagggctgagaaacagaagcttccggaggatatgaaactagaccaaagttaggttggaggtagcagaagagacagaattccaacccagaacacccctatgctgctgtggcccctctaaattcagccactctgcataccttgccctttgagctgttattaaacaacagtgtggcacgttaaaaatacttgagaaggccaggcacggtggctcacgcctgtaatcccagaactttggaaggcagagctgggcaggtcaggagttcgagaccagactgggaaacacggcaaaaccttgtctctactaaaaatacaaaaattaactgggcatggttgcaagagcttctaatcccagctactctggagactgaggcatgagaattgcttgaacctgggaggcagaggttgcagtgagtggagaccgcaccactgcactccagcctgagaggcagagtgagactgtttccaagagaaaaatcaccgcgtaattgatttaaatgtgcaggtgggtttaatacaactccaaagatgcagaattcctagtttaatataactttcctcagcatgagaatcatgttgatcctcctcctctccagacaccaagtgagctgatactctggagacagagcatgatcgcttggtgtgatggagccacggagttttgtagtgcaagaaaaagggctgcaggtgattgttccagttaaagggaccccagtcccaccccactgtcaggagtctgttttgtgtggttcttgctagaagaggtcagtaataccctctcagtgctgtggtcacttgtcttaggaaagcttacacatgtagccagtatgcattcaaaacgaatcagcacaaaactgccacgtacccatccacctgttaaggaaaaggctcagcactggggaagctctgaggacacataaatatgttggaggacacccactccctgcccccaaggaggtcagcactgcccatgggatatacacatcctctacgtttctattctgttgatagccaatatcttgcattttgtaattataaacagaaccttgatttttaatagttttaccacctatatttgcatctctaaacagcagtttatttttgcctatttttgagcattttataaatgaagttaactttatgtattaaggctcaggttttgaacgtacaaactgtaccacactgattcaaatagacatagttcatgttgtgtttactaatatttcaagtaaaataatgtaattacaggtataatgtttcttcaaatcatgcagctctcagtagagtctatttatagcaaagatgcttcacatttgaaaccaacagtgactggcaaatagaatccaccagaaacctgggcactcaaaatgtaacaggcatgcaatccattgcaagcctggttagggaggggctgtatcgcctagcattactccctaaaaagtggcctcaaaacctcagtgataggcaacaggggcccactttgggcatcttcgcagccgttgtcataaaaagtttacattcagaaactggtctcaccacttcactgctctcgccgcaagcacagagcaccattatctccagcaattcccaagaccctcactcgccctgcaccttacatttctttggctctgtatggcagtcacagctctaaagcttctagttgcagaagttactccagtgggaatactccaagtatgcctcgtcctcgcttgccttggcttctgcataaggttagtaagaagcaaagcatggccaggactccagggaaatgaatggacgaagaccaagaaagccagatggcataaccagatagcaaaaccaagacatcatgggccactttgatgctcaagccaccacccactgtcattaaccgggacagggagggggtggtgtgttttatgaatggacttggtgccttccataattccctcatcctcagaatcatgaaccgagacacatactttgggttctcctttctgggatgagagacgtgcagatctgtgtggtccaagtttgaatactagggccatcctgcctctttagaattctgggacgacctctcttgccagatgctgttcctctgccctaatggaatgtggcgtcacagtgcagggctgaggtcagatccactcttcttagtggacacgaccttcagttttatagagcaagagggtctcatcttagaatacgtctttaagtgactgatttttaatcatttacttatttgtttgtttatttatttattgagatggagtctcgctcagtcgccaggctggagtgcaatggcacgatctcggctcactgcaacctccgcctcccgggttcaagcgattctcctgcctcagcctcctgagtagccgggactacaggcaccagccaccacacccagctaattttcgtatttttagtagagacagggtttcaccatgttggccaggatggtctcgatctcttgacctcatgatccacctgcctcggcctcccaaagtgctgggattacaggcgtgagccaccatgcccggcctaaatgaatgattttaaaccatatcccttttcaagtcacagcagtgcaacgccttaaaatccaaggcccgtttccctcttgctttgattggtgggcacaacccttagttcttaggaacccaggggaacagaggttgggaagagaactgccgtgagaaacccaaattgtttaggtggcatctggggtcagctagacattgacgaggcagctctgtgatgctggctgggcttattcacattcacgtctggggattggctggtagttgggtaaccccaactagcctgggctggggggccggggtagctcagcggtcttccgtatggctgtcgtcttccaacaggctcgtgtgggtgaaggcaggcacagacggtgcacacacatggcccattgcttccccgaccaacctggaatccaaaggaagaggcaggcgagcaaagcgggctgtacagaggagggggcagaggtgcttctgagaggggtatcggacggtgctcagggagcctcaggggccacctagcgttgtgttacctccaaagcagtgctttctcggagtaacagagggcgggcccagagccaaatagctggattctgaaacacaaagagctaccacgagactagtttttattacactaaaaattcttcattaagtttttatcattgccaacctaaatctatataaacatataatatattttatgtatatattatttttacttaaatatgtatgtatatatttataacattttatatacatatttgtgtataaattttcatagataatatttatatatttatatagaacttaggttgccaatgatgaaaacctagtgaataatatttagtatatttatatattttatatagttatgaatatataatatacttaagttatatacattacattaaatatatttaatttatattatacacaatatattagattatatctatagttatcatatttatatataaatacatacgcttatatataaatataggtaacttttcccctaagttgctcctatagttgtttttggctctaggggacatggaagcaagcaggcagatgaggggcccaggaataagtgactcacttcagcacaagctgcatctcccgagccagggtggaaatttaggaatttgctgatacacagtcatgcccctcctccctcccaacatcaaaattgacagtgctgcctggcctgacccgcctccccttgctcatatcagcctggcctggatctgagacccctgcccaagaggggccttggatataattgcacttctccttttccagaccccacacaagaaataagaaaagcctggagtcgtgtccagtcctgactgctcctttcccagagttctaggcctctcgaaggctgaggccacgctgggataagaggaagacggcaccgcttggagaccttctgagaatgggggccaggctacacaatccacccgagttttcttcttttgtcctcacaaccctacgaggcaagaaattgccatcttcactctcccagctagggaaactgaggctcagaaaggccaagcaatgggcccaagtcatgcagcgagcaagggacagggctgggattggaagccaggcctctcagcttccaacgtcctggggctgggagccggtgggggttccagggcccgggaagaccccaaagcccaaagtgaaatgcaccctctgctcatgacccgttatattgcaagggctgctaatttcaatgtgatatgtcctaggaggcatatatgttaaatcactcatttctctagatcagggatatgcaaaccaaggtcctcagtcaaaatgggcccacagcctggtttttgttgttgttgttgttttcttgcttgttttgttttgttttgttttgcttaagatggaatctcactctgtcacccaggctggagtacagtgggctggatctcagctgactgcaccctccgcctccctggttcaagcaattctcctgcctcagtcttctgagtagctgggatttcaggggcccaccaccacacctggctaatttttgtatttttagtagaaactgggtttcgccatgttgaccaggctggtctcgaactcctggcctcaagtgatccacccgcctcagcctcccaaagtgctgggattacaggcgtgagccaccgtgcccagccccacagcctgtttttattagccattttttggacatgcctgtttgcttgcgtgttgcctacagccgcttctgttctttaacagcagaggtgagtcagcataacagacagtatggcccacgaagccgccatatttactgcctggtccttgacagaaaaagtttgctaattgctgacctggattaaaatccacagaaccttttctatgcagggatgtgcttccctatgtcctggccatgcctggtcccagcaccacctgttttagccagacctgtgtctgggccaagctcagcaaagttctgcgatctgatgtcatttaaagacactgttgactgggcatggtggctcacgcctgtaatctcaacactttgggaggccaaggtggctggatcacctgaggtctggagtttgagaccagcctggccaacatggtgaaaccctgtctctcctaaaaaaaaaattacaaatattagccaggtatgtgtggtgcatgcctgtaatcccagctcctcagaggctgaggcaggagaatctcttgaaccttgaaggcagaggttgcagtgagccaagattgtgccactacactccaacctgtgcaacagagtgagaccgtctcaaaaaaaaaaaaataaaagacagtgttaatatggtatcagattgtggctgccacatcacacatattcttttctcctgcagaggccatattcagtttggataaccctgaaatttggttactcgactcttagttaaataatgtttctttgcattgttggtggtttgggtagttttcaatacgtgggctcgatgaagacatagacatattattcaggatttttatttttcttttttgagacagggtcttgctctgttgaccaagctggagtgcagtgatacaatcatagctcactgcagccttgaactcctgagctcaagcagtcctcccacatcagcctcccaagtagctgggactacaggtatgtgccacaatgcccgctaattttttcttttcttttttctttttttttttttttgtagagatggggtctcgctatgttgcccaggctgatcttgaactcctggcctcaagcgatcctccagccttggcctcccaatgtgctgggattacaggtgtgagccactgcccctggttattcaggcctgttacgttccagattcttccttcacttccatagagaaatccctagtgataaagaatttatgagccaagggaaatatcttggagttttaggcatctaataaatatattcatcttctgatgatgatgataattagcatgtattgatgcttaccaagctctgggtaaaatgctaagtgttttacacatattgtctcatttaatcttctcaacaatgctatgtgctcaggtactgaacagcctcattttacagatgggaaactagcaaagttgaaagactgtccacgttcacacagcagcaaattagacaagctggaatttgcacctgtgcatttgactccgaagtctgaactctctctaggaatttacactctgcaagggtgtggaacacataccagacatcacataaactttacaaatgataaaggagcacctgccctaaccccaagcagacagacaacaagggccaggatggattttagaacactctgacctgtgagagaggcggacaggcctgcaccagctgtatttctgtagtgacatacacaggtgtatcacgcagggagcctgtccagtcacggagccctgggactgtaccatcaacacagtttttgtttgtttgttcttcaggtgacatcgagagctccccctgggaggtggggttggggatgctccttaggaacctcactggaaagatgagtcaagcaggtatccaagtccaattacccggctcagggcttgacatcacagatgtgggacttgcctgagatggggctgatgagcaggaagctgattggggcccttgcagggcaacacacaacaaaccaatcaaacctccttcctgaaatcactgtgcgcgctgtgggggtggcagcgggggagggggggcgtggcttcctgccaatacatcatggatattatttgttccctcatgaagagcaatagcaatgaaatccacatttccaaattatggagtgctgtgtgcctacgtggcactcaatgccagtaataccaggatgggggtttggtgactgtgtcctggaga

SEQ ID NO: 528 - DNA, 5127 bp, Homo sapiens
acctctgagcctgtccctgcctctctgcaggtccaccatggagcccttgtgtccactcctgctggtgggttttagcttgccgctcgccagggctctcaggggcaacgagaccactgccgacagcaacgagacaaccacgacctcaggccctccggacccgggcgcctcccagccgctgctggcctggctgctactgccgctgctgctcctcctcctcgtgctccttctcgccgcctacttcttcaggttcaggaagcagaggaaagctgtggtcagcaccagcgacaagaagatgcccaacggaatcttggaggagcaagagcagcaaagggtgatgctgctcagcaggtcaccctcagggcccaagaagtattttcccatccccgtggagcacctggaggaggagatccgtatcagatccgccgacgactgcaagcagtttcgggaggagttcaactcattgccatctggacacatacaaggaacttttgaactggcaaataaagaagaaaacagagaaaaaaacagatatcccaacatccttcccaatgaccattctagggtgattctgagccaactggatggaattccctgttcagactacatcaatgcttcctacatagatggttacaaagagaagaataaattcatagcagctcaaggtcccaaacaggaaacggttaacgacttctggagaatggtctgggagcaaaagtctgcgaccatcgtcatgttaacaaacttgaaagaaaggaaagaggaaaagtgccatcagtactggcccgaccaaggctgctggacctatggaaacatccgggtgtgcgtggaggactgcgtggttttggtcgactacaccatccggaagttctgcatacagccacagctccccgacggctgcaaagcccccaggctggtctcacagctgcacttcaccagctggcccgacttcggagtgccttttacccccattgggatgctgaagttcctcaagaaagtaaagacgctcaaccccgtgcacgctgggcccatcgtggtccactgtagcgcgggcgtgggccggacgggcaccttcattgtgatcgatgccatgatggccatgatgcacgcggagcagaaggtggatgtgtttgaatttgtgtctcgaatccgtaatcagcgccctcagatggttcaaacggatatgcagtacacgttcatctaccaagccttactcgagtactacctctacggggacacagagctggacgtgtcctccctggagaagcacctgcagaccatgcacggcaccaccacccacttcgacaagatcgggctggaggaggagttcaggaaattgacaaatgtccggatcatgaaggagaacatgaggacgggcaacttgccggcaaacatgaagaaggccagggtcatccagatcatcccgtatgacttcaaccgagtgatcctttccatgaaaaggggtcaagaatacacagactacatcaacgcatccttcatagacggctaccgacagaaggactatttcatcgccacccaggggccactggcacacacggttgaggacttctggaggatgatctgggaatggaaatcccacactatcgtgatgctgacggaggtgcaggagagagagcaggataaatgctaccagtattggccaaccgagggctcagttactcatggagaaataacgattgagataaagaatgataccctttcagaagccatcagtatacgagactttctggtcactctcaatcagccccaggcccgccaggaggagcaggtccgagtagtgcgccagtttcacttccacggctggcctgagatcgggattcccgccgagggcaaaggcatgattgacctcatcgcagccgtgcagaagcagcagcagcagacaggcaaccaccccatcaccgtgcactgcagtgccggagctgggcgaacaggtacattcatagccctcagcaacattttggagcgagtaaaagccgagggacttttagatgtatttcaagctgtgaagagtttacgacttcagagaccacatatggtgcaaaccctggaacagtatgaattctgctacaaagtggtacaagattttattgatatattttctgattatgctaatttcaaatgaagattcctgccttaaaatattttttaatttaatggtcagtatattttgtaaaaatcatgttaatttatttcatagttgacattaatatcttccctaatttctttgtatatattttgttatgccttaaaggccacctgctatacagttgttaaatcttaaatatgctttttaaaaattggaataatgtattaaggtcaaataatatcccataaaatatatatttctgctaatattagtaaatatcttaatttttcattagattcatatcatttaatttcacatattcaacacctttaaatgttgtaatcttaatatgcgaagtgtgcctctgcaagatactaacacaaagctcatgttaagaaaacagttgaggactcagaagtcagttgaaaatgcactttcctaacagtgaattcacaaccctgaacagcagcatttttggaaggcaaactgttcgtgatggtacaatgtaaatggggacttctgtaaagttctcagtttcggtccatgtggtttatctttacattttgaagatcaaagaagtctttacaacctgaatccaggtctaaaacacactagagtagctggtgactataaataatatttaaaaatgctgtgtctacaccatcaagactgtgtctacactatcttggctgaacgagaagagatgtaaatgctgggtggtcccgttgacccacggcgttgggtacaacaaaaccagccatcggagttacaccccaaagcaccatttgctgtccagctgcctgtcgtttggcccagaccaccctcagaaaaaaaccagctgcctctcccattctcccctcccgttctgccacagcggcctgggctggtccagtgctatgcctggaggctcaacacaaaacttcccatccaaacattcagatgaactgagcgtcttacacacgcagtacagaggagcacacattgggatagaaacagtagaataaccacgggcaattaaactttaaattttctgagcagcattttggtatttaaacatttcttgtaaaaagctgagacagtttgtaagaaaagaatccttaaaatctagatttataccattttttaaagtcccacctttcaatgtttaataaaacaaaaagagaaatccttaatctaaaagctaaattatttttgaatggaaatactactgagaccattgacactggataacagtaatgatcccattaccagataagattgactgacggggaaaaaaaaaaaaaagaatggggtgtgaatgtaccaacactgaatcttacagcagttatctttctatggccattaggtacctagcagatgtgcacaatataaacaaaaagatatctggcctaccttactactaaaagcatttaacacatgcatttttggtacttttttttgttttctaaaagctacataaaggccttatttgacattttcactgataactgatcgcaccctcgtgttgcagtgttcgtcccctattcattaacagtgtgtgcaaatgcaaccccaggacacgttattgttctgatagatgctcacagggaatcaagcttctcgcccactccacggctctgagccccatccaagggcaagacttggtgcccagctggaaggacgaaagcacactttgtgaccgccatcctcaccagctgcatgcctgggctgcacactgctgaacgtgctcctctctccttctctgtacaatgattcagcatctcggcggaagaggaaaatggagctttttgaggctcgccaggtcccttttgttttcaccattaaaattccaaacccaaagcctttgtttgactgaaggagaagagagggaagtaagcttctgttcagcacctgaaccctagaaaaagagccagtttgctacgatgaaggtgacatttctctggtcatttgagagttcgaagtcaaagccgaggggcacaggctttggttcatgtctaggagccctctgtcagaatccttgaagccctttaatggtctaactggcatctcttgtatcaagaagtacctttaaggtagaccttttcagggtgccctcaggaaagggccctgctcatgtttttttcctgtccccttagaccaaccccaggtgtccactgcaggggttctgcctgttcccaaactttttccattccaggaacaaaggagaagccactttccccaggacgcaagactctcccctccactgtccgggacagcgttcgccctttagcggggaggtcattacagcctcatggcctctaccaaggccccagatcacaggatctcctgggccttggagcacctcacgctgggggaatcaatccctgagggactcagaatcttctccgtgcaacctggaaagttcatctcttgtttccttcagtcaaagaaagtccattgtacataacaaaacagcccccaaacagcccagtgccgacaccattgttcctttcacactttcctttgttgcatgcagttgggttcaaatgccaaatagtgattagaagacgaccattctgatctgtgtgtgatctggtcactatgtgactgcctttacggtttctctccatgtgctatatgaatgaagaatgcataccagtgttttaaaaggtatttttatgtgtttttaaacacttttttaaatgagcctgacacctgtgtttcagcatttggagacatccccatgttattcttttaagtgtataattactgatacttttttgtttgtttgtttaactaagttgtgtttaacttatgtgcagtctttataatgtatgtatgttattacagtttcaactatcatattttctttgattacatttataatttgatcttgctctgattataatgccagtgaatgttgctgaactctttgtatatgcaaattgcaagatttaaaccattctgatgcaaggataaacctttactttgactaccagcctgtgtttttgtctttaaatctcttaatttcattcctctgcaaa

SEQ ID NO: 529 - protein, 696 aa, Homo sapiens
MEPLCPLLLVGFSLPLARALRGNETTADSNETTTTSGPPDPGASQPLLAWLLLPLLLLLLVLLLAAYFFRFRKQRKAVVSTSDKKMPNGIEQEQQRVMLLSRSPSGPKKYFPIPVEHLEEEIRIRSADDCKQFREEFNSLPSGHIQGTFELANKEENREKNRYPNILPNDHSRVILSQLDGIPCSDYINASYIDGYKEKNKFIAAQGPKQETVNDFWRMVWEQKSATIVMLTNLKERKEEKCHQYWPDQGCWTYGNIRVCVEDCVVLVDYTIRKFCIQPQLPDGCKAPRLVSQLHFTSWPDFGVPFTPIGMLKFLKKVKTLNPVHAGPIVVHCSAGVGRTGTFIVIDAMMAMMHAEQKVDVFEFVSRIRNQRPQMVQTDMQYTFIYQALLEYYLYGDTELDVSSLEKHLQTMHGTTTHFDKIGLEEEFRKLTNVRIMKENMRTGNLPANMKKARVIQIIPYDFNRVILSMKRGQEYTDYINASFIDGYRQKDYFIATQGPLAHTVEDFWRMIWEWKSHTIVMLTEVQEREQDKCYQYWPTEGSVTHGEITIEIKNDTLSEAISIRDFLVTLNQPQARQEEQVRVVRQFHFHGWPEIGIPAEGKGMIDLIAAVQKQQQQTGNHPITVHCSAGAGRTGTFIALSNIRVKAEGLLDVFQAVKSLRLQRPHMVQTLEQYEFCYKVVQDFIDIFSDYANFK

SEQ ID NO: 530 - DNA, 4992 bp, Homo sapiens
cagcagagggcagctgagaggctgggtggctgggcctgggagacacacagaggccaggccttagcgcggctcagccatgagcaacaggagtagcttttcccggctcacctggttcaggaagcagaggaaagctgtggtcagcaccagcgacaagaagatgcccaacggaatcttggaggagcaagagcagcaaagggtgatgctgctcagcaggtcaccctcagggcccaagaagtattttcccatccccgtggagcacctggaggaggagatccgtatcagatccgccgacgactgcaagcagtttcgggaggagttcaactcattgccatctggacacatacaaggaacttttgaactggcaaataaagaagaaaacagagaaaaaaacagatatcccaacatccttcccaatgaccattctagggtgattctgagccaactggatggaattccctgttcagactacatcaatgcttcctacatagatggttacaaagagaagaataaattcatagcagctcaaggtcccaaacaggaaacggttaacgacttctggagaatggtctgggagcaaaagtctgcgaccatcgtcatgttaacaaacttgaaagaaaggaaagaggaaaagtgccatcagtactggcccgaccaaggctgctggacctatggaaacatccgggtgtgcgtggaggactgcgtggttttggtcgactacaccatccggaagttctgcatacagccacagctccccgacggctgcaaagcccccaggctggtctcacagctgcacttcaccagctggcccgacttcggagtgccttttacccccattgggatgctgaagttcctcaagaaagtaaagacgctcaaccccgtgcacgctgggcccatcgtggtccactgtagcgcgggcgtgggccggacgggcaccttcattgtgatcgatgccatgatggccatgatgcacgcggagcagaaggtggatgtgtttgaatttgtgtctcgaatccgtaatcagcgccctcagatggttcaaacggatatgcagtacacgttcatctaccaagccttactcgagtactacctctacggggacacagagctggacgtgtcctccctggagaagcacctgcagaccatgcacggcaccaccacccacttcgacaagatcgggctggaggaggagttcaggaaattgacaaatgtccggatcatgaaggagaacatgaggacgggcaacttgccggcaaacatgaagaaggccagggtcatccagatcatcccgtatgacttcaaccgagtgatcctttccatgaaaaggggtcaagaatacacagactacatcaacgcatccttcatagacggctaccgacagaaggactatttcatcgccacccaggggccactggcacacacggttgaggacttctggaggatgatctgggaatggaaatcccacactatcgtgatgctgacggaggtgcaggagagagagcaggataaatgctaccagtattggccaaccgagggctcagttactcatggagaaataacgattgagataaagaatgataccctttcagaagccatcagtatacgagactttctggtcactctcaatcagccccaggcccgccaggaggagcaggtccgagtagtgcgccagtttcacttccacggctggcctgagatcgggattcccgccgagggcaaaggcatgattgacctcatcgcagccgtgcagaagcagcagcagcagacaggcaaccaccccatcaccgtgcactgcagtgccggagctgggcgaacaggtacattcatagccctcagcaacattttggagcgagtaaaagccgagggacttttagatgtatttcaagctgtgaagagtttacgacttcagagaccacatatggtgcaaaccctggaacagtatgaattctgctacaaagtggtacaagattttattgatatattttctgattatgctaatttcaaatgaagattcctgccttaaaatattttttaatttaatggtcagtatattttgtaaaaatcatgttaatttatttcatagttgacattaatatcttccctaatttctttgtatatattttgttatgccttaaaggccacctgctatacagttgttaaatcttaaatatgctttttaaaaattggaataatgtattaaggtcaaataatatcccataaaatatatatttctgctaatattagtaaatatcttaatttttcattagattcatatcatttaatttcacatattcaacacctttaaatgttgtaatcttaatatgcgaagtgtgcctctgcaagatactaacacaaagctcatgttaagaaaacagttgaggactcagaagtcagttgaaaatgcactttcctaacagtgaattcacaaccctgaacagcagcatttttggaaggcaaactgttcgtgatggtacaatgtaaatggggacttctgtaaagttctcagtttcggtccatgtggtttatctttacattttgaagatcaaagaagtctttacaacctgaatccaggtctaaaacacactagagtagctggtgactataaataatatttaaaaatgctgtgtctacaccatcaagactgtgtctacactatcttggctgaacgagaagagatgtaaatgctgggtggtcccgttgacccacggcgttgggtacaacaaaaccagccatcggagttacaccccaaagcaccatttgctgtccagctgcctgtcgtttggcccagaccaccctcagaaaaaaaccagctgcctctcccattctcccctcccgttctgccacagcggcctgggctggtccagtgctatgcctggaggctcaacacaaaacttcccatccaaacattcagatgaactgagcgtcttacacacgcagtacagaggagcacacattgggatagaaacagtagaataaccacgggcaattaaactttaaattttctgagcagcattttggtatttaaacatttcttgtaaaaagctgagacagtttgtaagaaaagaatccttaaaatctagatttataccattttttaaagtcccacctttcaatgtttaataaaacaaaaagagaaatccttaatctaaaagctaaattatttttgaatggaaatactactgagaccattgacactggataacagtaatgatcccattaccagataagattgactgacggggaaaaaaaaaaaaaagaatggggtgtgaatgtaccaacactgaatcttacagcagttatctttctatggccattaggtacctagcagatgtgcacaatataaacaaaaagatatctggcctaccttactactaaaagcatttaacacatgcatttttggtacttttttttgttttctaaaagctacataaaggccttatttgacattttcactgataactgatcgcaccctcgtgttgcagtgttcgtcccctattcattaacagtgtgtgcaaatgcaaccccaggacacgttattgttctgatagatgctcacagggaatcaagcttctcgcccactccacggctctgagccccatccaagggcaagacttggtgcccagctggaaggacgaaagcacactttgtgaccgccatcctcaccagctgcatgcctgggctgcacactgctgaacgtgctcctctctccttctctgtacaatgattcagcatctcggcggaagaggaaaatggagctttttgaggctcgccaggtcccttttgttttcaccattaaaattccaaacccaaagcctttgtttgactgaaggagaagagagggaagtaagcttctgttcagcacctgaaccctagaaaaagagccagtttgctacgatgaaggtgacatttctctggtcatttgagagttcgaagtcaaagccgaggggcacaggctttggttcatgtctaggagccctctgtcagaatccttgaagccctttaatggtctaactggcatctcttgtatcaagaagtacctttaaggtagaccttttcagggtgccctcaggaaagggccctgctcatgtttttttcctgtccccttagaccaaccccaggtgtccactgcaggggttctgcctgttcccaaactttttccattccaggaacaaaggagaagccactttccccaggacgcaagactctcccctccactgtccgggacagcgttcgccctttagcggggaggtcattacagcctcatggcctctaccaaggccccagatcacaggatctcctgggccttggagcacctcacgctgggggaatcaatccctgagggactcagaatcttctccgtgcaacctggaaagttcatctcttgtttccttcagtcaaagaaagtccattgtacataacaaaacagcccccaaacagcccagtgccgacaccattgttcctttcacactttcctttgttgcatgcagttgggttcaaatgccaaatagtgattagaagacgaccattctgatctgtgtgtgatctggtcactatgtgactgcctttacggtttctctccatgtgctatatgaatgaagaatgcataccagtgttttaaaaggtatttttatgtgtttttaaacacttttttaaatgagcctgacacctgtgtttcagcatttggagacatccccatgttattcttttaagtgtataattactgatacttttttgtttgtttgtttaactaagttgtgtttaacttatgtgcagtctttataatgtatgtatgttattacagtttcaactatcatattttctttgattacatttataatttgatcttgctctgattataatgccagtgaatgttgctgaactctttgtatatgcaaattgcaagatttaaaccattctgatgcaaggataaacctttactttgactaccagcctgtgtttttgtctttaaatctcttaatttcattcctctgcaaa

SEQ ID NO: 531 - protein, 638 aa, Homo sapiens
MSNRSSFSRLTWFRKQRKAVVSTSDKKMPNGIEQEQQRVMLLSRSPSGPKKYFPIPVEHLEEEIRIRSADDCKQFREEFNSLPSGHIQGTFELANKEENREKNRYPNILPNDHSRVILSQLDGIPCSDYINASYIDGYKEKNKFIAAQGPKQETVNDFWRMVWEQKSATIVMLTNLKERKEEKCHQYWPDQGCWTYGNIRVCVEDCVVLVDYTIRKFCIQPQLPDGCKAPRLVSQLHFTSWPDFGVPFTPIGMLKFLKKVKTLNPVHAGPIVVHCSAGVGRTGTFIVIDAMMAMMHAEQKVDVFEFVSRIRNQRPQMVQTDMQYTFIYQALLEYYLYGDTELDVSSLEKHLQTMHGTTTHFDKIGLEEEFRKLTNVRIMKENMRTGNLPANMKKARVIQIIPYDFNRVILSMKRGQEYTDYINASFIDGYRQKDYFIATQGPLAHTVEDFWRMIWEWKSHTIVMLTEVQEREQDKCYQYWPTEGSVTHGEITIEIKNDTLSEAISIRDFLVTLNQPQARQEEQVRVVRQFHFHGWPEIGIPAEGKGMIDLIAAVQKQQQQTGNHPITVHCSAGAGRTGTFIALSNIRVKAEGLLDVFQAVKSLRLQRPHMVQTLEQYEFCYKVVQDFIDIFSDYANFK

SEQ ID NO: 532 - DNA, 1823 bp, Homo sapiens
cagcagagggcagctgagaggctgggtggctgggcctgggagacacacagaggccaggccttagcgcggctcagccatgagcaacaggagtagcttttcccggctcacctggttcaggaagcagaggaaagctgtggtcagcaccagcgacaagaagatgcccaacggaatcttggaggagcaagagcagcaaagggtgatgctgctcagcaggtcaccctcagggcccaagaagtattttcccatccccgtggagcacctggaggaggagatccgtatcagatccgccgacgactgcaagcagtttcgggaggagttcaactcattgccatctggacacatacaaggaacttttgaactggcaaataaagaagaaaacagagaaaaaaacagatatcccaacatccttcccaatgaccattctagggtgattctgagccaactggatggaattccctgttcagactacatcaatgcttcctacatagatggttacaaagagaagaataaattcatagcagctcaaggtcccaaacaggaaacggttaacgacttctggagaatggtctgggagcaaaagtctgcgaccatcgtcatgttaacaaacttgaaagaaaggaaagaggaaaagtgccatcagtactggcccgaccaaggctgctggacctatggaaacatccgggtgtgcgtggaggactgcgtggttttggtcgactacaccatccggaagttctgcatacagccacagctccccgacggctgcaaagcccccaggctggtctcacagctgcacttcaccagctggcccgacttcggagtgccttttacccccattgggatgctgaagttcctcaagaaagtaaagacgctcaaccccgtgcacgctgggcccatcgtggtccactgtagcgcgggcgtgggccggacgggcaccttcattgtgatcgatgccatgatggccatgatgcacgcggagcagaaggtggatgtgtttgaatttgtgtctcgaatccgtaatcagcgccctcagatggttcaaacggatatgcagtacacgttcatctaccaagccttactcgagtactacctctacggggacacagagctggacgtgtcctccctggagaagcacctgcagaccatgcacggcaccaccacccacttcgacaagatcgggctggaggaggagttcaggaaattgacaaatgtccggatcatgaaggagaacatgaggacgggcaacttgccggcaaacatgaagaaggccagggtcatccagatcatcccgtgtaaggcacccgtggcgtggcttgggcagggctggggcggggctggtgccggaggctttcatcctggagaagccattgaccgcttacccctgtgcaccagggtcaaaagcagggtgtcctctggcctcaggctaagggctcctgtgtgctgtaccaaatgtcaggtagaaaagacacctgtgaagcaccagctgacccagacagtcctgcatgggtctcaggcaagctgcttcggatatgagcttgcagatgcgggagggcagccgaggctgatttcaggggagggcttcacagaagctggagatttgcggcaggcacgacttgggattccttgtctcattccttgtctccccaagcctgggcagaggcccgcctcccccttacacagaggggcctgagccacccagccgaggccatgcaggtgaactcagctgagaccacctaggaaaaggctgtggccttgaggaggacaagaaatgggcctagggtagagtcaggacactggtctgccacccaggtcatgggagagggaag

SEQ ID NO: 533 - protein, 532 aa, Homo sapiens
MSNRSSFSRLTWFRKQRKAVVSTSDKKMPNGIEQEQQRVMLLSRSPSGPKKYFPIPVEHLEEEIRIRSADDCKQFREEFNSLPSGHIQGTFELANKEENREKNRYPNILPNDHSRVILSQLDGIPCSDYINASYIDGYKEKNKFIAAQGPKQETVNDFWRMVWEQKSATIVMLTNLKERKEEKCHQYWPDQGCWTYGNIRVCVEDCVVLVDYTIRKFCIQPQLPDGCKAPRLVSQLHFTSWPDFGVPFTPIGMLKFLKKVKTLNPVHAGPIVVHCSAGVGRTGTFIVIDAMMAMMHAEQKVDVFEFVSRIRNQRPQMVQTDMQYTFIYQALLEYYLYGDTELDVSSLEKHLQTMHGTTTHFDKIGLEEEFRKLTNVRIMKENMRTGNLPANMKKARVIQIIPCKAPVAWLGQGWGGAGAGGFHPGEAIDRLPLCTRVKSRVSSGLRLRAPVCCTKCQVEKTPVKHQLTQTVLHGSQASCFGYELADAGGQPRLISGEGFTEAGDLRQARLGIPCLIPCLPKPGQRPDLHRGA

SEQ ID NO: 534 - DNA, 5375 bp, Homo sapiens
agccacagccggagctggagccgaggcggcggcgggacgcggccggccggacaaatttcctgctaggctgcggacagcgggcggcaggagccggcgcgagcggcttcaggaacccacggcctctgcgcgtccccgcgacccttcttcgcgcccggcgaagacagccgggcgccccggagggcggcgggcaggcgcccgggagatgcggagcctccgctgcagcgcgatctgcgcgaccagaccggcccccccgagactatagccttcactttccctcggtccaccatggagcccttgtgtccactcctgctggtgggttttagcttgccgctcgccagggctctcaggggcaacgagaccactgccgacagcaacgagacaaccacgacctcaggccctccggacccgggcgcctcccagccgctgctggcctggctgctactgccgctgctgctcctcctcctcgtgctccttctcgccgcctacttcttcaggttcaggaagcagaggaaagctgtggtcagcaccagcgacaagaagatgcccaacggaatcttggaggagcaagagcagcaaagggtgatgctgctcagcaggtcaccctcagggcccaagaagtattttcccatccccgtggagcacctggaggaggagatccgtatcagatccgccgacgactgcaagcagtttcgggaggagttcaactcattgccatctggacacatacaaggaacttttgaactggcaaataaagaagaaaacagagaaaaaaacagatatcccaacatccttcccaatgaccattctagggtgattctgagccaactggatggaattccctgttcagactacatcaatgcttcctacatagatggttacaaagagaagaataaattcatagcagctcaaggtcccaaacaggaaacggttaacgacttctggagaatggtctgggagcaaaagtctgcgaccatcgtcatgttaacaaacttgaaagaaaggaaagaggaaaagtgccatcagtactggcccgaccaaggctgctggacctatggaaacatccgggtgtgcgtggaggactgcgtggttttggtcgactacaccatccggaagttctgcatacagccacagctccccgacggctgcaaagcccccaggctggtctcacagctgcacttcaccagctggcccgacttcggagtgccttttacccccattgggatgctgaagttcctcaagaaagtaaagacgctcaaccccgtgcacgctgggcccatcgtggtccactgtagcgcgggcgtgggccggacgggcaccttcattgtgatcgatgccatgatggccatgatgcacgcggagcagaaggtggatgtgtttgaatttgtgtctcgaatccgtaatcagcgccctcagatggttcaaacggatatgcagtacacgttcatctaccaagccttactcgagtactacctctacggggacacagagctggacgtgtcctccctggagaagcacctgcagaccatgcacggcaccaccacccacttcgacaagatcgggctggaggaggagttcaggaaattgacaaatgtccggatcatgaaggagaacatgaggacgggcaacttgccggcaaacatgaagaaggccagggtcatccagatcatcccgtatgacttcaaccgagtgatcctttccatgaaaaggggtcaagaatacacagactacatcaacgcatccttcatagacggctaccgacagaaggactatttcatcgccacccaggggccactggcacacacggttgaggacttctggaggatgatctgggaatggaaatcccacactatcgtgatgctgacggaggtgcaggagagagagcaggataaatgctaccagtattggccaaccgagggctcagttactcatggagaaataacgattgagataaagaatgataccctttcagaagccatcagtatacgagactttctggtcactctcaatcagccccaggcccgccaggaggagcaggtccgagtagtgcgccagtttcacttccacggctggcctgagatcgggattcccgccgagggcaaaggcatgattgacctcatcgcagccgtgcagaagcagcagcagcagacaggcaaccaccccatcaccgtgcactgcagtgccggagctgggcgaacaggtacattcatagccctcagcaacattttggagcgagtaaaagccgagggacttttagatgtatttcaagctgtgaagagtttacgacttcagagaccacatatggtgcaaaccctggaacagtatgaattctgctacaaagtggtacaagattttattgatatattttctgattatgctaatttcaaatgaagattcctgccttaaaatattttttaatttaatggtcagtatattttgtaaaaatcatgttaatttatttcatagttgacattaatatcttccctaatttctttgtatatattttgttatgccttaaaggccacctgctatacagttgttaaatcttaaatatgctttttaaaaattggaataatgtattaaggtcaaataatatcccataaaatatatatttctgctaatattagtaaatatcttaatttttcattagattcatatcatttaatttcacatattcaacacctttaaatgttgtaatcttaatatgcgaagtgtgcctctgcaagatactaacacaaagctcatgttaagaaaacagttgaggactcagaagtcagttgaaaatgcactttcctaacagtgaattcacaaccctgaacagcagcatttttggaaggcaaactgttcgtgatggtacaatgtaaatggggacttctgtaaagttctcagtttcggtccatgtggtttatctttacattttgaagatcaaagaagtctttacaacctgaatccaggtctaaaacacactagagtagctggtgactataaataatatttaaaaatgctgtgtctacaccatcaagactgtgtctacactatcttggctgaacgagaagagatgtaaatgctgggtggtcccgttgacccacggcgttgggtacaacaaaaccagccatcggagttacaccccaaagcaccatttgctgtccagctgcctgtcgtttggcccagaccaccctcagaaaaaaaccagctgcctctcccattctcccctcccgttctgccacagcggcctgggctggtccagtgctatgcctggaggctcaacacaaaacttcccatccaaacattcagatgaactgagcgtcttacacacgcagtacagaggagcacacattgggatagaaacagtagaataaccacgggcaattaaactttaaattttctgagcagcattttggtatttaaacatttcttgtaaaaagctgagacagtttgtaagaaaagaatccttaaaatctagatttataccattttttaaagtcccacctttcaatgtttaataaaacaaaaagagaaatccttaatctaaaagctaaattatttttgaatggaaatactactgagaccattgacactggataacagtaatgatcccattaccagataagattgactgacggggaaaaaaaaaaaaaagaatggggtgtgaatgtaccaacactgaatcttacagcagttatctttctatggccattaggtacctagcagatgtgcacaatataaacaaaaagatatctggcctaccttactactaaaagcatttaacacatgcatttttggtacttttttttgttttctaaaagctacataaaggccttatttgacattttcactgataactgatcgcaccctcgtgttgcagtgttcgtcccctattcattaacagtgtgtgcaaatgcaaccccaggacacgttattgttctgatagatgctcacagggaatcaagcttctcgcccactccacggctctgagccccatccaagggcaagacttggtgcccagctggaaggacgaaagcacactttgtgaccgccatcctcaccagctgcatgcctgggctgcacactgctgaacgtgctcctctctccttctctgtacaatgattcagcatctcggcggaagaggaaaatggagctttttgaggctcgccaggtcccttttgttttcaccattaaaattccaaacccaaagcctttgtttgactgaaggagaagagagggaagtaagcttctgttcagcacctgaaccctagaaaaagagccagtttgctacgatgaaggtgacatttctctggtcatttgagagttcgaagtcaaagccgaggggcacaggctttggttcatgtctaggagccctctgtcagaatccttgaagccctttaatggtctaactggcatctcttgtatcaagaagtacctttaaggtagaccttttcagggtgccctcaggaaagggccctgctcatgtttttttcctgtccccttagaccaaccccaggtgtccactgcaggggttctgcctgttcccaaactttttccattccaggaacaaaggagaagccactttccccaggacgcaagactctcccctccactgtccgggacagcgttcgccctttagcggggaggtcattacagcctcatggcctctaccaaggccccagatcacaggatctcctgggccttggagcacctcacgctgggggaatcaatccctgagggactcagaatcttctccgtgcaacctggaaagttcatctcttgtttccttcagtcaaagaaagtccattgtacataacaaaacagcccccaaacagcccagtgccgacaccattgttcctttcacactttcctttgttgcatgcagttgggttcaaatgccaaatagtgattagaagacgaccattctgatctgtgtgtgatctggtcactatgtgactgcctttacggtttctctccatgtgctatatgaatgaagaatgcataccagtgttttaaaaggtatttttatgtgtttttaaacacttttttaaatgagcctgacacctgtgtttcagcatttggagacatccccatgttattcttttaagtgtataattactgatacttttttgtttgtttgtttaactaagttgtgtttaacttatgtgcagtctttataatgtatgtatgttattacagtttcaactatcatattttctttgattacatttataatttgatcttgctctgattataatgccagtgaatgttgctgaactctttgtatatgcaaattgcaagatttaaaccattctgatgcaaggataaacctttactttgactaccagcctgtgtttttgtctttaaatctcttaatttcattcctctgcaaa

SEQ ID NO: 535 - protein, 696 aa, Homo sapiens; identical to SEQ ID NO: 529

SEQ ID NO: 536 - DNA, 6136 bp, Homo sapiens
ctccagtgctgtggacatgggtctgaacgaattgatcacctaggggctactgagaacgcggtgctctgtaattagtgggtgcagcacaccaacatggcacatgtatacatatgtaacaaaactgcacgttgtgcacatgtaccctagaacttaaagtataaatatatatatacatataaaaaatggggacagacccgggctccagctggtggacaggctttgaattctgcaggttgtcgcccattgctggtcatgtcaggaaaatcacctgtggctctcctgagcacttccggacctcagtgtctaacagatgaacaaaatgatctttgtctttctcaagggtgtcggcctcctcttagatcactgagcatttggagaggagggttattaaattaatgcatgagataagaaaatgtttcaactaggaattctgcatctctggaattgtattaaaccaattaatactccccaatcaattactctgtaatttactcaagtatattaaaagtattgtggcagtgtgcaataccagatttttaaaaacagtgtgtgcctctgtgggcagagctgcctgtcgtagaagggccagggcagcatgcagcgggggtgagggcttctgtctccagggttcctgggttcaaatcacagttcctccatatcctccagcctgactttgggccagttctctatccttcgggaacctctgtttctcagccctgtggggttattgtgcggataatacagatataaaatacccagcatatagtaggtgctcatggaattatttgtgtatgtggctcattttacaaatctaaaatgtgtgttttggaaataaaaaaaagagggaagaagtgccactgcccacctgcacctgccagtgagcctctagtgaggggtttccacagcaccaagcagtcactgccacatttagcgatgctctgatgttttggcaaaatggagtgccaggtgaagatctgaggtgatggcccacaggtcctcagcatgaaagagcctttttctgtgctgagccactttacaatctgcgtctgcccctgggcattcccaccccctacccccaataaatacctgcatcccagggtactcaattggctctgtcaagatgagtggaccgtggctccatcctcgcagaggcagcttacctccacctctctgcaggtccaccatggagcccttgtgtccactcctgctggtgggttttagcttgccgctcgccagggctctcaggggcaacgagaccactgccgacagcaacgagacaaccacgacctcaggccctccggacccgggcgcctcccagccgctgctggcctggctgctactgccgctgctgctcctcctcctcgtgctccttctcgccgcctacttcttcaggttcaggaagcagaggaaagctgtggtcagcaccagcgacaagaagatgcccaacggaatcttggaggagcaagtcattgccatctggacacatacaaggaacttttgaactggcaaataaagaagaaaacagagaaaaaaacagatatcccaacatccttcccaatgaccattctagggtgattctgagccaactggatggaattccctgttcagactacatcaatgcttcctacatagatggttacaaagagaagaataaattcatagcagctcaaggtcccaaacaggaaacggttaacgacttctggagaatggtctgggagcaaaagtctgcgaccatcgtcatgttaacaaacttgaaagaaaggaaagaggaaaagtgccatcagtactggcccgaccaaggctgctggacctatggaaacatccgggtgtgcgtggaggactgcgtggttttggtcgactacaccatccggaagttctgcatacagccacagctccccgacggctgcaaagcccccaggctggtctcacagctgcacttcaccagctggcccgacttcggagtgccttttacccccattgggatgctgaagttcctcaagaaagtaaagacgctcaaccccgtgcacgctgggcccatcgtggtccactgtagcgcgggcgtgggccggacgggcaccttcattgtgatcgatgccatgatggccatgatgcacgcggagcagaaggtggatgtgtttgaatttgtgtctcgaatccgtaatcagcgccctcagatggttcaaacggatatgcagtacacgttcatctaccaagccttactcgagtactacctctacggggacacagagctggacgtgtcctccctggagaagcacctgcagaccatgcacggcaccaccacccacttcgacaagatcgggctggaggaggagttcaggaaattgacaaatgtccggatcatgaaggagaacatgaggacgggcaacttgccggcaaacatgaagaaggccagggtcatccagatcatcccgtatgacttcaaccgagtgatcctttccatgaaaaggggtcaagaatacacagactacatcaacgcatccttcatagacggctaccgacagaaggactatttcatcgccacccaggggccactggcacacacggttgaggacttctggaggatgatctgggaatggaaatcccacactatcgtgatgctgacggaggtgcaggagagagagcaggataaatgctaccagtattggccaaccgagggctcagttactcatggagaaataacgattgagataaagaatgataccctttcagaagccatcagtatacgagactttctggtcactctcaatcagccccaggcccgccaggaggagcaggtccgagtagtgcgccagtttcacttccacggctggcctgagatcgggattcccgccgagggcaaaggcatgattgacctcatcgcagccgtgcagaagcagcagcagcagacaggcaaccaccccatcaccgtgcactgcagtgccggagctgggcgaacaggtacattcatagccctcagcaacattttggagcgagtaaaagccgagggacttttagatgtatttcaagctgtgaagagtttacgacttcagagaccacatatggtgcaaaccctggaacagtatgaattctgctacaaagtggtacaagattttattgatatattttctgattatgctaatttcaaatgaagattcctgccttaaaatattttttaatttaatggtcagtatattttgtaaaaatcatgttaatttatttcatagttgacattaatatcttccctaatttctttgtatatattttgttatgccttaaaggccacctgctatacagttgttaaatcttaaatatgctttttaaaaattggaataatgtattaaggtcaaataatatcccataaaatatatatttctgctaatattagtaaatatcttaatttttcattagattcatatcatttaatttcacatattcaacacctttaaatgttgtaatcttaatatgcgaagtgtgcctctgcaagatactaacacaaagctcatgttaagaaaacagttgaggactcagaagtcagttgaaaatgcactttcctaacagtgaattcacaaccctgaacagcagcatttttggaaggcaaactgttcgtgatggtacaatgtaaatggggacttctgtaaagttctcagtttcggtccatgtggtttatctttacattttgaagatcaaagaagtctttacaacctgaatccaggtctaaaacacactagagtagctggtgactataaataatatttaaaaatgctgtgtctacaccatcaagactgtgtctacactatcttggctgaacgagaagagatgtaaatgctgggtggtcccgttgacccacggcgttgggtacaacaaaaccagccatcggagttacaccccaaagcaccatttgctgtccagctgcctgtcgtttggcccagaccaccctcagaaaaaaaccagctgcctctcccattctcccctcccgttctgccacagcggcctgggctggtccagtgctatgcctggaggctcaacacaaaacttcccatccaaacattcagatgaactgagcgtcttacacacgcagtacagaggagcacacattgggatagaaacagtagaataaccacgggcaattaaactttaaattttctgagcagcattttggtatttaaacatttcttgtaaaaagctgagacagtttgtaagaaaagaatccttaaaatctagatttataccattttttaaagtcccacctttcaatgtttaataaaacaaaaagagaaatccttaatctaaaagctaaattatttttgaatggaaatactactgagaccattgacactggataacagtaatgatcccattaccagataagattgactgacggggaaaaaaaaaaaaaagaatggggtgtgaatgtaccaacactgaatcttacagcagttatctttctatggccattaggtacctagcagatgtgcacaatataaacaaaaagatatctggcctaccttactactaaaagcatttaacacatgcatttttggtacttttttttgttttctaaaagctacataaaggccttatttgacattttcactgataactgatcgcaccctcgtgttgcagtgttcgtcccctattcattaacagtgtgtgcaaatgcaaccccaggacacgttattgttctgatagatgctcacagggaatcaagcttctcgcccactccacggctctgagccccatccaagggcaagacttggtgcccagctggaaggacgaaagcacactttgtgaccgccatcctcaccagctgcatgcctgggctgcacactgctgaacgtgctcctctctccttctctgtacaatgattcagcatctcggcggaagaggaaaatggagctttttgaggctcgccaggtcccttttgttttcaccattaaaattccaaacccaaagcctttgtttgactgaaggagaagagagggaagtaagcttctgttcagcacctgaaccctagaaaaagagccagtttgctacgatgaaggtgacatttctctggtcatttgagagttcgaagtcaaagccgaggggcacaggctttggttcatgtctaggagccctctgtcagaatccttgaagccctttaatggtctaactggcatctcttgtatcaagaagtacctttaaggtagaccttttcagggtgccctcaggaaagggccctgctcatgtttttttcctgtccccttagaccaaccccaggtgtccactgcaggggttctgcctgttcccaaactttttccattccaggaacaaaggagaagccactttccccaggacgcaagactctcccctccactgtccgggacagcgttcgccctttagcggggaggtcattacagcctcatggcctctaccaaggccccagatcacaggatctcctgggccttggagcacctcacgctgggggaatcaatccctgagggactcagaatcttctccgtgcaacctggaaagttcatctcttgtttccttcagtcaaagaaagtccattgtacataacaaaacagcccccaaacagcccagtgccgacaccattgttcctttcacactttcctttgttgcatgcagttgggttcaaatgccaaatagtgattagaagacgaccattctgatctgtgtgtgatctggtcactatgtgactgcctttacggtttctctccatgtgctatatgaatgaagaatgcataccagtgttttaaaaggtatttttatgtgtttttaaacacttttttaaatgagcctgacacctgtgtttcagcatttggagacatccccatgttattcttttaagtgtataattactgatacttttttgtttgtttgtttaactaagttgtgtttaacttatgtgcagtctttataatgtatgtatgttattacagtttcaactatcatattttctttgattacatttataatttgatcttgctctgattataatgccagtgaatgttgctgaactctttgtatatgcaaattgcaagatttaaaccattctgatgcaaggataaacctttactttgactaccagcctgtgtttttgtctttaaatctcttaatttcattcctctgcaaa

SEQ ID NO: 537 - protein, 478 aa, Homo sapiens
MVWEQKSATIVMLTNLKERKEEKCHQYWPDQGCWTYGNIRVCVEDCVVLVDYTIRKFCIQPQLPDGCKAPRLVSQLHFTSWPDFGVPFTPIGMLKFLKKVKTLNPVHAGPIVVHCSAGVGRTGTFIVIDAMMAMMHAEQKVDVFEFVSRIRNQRPQMVQTDMQYTFIYQALLEYYLYGDTELDVSSLEKHLQTMHGTTTHFDKIGLEEEFRKLTNVRIMKENMRTGNLPANMKKARVIQIIPYDFNRVILSMKRGQEYTDYINASFIDGYRQKDYFIATQGPLAHTVEDFWRMIWEWKSHTIVMLTEVQEREQDKCYQYWPTEGSVTHGEITIEIKNDTLSEAISIRDFLVTLNQPQARQEEQVRVVRQFHFHGWPEIGIPAEGKGMIDLIAAVQKQQQQTGNHPITVHCSAGAGRTGTFIALSNIRVKAEGLLDVFQAVKSLRLQRPHMVQTLEQYEFCYKVVQDFIDIFSDYANFK

SEQ ID NO: 538 - DNA, 24660 bp, Mus musculus
  misc_feature (1)...(24660): n = A,T,C or G
ttggcacagcatcccagtgcagtggacttccccagtgacaaccaataaacagaagaactggtgggtgaggcagagaattaagtgcaaggacagattcctcaacatattactaagggtgaataagaaagaaataaagagcttctctgttccatcccagggacttcagcagtcaacattcaaataaaactggctttagccagcttccactttcaaagccagccacacgacgggagtgtttcctgctaagttcacgcagtaagaccaagtcagggagggtccatgacgttcactgcagaggagatctcaaagctctgtccaggcttggctcagctcacttcactttctcggccacttttcaaactgccatctcccctaggggacagcaccaggttactcctggcccccgctctagctcaggtgaagccattctcaaattaaatcacaatgagggacagcagagctgtaatgatctgtgtttatttagtaaatgggttgattgccctcatttgtggagattaagggttaatttcccaactgcaaagagaactgatttctcgaagggcaaccccaggtaattaagaggaaaaaaaaaaaacacctcaaatggccaccatgtgctccaccccacccccaccccacccccacccgacctcttcccatcctaccttagcctttgggtggcctcctctgccaggtactcaaagccctgggttctcagagttttctgtgcaaggatttggtaaacaaaggcttaggaattcttagccccctttaaactgacttctggcaaatttgagatcacgggacagcttctctctctctctctctctctctctctnnnnnnnnnnnnnnnnnnnnccccccccccccgccccgctggctttgaaaagcaaatgttttaaggtttgtgttctctctctttcagagtttctaatcaagtggagtcaaaccactttgtctacaccttaattgaagagcctggctctagagtttaaagtgctatttataataataggggggaggcagggaagggagaaggaggagattaagtggaaatgtgaacggggagaaagccttgggcaagcgtcccttaagggaccactctgcatgttgaacagggatttcctaatagatcacacaagttgggtgtcagtcagcgggccctgggaagagacctgctcacctctgcactatcggtccatgagaatcctgactatcagggagtccttgcttagtccagaagctcccaaatagagccagaggctattagagccatatcacaaagcactctgggaaaaactcaggggtaaccagactggaccttagccaagggtgtggaattcatcaggagtgcccccccccccaagtctcttggtcactgaagtatttcttccttagaattctctagaaggactaaaaatgctctgtgcctcctctgggctggcacccactagaggagacagttcactgacttaatatattttttaagaaagagaaactaagcctttctttctgttttgtcatcaactatttaaaaccctgggttcatattagaccctcttggggagcttttaacagatgtttaaaacgagggaagcaggttttaaaaaattcatccctctaccgccacccctctgagaatcaacttccttcaaactccgaaaccagttccctcataccactgaatttagttcatgtatcccaagtctatgttccatttggaagagacagcagtgctttagcccgtggttctcaggatcccgaggtcttttgtccctatctgtaccctgtacagccgccttttgcaaagccaccccctcccccgacacactgaatttcatatgattgatgaacggcataattttatttcaaaaaagcaaatgtcaactttgtggatgacagagaagagaaacgaaatagaatcccaactctggtcacaaagctggaaggggaccgaagcattagagtggacttgctacaagtgcaatcctgtgggccgggcacactgtgatcaaatagggctaggttggctgtaaggcacagggaggcctcagacatcgaaaagaagttaattagtatagcatggtatcagagaccctgactccagtctctctctcctttcccaaattttaggtatcaacagacattaaggaggggatatctattgtgtttatatgtatgcaatataacacactatctcggatgcccacggcccggtgtctaccactgggaaagcaagaaagaaagcttcctagaccatatgtgcaaccaaacactggggctcctatctgtctgtcacttcggaagaggagctactgaaggacggacagcagtcccacaacatgttgaaggtggtagtacgccgtaacaaatttatttctcctcccgacccaggagaaagagacggcggagcttttacagataattcagttaatatcttgattgtagtcctgttatatttcccaggtttggtttgttttgttttcttgcttgctcattgttctgcagggtcttatgtatcccaagccagccttgagcttgcaatgagctgggtgtgatcttgaagttctgagatctgggattacaggttcaagctaccacactaggtcctgggcagtgctagggaatctaacccgggagtcatgcacgctaggcagccatgtacccaccggctgcacacagctctctgcaggactgaagctggcttgtcagctgggagtaaatgctcctcctgggctcccaggaaagtcagaagatgcccatgtgttcagctttttccaggtcctggcatagggctggtagagttttccctagaagcttagtaaaagataagtggtcaagtggtttcatcgggtcatggtaggattttgagagcaggaagagagccaggaagcagcccctgtgatttgggctcttcttcctctttaattcttttttattttattttattttattttattttatttttatgtgatcaggtgttttgcttacatgaatgtctgatacctgggggaggggcagggcagaagaaggtgtttgatccccgggttccctgttgtgagccaccatgtaggtacttgaccttgaacccacattcttctgaaaacacagctagtactcttgactactgagatgcctctccagatatcctctcttcttaaaatatgtggattttttttgtcccttccttacttctcgccttcctatttccccttttgccttcctgttgttccttctaccgcttctgctgctaccatttctacctgcacagttgtctgaacagcacttgcctcctccaaatttctcctgattcttgatttttgcttttctgttcactgtgtatttacattagaccttcctgaaaacaaaggatgtaattaggtggccaatctgtatccgcagatacacctgttggacaatggtctcatgacagacaacctccaggctctgtcacattatctattcatgactcagtctttgaggtcagggttcatgtggtccaagagggtaatgtcggtctgaggaagtgagctgtgggagtagcagctgtctcacttcagaatagcagcagtgaacttgagcctcatagataagatctcagaagctaacatcacacattcagtcacttgtccaaccctctctggcttcacctccctccctcctctgtctctcttctctctctctctctctttctctctctgtctctctctgtctgtctctctccccccattacacacagacacacacactgctcatttacaattttgatatttgtagccttcagttcaaaatgaaattaggcagagtaaggactctgtgagactgaagaaattctgtgtagcaacagtgacaatgcactggtttgagatagaagtccccaagccttactaacacaaaaaaatcccctagtgagctctgaaaaactttaaatcccaaatcctatgccagaaattctgacccaacatgatgtggtggggttaagcttctgaattcccttcccttccctttttttttctctccccttcccttttctcccttcactccccccaccccactcttcagatgattctggtaaccagctaggtgcgagctctatggttccaactcccatctttagtcttctagaagtttctttgggggcatttaccactgctactatgagtccaccccctgctgttctcctgccagctctctgctggtagggcctgcattctcttatagggatgacctgaaaactaccaagtttcctgcctgccttagtgacaggagtgaggttagatgcccactagggcagtttcagcagtaggaactcctttgttcttggaaaactagagtgaattgatgggttcttataagtgggctgaaacagcagaagtaacactcacgggcatcattaacgtaggcctgagtcttaggtgccaacattctaaggcttctctgtattaacaacaacaacaacaacaacaacagagattagctgtgtatgccacagagtgcttgtaaaaaccgctgtataggttttggctttagtctaggcctggcttctctagggagcatctaccaggaatctcccagggttgttaggaaattagacatagtgtatttatagcacctggcacagtacaagcagtggtcattatatttaaaatgtgactatttggatgctcaaagcaattggaagagaagctctataagcccgttagtgccctagagcagacaccaagggtttcctgtgtgcacattttttcaactccgagctcactgacaacatgttgggtcagccaccatagcagcagtatctataccttggaaattggggaaagtgcagaccaaagtttttctcctaggcaatcattagaaacatcctctagcatactgctataatatatactataatataatatattatgtgttgcgcatccaaatagccacactttatatatcacatatacaatacatatatattacacacacacacacacacacacacacatatatatataacttcagcaaagaccccaagccacagatacactgctaaatgggccttttatttcatctcatgctttgcatcccataactaaaccagaatgctgttgtgatgattttcttgtgtttgggtcataagcaccttacagctcttacaccattaatcctctccacacactggagggaactagggaagttaggtgactggcctgaggcaggacaggaattcagtagtgagaaccagaaccaagccagtctgctctggccacctctgcactcagcccacaccttagtgccacacagagtggcactgagatgcaggtggcaattacctacagtgctgttaccagatggcccaagtctctctcagactgtattgaaaaggctttgtcctctgaatgtagacagggtccccatggagtgccttactccctgcacccagaggcttttcctagaactgtgtttgagaaaagtcctccagggtcaggattctgttctgacagtaacagatactgtagccagtcagctctgtgttctcattcttgggccgcaaggccagcaggccaagagctgtttctctctgtgtcctggctacacaactctctggcacaagaaataaccttcctcgtaatcaccttgagaagcactccaaacatccatccactgggatcttcacaccttgcttcatccctgttgcctcttaagtgagggtaacctaaggactcttgggattaggaagactgtagcttcccttgtgagtgccacagtccagggcattccaactctcaccttctcttacccccacactcccagtgctctctcctgctgagtcttcaccctgaacgaagtttcatattttgagtgtgctaggggagggatgaatgacaggaaaccgatggctttgaccaccagtgtgtaaaagcctgaggcgggctccatgttattcgagtttgggagtgggacatttgggaggcagaggtaggtggatctccgagttgagttctaggccagccagaactacaaagagaaactatgtctcaagagacagagacagagagagagacagggagggagggagagagagagagagcaagcttcaatgaagccatgactaaccctgcttgcaatgagcagacagacacaaagccaggccaagctaagtatacccaggttcctaacacttagaaactgtagataccaagtatttgttctttcaaagctgctaaattgggaactatttgttatacaaccataagtaactcataaaactcttggtcaagaaaaaaaaaagttggtccaacaaatacagtaactgagtctgcgatataaagcacctctgcccgcccaccaaatgtgagcaccactacagcactagtggccttccttgtcttcaatctggacatctctaacttccataacatttgaaagtaatttaaagataaaaatgtttgggtagagaacaagtcaacacccaaactaaaatgaacacaagttggtggccacctggcaattagatatctcaaatcttcattataatgccaaaatgtctggcaaaagagaggtcagaaagatgggtgtgtgctccaaggtgcctttctggccttccatggattcttgcagccagagtttcattaccagaacgggattgtggcaccacgtggccattttcaaatctgctctgacatcagaatgtaattcagctagataaacctgggacctagccaaaataagtagtacttggaaaaaaaaaatggagctagtgactaccaccactttctttgaggccatatatgactatgatgtgaagaaataaaggcctttgttattttaaagggcagggacaattggaagttttgcagcagacagttacaaaattttccacccttggctttccaaagaagataccagctttgggagctgggtgtggaaggtgttgtttggaaagaaaattaatcccagggagagtgtaaaccaacattgcctcacttgtcagagagcctaaaacagacttggctccttacatcgtgaacttacctcttctggtctgctgctttatggcatggctccttgaaaccatagcatctcaaaactaaagataccttcttttttttttttttcttttttatcatagcatttgacatgaggcaggcatagaaagtttcagcattgtctcacaagcagatctctctctctttggcgcaaatgtgcgcagttttgttttgaattagaatatcactaaggagctgtctgtagagcaggctagccccgaactcatggagatccaaccgcctctgcctctcaagcactgagattaaaggcatgtgtgtaccaccatacctggcacaagcagttcattctctttttcttggagtaatttgggatcgaggttatttatttaattttgtttgtttagtgtgtgtgtgaaggattgaatctagggccttatacattaggcaattgccccgtactgagcgacatctccaagcccaggccgagtgttgccgttgttgttgttgttttaaatcacctttaaacagtctccttatcctagctcgctacctttgcttctccagtacttttgctcttctctgcctgggacagagagaaaggactcacctctgtgacatctcatttaggatgggtttcctgtacctcgtgcatagactgctttagaactatttcatttcttcctataccggctcatctcaccccctcttgctacatcattattcctattgcctaacatcagagctgtctgggactctaaggatgagcagctcatccgctggctggtttccgctgtatttgaggcagtgctctatcctgtccgctttcatattttttgacactgcttggtatttctccctcaattagcagatatgagttaggtcagtgatctgatgtatgagcatgacatttttgtcttaaaaaggagggcatcttgaacctcagtggggagaaggaatctaaactccaccacccacactttcaatgacaaagcaaaacagcccccagtgtcttaaacatcttcccacaaatatcaacacagcacagctgaaggtaataggaacaataatttagaaagcagaagatgaggtcttgaagactgtatattttttaaaaaggaaaacgttgcttattcatctttattactttgaggcagatactctaaagggggctggggattggtgtgaagggtaaactgagcttagaaggaaactggtcagatggagtatgtcaactgtctgacaccaccttgttccatggagctgggctcttcagaaacattaacaggagcacaaaagatgaagaactctaaagtggaaggaaggggctcaatgaacctctgaggtaaagtaaataaaagaattaaaaggagcccaggtcatcgagaaaagggaatccaattaattaactgtcttagatttcagaatcaaccttttcctagatggagaaactgtataccagagggagttacttctgccggcattcaacattcgacctattcaaaatctcctcaaaccccagcacccaagtgagacaggcagaaggactcagccaggaaaaaaacgtttaaaatgattgcagagacagattcaacgattcaacttgtcactttcctgcatgggaattcatagtattcatgatatttcttgctggctcctgtgagagggcagaggccccttagtaacttctgaccggtcggggcaatcagacaacgcgcacgagcgcccagtgcctggagcggggttaagatttgaccaagaacaaaagaaagcttgccaatcagaaaatgctaccccacaaggaaaataacccctctttgtgtctcgaaagccctttaattagcaaatgccctgctttctaacgcgcgttaaaacatttctatgtagattccaaatggaaagatcaaatggttgcttctgcaacgaagaaggggtccctgaaggccacacacctcagaaaaaaaaaaggaaaacggggcaaccgaaggcgctctgtaaatcgtacagagttccgaggccctcggtctcaggttactttcataagcattcccccagagctgccttggagttaaaaaaaaaaaaaaaaaaaaaaaagagcctcttgggctccccaggctcccagcagtatgtccgggaggggtggcaggctcgtgtgtgcagcggatccccagctctgggccttctcctccgagggtctgcacttcctcccgccacaagtccgcccctcggccgactcgggtttctccctccaggatgccccccttttttgtaactgggggagggagagggaattgtgccttcacgtggtcggttggggtaggggaagaaaaaacgattcttagtcgcacccctttctcgactcatactgatgctaaccaaaattctcccgccctcgcctgccaggcaaggctaacgtgactccgggtcacgtctttctgccctggtgctgtactattctcagcttctccccaaagccttcggcgaatgcccccttttgttcggaaatgtgtattttagggtacccggaagaggaaccaatcttacaggcaagttccctttctggtgcgtttttttctcccttgagcaaattctgggtaaaagtttttcctaacttttctctcagtcccccgcccctcccctcaggaatccgcccagagctctttaagcaccgccttccttgtttcctcggccgccccttccgacttccacccaatcggaacaggtccacagagaaaacaaagcgcgctattggatgtccagagggctcggggcccgcccccggagtggtttgtgaatggggggaggggagggggcggggcggcccgcagccctgcaagcccgacgcttcttctagccaccagtgcggctcccaggcgttactccgcgctccttccctggcgggcggtgctggacgcggagagtcgcgggctgggactgcgcggggcaggagaggccgggtgcaggcaggccgcgggtgcaggggcctcggcgcttcggattccgtgcaactccgtttccaaaaccagcttgtccagctcttacctcccgagcaccgatcagactcaaagcgagaacgagccatttgacttgaaacttggggccgaccttcctaggactgaaggaggctccagaatcagaagaggcggctgcagtggcccgcggggcctcaaggagagaaggcggagcagcaccaccgaggcgacggccggggcgagcaggcagggacgcagggcgctggcctggcggaggcctggctcggtttaggggacgtgcgtatcggcgtgcgcccggggctcgagaaacttgggcaaactttgaagggtaaccggagaagcttgttgctcgtcgccgcagagaaagccgcaccgttacgtctcggcggggagggtaaggcgacaccccttccctcgatcccccactccaggcccaggagtttgaacctccggcggctgcgtgagtgccacgcggaggcggctgcggcgccccctcggctggcggcctcgcccccgctgtgcaggcaccctagcaccctcggctccgcgccgcccacggcccggccccggcgccgggaggactctcatgcgccgggcgcggcggcgcctccctgtatccaagcctctccccagcgcctcgtctttttcctccagctgagaacgccgctgcactcgcgaccggcgatgcggggccccggcacggcggcgtcgcactcgcccctgggcctctgcgccctggtgcttgctcttctgggcgcgctgcccacggacacccgggctcagccatatcacggcgagaaaggcatctcggtaccggaccacggcttctgccagcccatctccatcccgttgtgcacggatatcgcctacaaccagaccatcctgcccaacctgctgggccacacgaaccaagaggacgcgggcctcgaggtgcaccagttctaccctctggtaaaggtgcagtgttctcctgagctacgcttcttcttatgctctatgtacgcacccgtgtgcaccgtgctcgaccaagccattcctccgtgccgttccttgtgcgagcgcgcccgacagggctgcgaggcgctcatgaacaagttcggcttccagtggccagagcggttgcgctgcgagaacttcccagtgcacggtgccggcgagatctgcgtggggcagaacacgtccgacggctccgggggcgcgggcggcagtcccaccgcctaccctactgctccctacctgccagacccacctttcactgcgatgtccccctcagatggcagaggccgcttgtctttccccttctcgtgtccgcgccagctcaaggtgcccccctacctgggctaccgcttcctaggtgagcgtgactgcggtgccccgtgtgagccgggccgtgctaacggcctcatgtactttaaagaagaggagagacggttcgcccgcctctgggtgggtgtgtggtcagtgctgtgctgcgcctcgacgctcttcacggtgctcacctacctagtggacatgcgtcgcttcagctatccagagcgacccatcatcttcctgtcgggttgctacttcatggtggcagtggcgcacgtggcaggcttcctgctagaggaccgtgccgtgtgcgtggagcgcttctcggacgatggctaccgcacggtggcgcagggcaccaagaaggagggctgcaccatcctcttcatggtgctttacttcttcggtatggccagctccatctggtgggtcattctgtccctcacttggttcctggcagctggcatgaagtggggccacgaggccatcgaggccaactcgcagtactttcatctggccgcgtgggctgtgccagcggtcaagacaatcaccattttggccatgggccaggtggatggtgacctactcagtggagtgtgctacgtgggcctgtctagtgtggatgcattgcggggcttcgtgctggcgcccttgttcgtctacctcttcatcgggacgtccttcctgttggccggctttgtgtctctctttcgcatccgcaccatcatgaagcacgacggcaccaagacagagaagctggagaagctgatggtgcgcatcggcgtcttcagcgtgctctacacggtgccggccaccatcgtgttggcctgctacttttatgagcaggccttccgagagcactgggaacgcacctggctcctgcagacttgcaagagctacgctgtgccctgccctccgggccacttctctcccatgagccccgactttacagtcttcatgatcaagtacctgatgaccatgatcgtgggcatcactacgggcttctggatctggtcgggcaagaccctgcagtcatggcgtcgcttctaccacagactcagccacagcagcaagggggaaactgcggtatgagccccggtccttacccacccttgcctcttctacccttttacaggaggagaggcatggtagggagagaactgctgggtgggggcttgtttccgtaagctacctgccccctccactgagctttaacctggaagtgagaagttatttggaggtgagaagagatttggggcgagagatggttttgagaggaggcccagatgaaaaaaggcaaaggcagtggccgaaaagacttctggctaagacttgcaggacgatgctaactgtgaaagatatggaccggctagggcctaagggaaaggttgagaccagcagagagagagactggtgaggttttcaggcgccagagatgagccagggctgtgagtccaatcccctgctgcaaggcaagtggttgttctcactctagtgaaggggggctgggaggggagggtgataccgctctgtctgtagcctaggctttgtggccaagatgggggggacctcctgcggtgcccttgtcaagtggtggtcaaaccataatctcttttcactggggccaaactggagcccagatgggttaatttccagggtcagaccttacagtcctcctcccgggccccctcccgcctgcttttccttccctactcctttcaagtctagtaaaataagcatttggaaggccgggccctgcctgctagagtcctagcgtgaagttggttttcaagaggaggccaagaaggcgagtgggagatacagtctgctactttttaatttgttgctactttttcattttctagggaaggcagagagaaaaagaatgttttatttggtttcataccctgaaaaaaagtcatgacttgttgcttttcaaaacaggaacgcattcacacacacacacaccccatcccaccccccttgtctttgttgtaagagacaaagcgggaaacaaaagtgtctccctgaggaaaggcctaactgtgaagccagcagcttttacaggcaaagccacagaaatccgaggttttcctttggttgttaatttggttgagataaacattcctttttaaggaagagtgaagagcagctttcatacccattcaggcacacgttctgacttggataaaggaaatgctaggagttttgttatttgttttaaacagatttaattcagaacacatgatctaatagactcgtttgcttaatgaaatctcctcccattctacgcccccataacccaaattttgatttttctgcccccttccttccgtccaatttgggatttttgctgtttttgttttgttgtgttttgtttttcctccagacagggtatctctgtgtagccctgactatccaggaactggctctgtagagcaggctggctttgaactcacagacatccacctgcctctgcctctcaattgctgggattaaaggcatggtccaccaggcctggctccccttcctaatttgtatctttcaagacataacgctcacattagtaaagataaaagacaaaaattttaacttaaaggtttaaaagcattttgccctcattttcttgttctagagatgtaaacatctatctatcagacacatgagctgaccctttctctctctggttgcatgaggcgagggcaagaggaatgatagcgaaggaagaggagagtttgagtcaggtttcaagaaagtcattaagggaaggtgaacttcaaagtgattctggagttctttgaaatgtgctagaagacttacatttattaatcttaaatcgtgtacttctctttttttccctgcaatagaagtctggttctttggcataatgtaaagctgagcagagcatcatgggagttgacctttaccctacctttgacactgactgtcctccaattttgcaatgttcttcagtttctcagagcagtttttaatgccagccagggggggattgtcgggaggacagattacttcatatgtgtcctgttcagttgaatggagctgcttttacaattaaagtgatcttgtattttttaaactttcaaagtgatctcacctgtcagaatttttttaagctgccactacacaggtttggcatcttttgtgttttatctctttaagtgcatgtgaaatttgtaaaatagagacagtgcagtatgtatattttgtaaatctcccatttttgtaagaaaatatatattgtatttatacatttttactttggatttttgttttgtttacctttaaagatctacaatgaagccccactttatcacatgtacagatcacgaataaattttttaaaaaatacaaagtgaatgtttatttactcttcctgagatagtaaccaaagaataaaacttttacgtgggaaggaggtggagcgagtgtgtggggtgtgtcctgtcacatagtaccttagcgagggtcacaaaagcttttgggtttgctttgttctcattcttgtttcctgtttccaccaccacctccttatttacctctaagccagccgttctcaacctgtggattggacccctttggggggtcacatatcagatatccttcatatcagatattcacattatgcctcatgacagtaacaaaattacagttatgaggtagcaaggaaaattgtatggttggggtcaacacagcatgaggaactgcactaaagggttgcagccttaggaaggctgagaaccactgctctaacagccttttcagggaagcttttgaggaccgactagaagtttagaatccaagtctgatctgtagtttactaaccttaggaatctaagctcgggtttgaaaggactagaagatatttttgctatttctacttttcccattgattgtcttgggaaatgtgtgtgttgtaatgcaccttatctaaattattgatatttaaatgctttgaattcaggtgatagggaaaagtttccatgcttccagatgagcgcaggggtcacctttgtgcagaacactcagctggaggcttccctgaatcttctaggtaaattgaaacaggctcagcggctctccccaggggcagtgactcagcagctcagcaggactagtctccacgcctgaccccgagctggcctcggaagacactgctctcctttgctgcactcagagaggctaactttggaatcagacgcgcctgggtagcccctcagggaaatggtgaaggcgtctcagactcccagttctaagcctgagagtctttccatttgcttcttgtttagttcaggtgctgatgatactgtatgctctccccagagcaggcgctgcactgctgtctctcccattccgccacaggctggaagtttctgtagttctaaagtgtaacagacacagctctgggtttgttctgattaacaggctcacacagggcgggtgtcttttacaaacggaaagaatgaaaaccaatgacagacagccctctccaggaggagaaaggctagctagacactggtgcaaagccgctttggttgtttgttttggtgtgtgtgtgtgttttatgagtttcctagattctgaacaaagatttgggcagcaaggagagaaaaatcggtgacttgaatctcttaagatttatccagattttttgtcataaactgtcaagttttaggtaaaccatgcttttcctaacagggaattaatacaacctgttatgaatgtttgccttcagattagctagaaatagcttgatgctttccttctcctcctcctcccccgtcctcctcccccttcnnnnnnnnnnnnnnnnnnnncctcctccccctcctcttcttccccctcttcctcctcctcctcttcctcctcctcctttcttttcctttttttttttcccttattgtaaacaactgagaaaggcacttaggcctttccaagggaatcctcaaggctgctcctaagaacatttccccaccttgcagttcacagctcagcgtgatggaagaggcttggtctctaacacgggaacaaacacaaacgcagcatgtgaagaaatccctacctgctcttgttagcaagaacctctcatttctttctgttccaactagcatgccctgtgaggtcagccattgcctaagaattttagaaaccccatgggttttcttaagaaattgcattttagcagaaactccatagagggagagcgtttgcaaaggggcatatatagagtttaagaaaaacattggcaggagtttgtaaatccctagataaggaacaaaaacactgaacatttttcttcactttatgcaaacaaaacacaacagtgcagtgtaacacctaatcttggtcactgggtttgtgagaactcttgggaaggaagggggaaaaaaagcgtcctgttcacattttaggattattttttcaagcgtacttaagataaaatagtgacactggagattctcttggtagaactagagtaacctaacagctgtaggtttgaggcctgtaattacactcagaaaaatctcactctcccatctttaatttcactgaaaaggcagatggctatttatagatggtatatttttgtatatgcatatgtgaacggtgaataacagtctgcagggctccaggaaatcctagaagagagtggaaccagcccagtgtgcacttacccagcagatcctagatttgtagtgcttattttttatgacacaggctagagtcgctggaaggagggaacctcagttaagaagatgcccctgccagagtagcccacgagcaaacccatgagtgatcctgcagcctgtgagcaagcctgcagcctgtgagcaagcctgcagggcacttccttgattaacgattgatgcaggtgggcccacgggtgggaggtcctggatggtaaagcaagcaggttgaccaagccatgaggagtaagcctccacatcagttcctgcctcgacctccctggatgacaaactacaagctgtaagatgaaataaacccctttctgaagatgattttggtcctggtattttatcacagcaatagaaactctgtatctctttttgttttttctttatttctgcttccatggtgaattaaactgatttcaaaaacaaaacacaaaaaaatctcattactaaactctttgataaacatatttcttattctcctctgttatcttttgtatgcatgtggggaatacgtgggtgtgtgaaatatgtatgtgagtatgggtgtatacacagctgtgtatacacaggtgtacacacgtgtgtgtacagaggccagaggctgatgctgaaacaagcctctgggcagacttggagctcatctgttctgctaggatggctaggcaatgggccccagtgagcctcctggctctgtcctctaaatcctagagttacagtaacaactcacagcttttacatgggtttgagggcatatgtgtcttacatgtgtgtgatccttgtagttgtggggtaagcaaaccgtctctccagtcttttctttgaggaatatatatatatatatatatatattcatttattcttggaattttctcaatatagtagtgaaggggaagcaaatttgatggtagtagttagtttattctatgttccatttcaaaaactactgatcagcagccaggttgaatgaacaggtgaaagttcacctaaagtaagtccagacccagttcagagtgacctcgtccctcaaggaaggctgagcagataaaaagtcatgatgctggagagaactgacaggcgtcaggacagacactcaaatgacatctcaccttttctaccggttcatcatttgacttattcttacagttaatgtcaatcctggagtggaaagcaattacccattgaaagattagttggtgaatgactcttcaccagggctattcggactgtacagagtttattgaactctatagtgtttaggacccagcaagcgtttatttgaatgactgctctaatctagctgtgtgatgtgttcactggcgagttcattacaaaaagtgattttttaaaaaaatatcagagaggtgtagagatgtaggaacagggagagtggttggtgtgctcggttggactggctgtgccatctatgctctctgtaatctgtagcctggcctactgcaaggtgctacacaggtcagctcagtcaatcacagagaggggtccaccaaggatttgttcctgtgaagctaggttatgtggcattctggaactcttgtgttcttacattgcctccttctcctctgtggggttgctctcctcatctgagaagatggcctctgaggggacgaacttcctccagccttccagtggcagcaaacacaatcatcattgtacagtatactaaactggtatatctgtctgtggagcacccacggctttcataaaatgccagaatgattggtccttccttcctgtaggtctgcccttccgccaaccaaatgagtatgcgctctgcatctacagaaggcactttagacattgggggatggaaggtcacatgactggaatcctggcacagacagcttcatctcctcactatataaccaacccgcagggttgaatataatgggggtcaaggcagctgtaatgccagcactggagaggctgaggcaagaggaccgtgcgtttgagacaggcctggctgaagagtgagagtctcagaaacaaacaaaggttttattccgtgtgctcttgatttcttcccaagcatgtggtcataacatagacaggtttagcaaatttcttggaaattttgctgctgggtattttagtaccaaatctatactcaaatgcttgaaatgatagggacagacatttttgctcttgaccagttagttacacccaggcaggaattaaatgtttctctaggttcctaaaagcctctttcaagcgcttcctaacaagataaactggaagctgtcgtgaggggtttacgcgtgcttccgccgagggtccacttacccataggatgcttcgcgcgctctgttctactgctttgctggtaagctgccttcagtgctttttacctgtgaagcctctggcactggggtcagcttggagttcaaggagtctccagagataagcatatctggagcaagaaaagacgtgtaagaaacagagacaaagagaggaggggccaagagctaagttccatatacccatgaagaaagagacaagctatccaagtgatcctgtactaccctctcctggggaatttgagctccaaatttggccatgaagggtctagagtccaattgaatcaaaaggaaaagcttgtttgggagggtcttgtagggcagggagtagcaacagtggcaacaagggaggcacgtgctgcgcataacctagcaccaaccatacttttttatttgggggagggagcggaggtcgtgcacatagctggagggggcaggcacataacctgtagtgcttgtttccaggtctagagttgctggaaggaaagcaagcagcagctagtccctgattcactttttacagcagatgtagagagaaacttcagctagaaccacaattctctaaagctccaaagaacagtttctagaggatctttccagtgctgggtgtcaggcaggtcctgtgctctgcatggtgactggtaggacttaccccagcctcagccaaaacagcatcctgcaaaggcagcaagcaccctgtccgctcaggcaagggaccctagggtctgaatggaaaacactgcattctgtattttcaaagcatctttctttccttgtggacttaaaatactaacaaatcagtgggggggaggggtaccttgaatgctttccaaagatggggaaaccacagccgtggggctaaaggccatttattcaatgtcccaagtaatcccaagccaagccacagagaagcatccactcagatctccccaaaactgattctggttctttcccccagagcaaaaggacttagccatgtggcatgatcaaagcagagagggcaaaggggggcaggagagtagtgggtggtgcgtttgcactggctttgaggagaggagcatgctgggatgtgcagactggctcttgtgtgtccttgataacggtcattatctttacagttcttaacattttctgagcaccaactatatacaaagctatatgttctgggtacaatatgacagagtgggcaagacaacgtaccccaaaaccctaactatagtatttggtacctaacaagtactcagtaaatatcaacatctttatgataaatacacaatgatctcacacattataacagccctaggaggtaggtacaattacccccagttgacgtgtggggaaactgatccctggaaggtgagcctgagagtggctctggttgctgcccctaatcaccatgccacaaatatttactgaggccttaatgtcttccattctctagtgtccctctctaatttaatccagatcccttccaacgggagggaaataacttacatcctgacaggcagaaccggggaggggattttcagtgctagttcccaaagagtatttgggttttttcttagaaagaggcaggaggttcataaatactgtttagatgctttcttcttctttttgtgttttgagaccggcctggctgtgagctcagtctggcctggaacatgtggtctgcccgcctctgcctcctgcgtgctaggattacaggctatgcaccatcacgacccagacagctcatcctccttgcccaacacgaatttctacatcaagactcaaagacatagacgtgagaattaacttgctctatggggctagaaacgcattctagcatgtaagaagtcccaggctcagtccctagcaccaaaacaatgcacgaggcctgaagatcacaagttcagatcatcctctgcttaggatacatgagatcctgtctttagatagatagatagatagatagatagatagatagatagatagatagagagataattaaaataacttagggatggtgctcctaactgtccctcaattctgacaaaatcaatcaatcaatcaatcaatcagtccctggaatatcccaccaagagccacaaccgcaacaccaggcatgtgaagcccccttccaaattcctgggcaggggagtgtaaaacattgccaaaacaacataggccattgccattttacttgtttgcttccagaggttgaaggtaggtgcctaatgctaaagacactacagacttagaaaacaggacccagaaaacctgagctagatgcgctctgaaagcctcctccatgaggatgcgctttcgggggaatggaaggagtatgcaagctgccaagggggagaaacaagcagcagtcctccccagctaggaaccacagtgacaagcatggtgcagacagtagagtcacagtactgctcaggtcctggcagtcaacaacagctctctaattgggctaaggatcactgacaaaaggggaatcgtgcctgctactaggagccgaattgacgacccagggctggggaggtctcggatcttagaggaaagcctactacggctgctttactaagccagcataaattttaactacattctaaatatttatccttatatccattataggcatatatataatgaatttaagagggagcaaagaggacacatgggagtggttagaagaaagaaagagaaaagggaaaatgatgtaattatattttaattaagtatatatatattttaaattatatgtagttaaatgtataaaatatatataataaaatgtaatgttaaatagaaaattttatatttataaatacaagtttatatttaataacataaaatataattaattaagtatggcttttatataagtaaatataaagtatatatatatatatatatatatatatatatatatatatacactttcctaggaggactcctctattgcggtagtttcttgcttcctcattccagccctgaaggagagggtgggctctaaacagtgggacaaagattcggtgggaaagttctggcttcttgctgaccagcgcaggctgcctccctccccactggtgagtcaatgattgggaacacagacaaaaccaacgcagctccatggatatcccctctctccttccctggaggccaaggccaggagtcacagaaatacttgtttacactgttactgccacatatatataatttcagtgtcatcatggtgcaattgtgctactgacagctatcatttcataagtgattttaattgattttattatcaatttgtttcaatttttttttcggacagatctggctgtgaagatgacctgccttcacttcttgagcataggacggcgtaaacatcataaaatatgtcagctgtgtgctaatcacttgcatggactcatctggtccatacgctaggagatagaagtcgttataattctcatttaatgggcttcccgtgtaaactttcccaagtgtactgagcattaaagctggacaggcactgaagagagagccatgcataccgcttggcttaaacaccctgcatcatttcagctatagaaaggacaactgaggcccagggcttgccgggcctcaaggatggagaggggactttttcagtgcgcacctcgttaaaggtctcttttataaacaggaaatctttggtggggaggggaaaacaaagttaaattcttccagaaagtatggattctggaagcaacattcctgtgtgtgtgtgtgtgtgtgtgtgtgtgtgtgtgtgtgtgtgtatgatgtctttaatccttagtgagtttgagaccagcctggtctacatagaaaattctaggcgagccaaggctacacagtgacactctacctaaagtaaaataaaaatacaaatatacgtgagttttcaataataaatccaaagcattttccaagaagtaaataggcattgccttgtttttcttcttcttctttcttttccttttcgttttcgttttcttggagccggggttggggtggggtcaggatctcacataccacaggctatcctccagcttgttatgtggctgagcaacttgaactcctgattttcctgcctctgccttctaagtgctaagattagaggcatgctcccccatgcccagttcatgtggtggtgagaatgaacccagggcttcatgcatgcttggcagacactcttacaactgagctacaagccctgtccaacactacccctttcttggagctgacagtgtccagcctcgacaagagtcgggggtcgtcaaggactagggatacctggtaggtgaataagaaaatacacaactgagatacaattctgacaagttttggcatgtgagcccttgaactcaggagttagggtgctcacgtagactttactcaggcccagtcttttattgaaatcatacaaggaaattggattacaaagttcatgggggggtaatgcttctctattttcctgtgccaacattttcttgtgacacagaacaatacaggtttagaatagaaaaaagggaactatacaatctcagacataaacattttacagcaagcacaattttttaatatttcccaaccaccagtctccggtgaggttgggggcagcagtattgcggttacaaagtcggtatctttcagacatacgtgagaaaatacagtttcataaaagggcaaacatgaggtcagactgctgaccctgcagtctttataatttttggaccccatctatctgtctacaaaaacatcctcacttaacctacatggagaatatctagggggctgtcaccattgtttctaaacccaaggaatccgttgctaactttctgggaaatatctgtacgttattccatcctcaattttatgataaaaataccctatttttattatacagaattgagactaagactgggggaacagctgcagatttcctcatctctgactgcggctataggttactttcattccacctagagtaagtgactgtaacatacatttctcttgaattcatgagcagccttcactctaatattattggtaacatctaatttctggataacaagtgagctcctattagatcttaccaggtcaccaaataccggtttaatcaaggaaggaagaaaaggaacagtaaacagataaaaagaataaatactaagaataatcgcaaaaatgacatcatgaggtgcttgagtcaaagaagcaggccttggtgaccagacatggtggtgcacgcctttaatcccagcactcagaaggcagaggcaggcagatttctgagttccaggccagtctggtctacaaagtgagttccaggacagcc

SEQ ID NO: 539 - DNA, 4660 bp, Mus musculus
caactccgtttccaaaaccagcttgtccagctcttacctcccgagcaccgatcagactcaaagcgagaacgagccatttgacttgaaacttggggccgaccttcctaggactgaaggaggctccagaatcagaagaggcggctgcagtggcccgcggggcctcaaggagagaaggcggagcagcaccaccgaggcgacggccggggcgagcaggcagggacgcagggcgctggcctggcggaggcctggctcggtttaggggacgtgcgtatcggcgtgcgcccggggctcgagaaacttgggcaaactttgaagggtaaccggagaagcttgttgctcgtcgccgcagagaaagccgcaccgttacgtctcggcggggagggtaaggcgacaccccttccctcgatcccccactccaggcccaggagtttgaacctccggcggctgcgtgagtgccacgcggaggcggctgcggcgccccctcggctggcggcctcgcccccgctgtgcaggcaccctagcaccctcggctccgcgccgcccacggcccggccccggcgccgggaggactctcatgcgccgggcgcggcggcgcctccctgtatccaagcctctccccagcgcctcgtctttttcctccagctgagaacgccgctgcactcgcgaccggcgatgcggggccccggcacggcggcgtcgcactcgcccctgggcctctgcgccctggtgcttgctcttctgggcgcgctgcccacggacacccgggctcagccatatcacggcgagaaaggcatctcggtaccggaccacggcttctgccagcccatctccatcccgttgtgcacggatatcgcctacaaccagaccatcctgcccaacctgctgggccacacgaaccaagaggacgcgggcctcgaggtgcaccagttctaccctctggtaaaggtgcagtgttctcctgagctacgcttcttcttatgctctatgtacgcacccgtgtgcaccgtgctcgaccaagccattcctccgtgccgttccttgtgcgagcgcgcccgacagggctgcgaggcgctcatgaacaagttcggcttccagtggccagagcggttgcgctgcgagaacttcccagtgcacggtgccggcgagatctgcgtggggcagaacacgtccgacggctccgggggcgcgggcggcagtcccaccgcctaccctactgctccctacctgccagacccacctttcactgcgatgtccccctcagatggcagaggccgcttgtctttccccttctcgtgtccgcgccagctcaaggtgcccccctacctgggctaccgcttcctaggtgagcgtgactgcggtgccccgtgtgagccgggccgtgctaacggcctcatgtactttaaagaagaggagagacggttcgcccgcctctgggtgggtgtgtggtcagtgctgtgctgcgcctcgacgctcttcacggtgctcacctacctagtggacatgcgtcgcttcagctatccagagcgacccatcatcttcctgtcgggttgctacttcatggtggcagtggcgcacgtggcaggcttcctgctagaggaccgtgccgtgtgcgtggagcgcttctcggacgatggctaccgcacggtggcgcagggcaccaagaaggagggctgcaccatcctcttcatggtgctttacttcttcggtatggccagctccatctggtgggtcattctgtccctcacttggttcctggcagctggcatgaagtggggccacgaggccatcgaggccaactcgcagtactttcatctggccgcgtgggctgtgccagcggtcaagacaatcaccattttggccatgggccaggtggatggtgacctactcagtggagtgtgctacgtgggcctgtctagtgtggatgcattgcggggcttcgtgctggcgcccttgttcgtctacctcttcatcgggacgtccttcctgttggccggctttgtgtctctctttcgcatccgcaccatcatgaagcacgacggcaccaagacagagaagctggagaagctgatggtgcgcatcggcgtcttcagcgtgctctacacggtgccggccaccatcgtgttggcctgctacttttatgagcaggccttccgagagcactgggaacgcacctggctcctgcagacttgcaagagctacgctgtgccctgccctccgggccacttctctcccatgagccccgactttacagtcttcatgatcaagtacctgatgaccatgatcgtgggcatcactacgggcttctggatctggtcgggcaagaccctgcagtcatggcgtcgcttctaccacagactcagccacagcagcaagggggaaactgcggtatgagccccggtccttacccacccttgcctcttctacccttttacaggaggagaggcatggtagggagagaactgctgggtgggggcttgtttccgtaagctacctgccccctccactgagctttaacctggaagtgagaagttatttggaggtgagaagagatttggggcgagagatggttttgagaggaggcccagatgaaaaaaggcaaaggcagtggccgaaaagacttctggctaagacttgcaggacgatgctaactgtgaaagatatggaccggctagggcctaagggaaaggttgagaccagcagagagagagactggtgaggttttcaggcgccagagatgagccagggctgtgagtccaatcccctgctgcaaggcaagtggttgttctcactctagtgaaggggggctgggaggggagggtgataccgctctgtctgtagcctaggctttgtggccaagatgggggggacctcctgcggtgcccttgtcaagtggtggtcaaaccataatctcttttcactggggccaaactggagcccagatgggttaatttccagggtcagaccttacagtcctcctcccgggccccctcccgcctgcttttccttccctactcctttcaagtctagtaaaataagcatttggaaggccgggccctgcctgctagagtcctagcgtgaagttggttttcaagaggaggccaagaaggcgagtgggagatacagtctgctactttttaatttgttgctactttttcattttctagggaaggcagagagaaaaagaatgttttatttggtttcataccctgaaaaaaagtcatgacttgttgcttttcaaaacaggaacgcattcacacacacacacaccccatcccaccccccttgtctttgttgtaagagacaaagcgggaaacaaaagtgtctccctgaggaaaggcctaactgtgaagccagcagcttttacaggcaaagccacagaaatccgaggttttcctttggttgttaatttggttgagataaacattcctttttaaggaagagtgaagagcagctttcatacccattcaggcacacgttctgacttggataaaggaaatgctaggagttttgttatttgttttaaacagatttaattcagaacacatgatctaatagactcgtttgcttaatgaaatctcctcccattctacgcccccataacccaaattttgatttttctgcccccttccttccgtccaatttgggatttttgctgtttttgttttgttgtgttttgtttttcctccagacagggtatctctgtgtagccctgactatccaggaactggctctgtagagcaggctggctttgaactcacagacatccacctgcctctgcctctcaattgctgggattaaaggcatggtccaccaggcctggctccccttcctaatttgtatctttcaagacataacgctcacattagtaaagataaaagacaaaaattttaacttaaaggtttaaaagcattttgccctcattttcttgttctagagatgtaaacatctatctatcagacacatgagctgaccctttctctctctggttgcatgaggcgagggcaagaggaatgatagcgaaggaagaggagagtttgagtcaggtttcaagaaagtcattaagggaaggtgaacttcaaagtgattctggagttctttgaaatgtgctagaagacttacatttattaatcttaaatcgtgtacttctctttttttccctgcaatagaagtctggttctttggcataatgtaaagctgagcagagcatcatgggagttgacctttaccctacctttgacactgactgtcctccaattttgcaatgttcttcagtttctcagagcagtttttaatgccagccagggggggattgtcgggaggacagattacttcatatgtgtcctgttcagttgaatggagctgcttttacaattaaagtgatcttgtattttttaaactttcaaagtgatctcacctgtcagaatttttttaagctgccactacacaggtttggcatcttttgtgttttatctctttaagtgcatgtgaaatttgtaaaatagagacagtgcagtatgtatattttgtaaatctcccatttttgtaagaaaatatatattgtatttatacatttttactttggatttttgttttgtttacctttaaagatctacaatgaagccccactttatcacatgtacagatcacgaataaatttttt

SEQ ID NO: 540 - protein, 572 aa, Mus musculus
MRGPGTAASHSPLGLCALVLALLGALPTDTRAQPYHGEKGISVPDHGFCQPISIPLCTDIAYNQTILPNLLGHTNQEDAGLEVHQFYPLVKVQCSPELRFFLCSMYAPVCTVLDQAIPPCRSLCERARQGCEALMNKFGFQWPERLRCENFPVHGAGEICVGQNTSDGSGGAGGSPTAYPTAPYLPDPPFTAMSPSDGRGRLSFPFSCPRQLKVPPYLGYRFLGERDCGAPCEPGRANGLMYFKEEERRFARLWVGVWSVLCCASTLFTVLTYLVDMRRFSYPERPIIFLSGCYFMVAVAHVAGFLLEDRAVCVERFSDDGYRTVAQGTKKEGCTILFMVLYFFGMASSIWWVILSLTWFLAAGMKWGHEAIEANSQYFHLAAWAVPAVKTITILAMGQVDGDLLSGVCYVGLSSVDALRGFVLAPLFVYLFIGTSFLLAGFVSLFRIRTIMKHDGTKTEKLEKLMVRIGVFSVLYTVPATIVLACYFYEQAFREHWERTWLLQTCKSYAVPCPPGHFSPMSPDFTVFMIKYLMTMIVGITTGFWIWSGKTLQSWRRFYHRLSHSSKGETAV

SEQ ID NO: 541 - DNA, 23859 bp, Homo sapiens
tccaccacccctttgagagtcacctttttaacttctttgggttactcttcatactggttccttcacgccgcttcatttactttctgcatgccaaatttatgtgtttaatctaaaagcaatagtagggccaggcacagtgctacatcctagtaatcccagtgctttgggaggccaaggtgggagaatcacttgagcccaggagttcaagaccagcctgggcaacaaagagagaccttgtctctacaaaaaattttaaaaattagccagacatggtggcatgcgcctgtagtcccagctactgggaggctgaggcgggaggatcaattgagcccagagagttccaggctacagtgagctacgatggcaccactgcacgccagcctgggtgacggagcaagaccctgtctctaaacacaaataagttaaaacaatagcagtgattgttgacgcatgattagcttgtggtccgttgtgattctcaagtcttttgtcccgagctagcctttcaccatcctgtttctctgcaatgtataggtctttattttcattgaacttcatctgactgatgaattgcacaatctaattcaacaaattgaacgtctacattgtgaaagacgagggagaaaaataagacatagttcctactctcaaagacctttcaaataaataggtggggtaagaaagcaccaaaataactgaaatacaagagagaatacagtaatatcaaagaaaagtggcaaaagaaactgacttttgatgagtacctaccatgagccacatacgttgtgataaaaataggattaggcttggctgtgaggcattggaaaatctaaaacaatgttggctaaaacatgatcaaagtttattttgttctcatatttgagaaatccagagggagtccatcccagactagcatggtgcacatctgtgttagagactcaggccccttctctcttttgctcctttcccagtgtcacctcatggtccacaacagcttgtgcagttgcagctgtcaggaggagggaagaagggtacttcccactccctttaagttgcacacaacacttttactgacaccccatggcctgggctcagtggatcccaaaagggaggctggaaaatgagatctttattccagttggtcatatgtccatctgacgactgagggcttcattactatggaagaagaggggaacagatattgggggacaactagtagcccccacaccatgttaagaactttagattcttcagtgcacttagttctcaaaacaacccaaaagaaagatgtctccccggcctttacagataattcctatctggaaacacttttgcaatcacagtcaactcaatgtcagttgcagccctgggaggtatattctcaaattctttatccaggccattgagcaagaagaaggtggttgcaagacccagccttgttaatcagcctttagcggatacctctcctagactggtgctgatcctctgtggtcagccttctgccactgtggacacattctccaggagaaagtcggaagagacgtgtgttttcacccttttctaagccttgtactgtggttagtaaggttctctctagtaacagacaaggagtcagacggcttcattcaaagggatggtagaattctgagggaaggaagcagccaggaaacagctctcaggacttggtctttttgtcttctccttctgaaacaggtgttccctctctccttccttcctttctcctttgtttctttccttccttccttcgtatttttccactataaaggccgctgctctcccgtctttccttcctctgctcctgctgccaccaactaattgctgtctctactcacttcactgcctcacagctcttgcttccttcaagcttctactgcttcctggtttctgctcgttcccttctcactgaatgcttcccagcttctgccagcatattttacactcagaaccccaaatgaaagcatccgatcagttggcctctctgtatccagcaggcacaactgttggaccgaggtctcatgccagacaacctcatggctgggtcacatcgtctactccagactcaatcctctgaggacaggattcatgtggcacaaggtacacaaatggcaaggtcagtctaaggaaatgctatgaagcgaactgtggaagtagcagctgttgcatttcagaatagccactgtgaccttgttgagactcataaataaggtcccagacccaacatcacaccatgcaacgacatttatccaaccatctctctctctcacacacacacacacacatacacacacacacattcacacccctcacacatgacacatgtcacactcccttatggttctcattatttccatccttcagttcaaaaagtaatcaactagagtgaaaactttatgcaaaactaaaggcatcaagctgggcacagtgtctcaggcctataatcccagcactttgggaggccgaggcgggtggatcatctgaggtcaggagttcaagaccagcctggccaacatggcgaaaccccatctctactaaaaatacaaaaattagctgggcgtggtggcaggcgcctgtaatcccagctgaggcaagagaatcacttgagcccaggaggcagaggttgcagtgagccgagatggcgccattgcacttcagcctgggcgataagagcaaaagtccatctcaaaaacaaaaacaaacaaacaaaaaaacaaaaggcatcctataaggtatcagtaacataatgtaccgctgtggaatacaagcctggttcagtggttcccaaacttgactaattccaaagaatcaccgagtgagtgtttaaaaattaaatccccaagtcccccactagagattctgactcaacatatctgaagtagggctcaggcttcagaaaatttttttcttttttcttttatttactccttaggtgattctgatgaccagccaggcttggactccactgttcaagttccatgtttacccttccagaggattccctggaagctttcattactaccttgagtctggttcctacagcttctcctcctagctctctgcttgataaaattatcttactgggagagcctgatatacaacaagtttcccacttgccctagggggcaggagtagggctcccaaatctctcaatctaaatgcccactagtgcagtttcagaaatggaattaaattgttccttaggtaactagagaaaattaacagattcttccaacttggtttgaaacctgaattaggtggaatgttcaaggggtcatcactaacctggacttgatatatcccagcctagaaattctggggtttctctaaattttggaatagctttttatcagacatataaaagaagatacattagtgtttatcataaaagacatcaggtagcagtgcagtatgaagtggaaaatgttatatagacctaagctttagttcaggctggctactatggaaaggaagttataacttggactgcacaggattgttgtgaaattagagatgctgtacctaaagcacttggaactttataaatggtagtcgttgtatttagaaaataactatttttgaggccgggcgcagtggctcacacctgtaatcccagcactttgggaggccgaggcaggcggatcacgaggtcaggagatggagaccatcctggctaacacggtgaaaccccatctctactaaaaatacaaaagaaaaattagccaggcacagtggtgggcacctgtagtcccagctactaaggaggctgaggcaggagaatggcgtgaacccgggaggcggagtttgcagtgagccaagatcgggccattgcactccagtctgggcaatagagcaagactacgtctcaaaacaaacaaacaaacaaacaaacaatttttgatgctcaaactaatctgaagataataagttctagcacacccagtggtacaccagggcaagctcttaggggcttgtggagctgattatgtgcatcttttccaaacactaaggtcagtgacatcatattggcttgaaatcggctatggtagcattatttacaccacggaaattggcaaatgtacacatcagggctttttttcctggagagtcgattgttaaacatttaccagcataccactataaaaaattacaacctcggccgggcgcggtggctcacgcctgtaatcccagcactttgggaggccgaggcaggcggatcacgaggtcaggagatcgagaccatcctggctaacacggtgaaaccccgtctctactgaaaatacaaaaaattagccgggcgtggtggcgggcacctgtaatcccagctacttgggaggctgaggcaggagaatggcgtgaacccgggaggcggagcttgcagtgagcagagatcgcgccactgcactccagcctgggcgaaagagcaagactctgtctcaaaaaaaaaaaaaaaaaaaattacaacctcagcaaagagccaaagccccaaaatatgcagctaacttggccttttatttgatccctaagatttgtatccatataactagaccaggattctgccctgatgattttttgcctatggatcacacagcatttcgtaaatattacctcacaaattctcccaacatcctgggggagcaagagatgttaagtgacttgcctgaggcaggacaagaaatcaatagtgaaaggcagaactaaaccagtctgtatcaaccacctctgcaatccttcctagacatcagtactgtgcagacccacattggagacatgggtagcaattaccaaaggtgctttttacatcataacccagatacccgaagtcgctttctacagactatggtccatatgctctgacctttgagtacagatttgactccccagaatggccagcgctctacatttggacattttttccagaactgttcatggtcttttattaatcaacttcctccatgttttctctcccagggacatgtgtttggaaaactggttggccagagttagggttctgttctgactctaacatctgcaagtggcaacataaccagtcaacactgtatttttatctgtgaccctttctctggactccccaaggacagagctccaagagtcgtttctctctgttgcctcatcttcataatactctggaaatgaataaatgaataatccttgtagtaagcagcctctcaaatggctccctatgatcccccaatggttttgcacactctatgtataatccctgctaccccttgagtgtgggaagatctggtgacttgcttctagtgaatagtatatggcaaaagtggtaggatgtcacttcccagattaggttacagaaagactgtgacttctatcttgatcgtcattttttcctgctctctctctctccctccttctttccctccctctctcagagggagagactctctgagcctttgctgtgagggaagcaaggtgccatattacgagtggccttatgagaggtccacattgcaaggaactgatgtctctggccaacagctagtgacagcctgaggcctgccaacagccacatgagtgagcttggaagtggctcctccaattgagccttgaggccatcacagccctgatcaacaccctgattataaaatagtcaacgtataaaactctcaactagcccagtgtggtgacgctcacctgtagtcccagcttttctggaagctgaggtagaaggatcacttaagaccaggagttcgaggctgcagtgagctatgatcactctacctcactccagcctgagtggcagggtgagattctgtctcaaaaaacaaaaacagaaacacaaaaacccctctcaatcgacaagggaagtgttggtcagactcagtgactgaatttaccatataaatcatctctacaagatgcggcctgcacatctaacatgattattgcatggtcctcctcttctgcaacttagatatctctaactttcataacccttgaaagggttttagggataagaatatccccatttttggaatgatccaacaccccaacaaaaatgaacacaagtcaatgacaacctgacaactggaaattccaagttctccatgttattacgtcaaaattgtctagtaaaagagaggccagaaaggaaagcatgtgctaaaatttgccctttctagtcttgcatgagtaattcttgcagcaggagcttcattacaaccgcaggactggggcacacgaagacggccattttcaaatctggcctgacatcagaatgtaattcaactagataaacctgggacttggccaaaataagtagcatttgcaaaactggagccaatgaatagcatcacttttctgtgggaccatatgactacatgtgaagaaataaaggcctttgttattttaaagggcagggacaattggaaattttgcagcagatagtcacaaaattttccacccttggctctcccaagaagataccagttagtggctttgggagttgggtgtggaaggggttgcttaggaagcaaaattaaaatgatcctggacagaatataaacagatgtcactacatttgtcatagaacctaaaacatgattagacccttacattgtgaacttactttttctgatcttctatgacttggctccttaaaatcatagcattctataccaggcaaggcttggaaagccagagctccccctctcacagcaaattcttattttggagaataattttggattgattttttaaaaatctttaaaaacaaaacaatctgttttaaaaattggctttgcttctctgctttttggacttgtctgcctgggacagagcaagaggactcacatctgtaacactttccatctgggatgggttttctgcatcttaggcatagactgcttttcattcgtcccttgaatttaagggttttttttttctaaattattatccctattgcctaacatcggagctgtctggggttataatatggagagtagaagctcatcagctaaattggttttagttgcagttgagacagtattttatcctgtcagttttcattttatttgatgacagtgcttggtatttcttcctcaataagcaaagatgacttagatcagtggcctgatgaataagcatgaaattttgatttagaaaaggaggatatcctgaagctcatggagagaaaaaaggaatctaaccccccaccacacatactttaaatgacaaagcaaagcagcagcattgtctttaagcaacatatttcaaccgaagatcaacactccccgatgttaggtaatagaaataataatttagaaagaaaaggggggcccttttaaaaacacaaagaaggaatgaaacatttttaaagcaggtatcgtattaccttcagcacatgtcccaaagaaaaggaaaaaaagggtgggggggtccgggagggagggcgaaactgatgcttgggaggaagaaggcgactcccgctgagggccggatggaggatgtgatcagtctaacactctgccttggcccaaaggcttccttccgccctttcgacctattaacaggagtggggaaggacaaagaaccgtgaatcggaaagaacgattcccagcaatcttcagtgatcgaaaataaataaagaaaaacagagaaagccaaagtctcccatggaagggaacccaattaattgtcttcgatttcagaatgagtttttttcctgctgtagaagaagcgcacgggaggcagcagagacagcaacttctgccaaggttcaacctgatcagaaatcgctcagagctccagcacccgggactgaggcagaagggctccgccaggaataacgttttttaaagcacaggattgctgtgtgtgtgtgtgtgtgtgtgtgtgagagagagagagagagagagacagaggaaagaggaggaggaggagagattgattgattgatttttttcttttccttctcaacatgtcactttcctgcatgggaattcctgatattcctggcagcccggagagaggggagaggccccctggtgacttatgacccccgcaggagtaaccagagagcgcgcgcgagcgcccagcgcctggctcaagacgaagatttaaccgagaacaaaagaacgtttgccaatcagaaaacgctacccgagaacgaggataaccccgctttgtgttttgaaaactctttaattagcctggtttctaagacgcattaaaacattcctacgcagattctaaatggaggatcaaatggttgcttctgcaacgaagatgggatcccgaaagggcacacgccgcagaaccaaggcacacggggccactgagacgcccggcgcgtcgtacagagtgttcctgggcgctcggtctcaggttacttctagaaccagtctccccaacgccgtcttcgtttccttaaaacctcgctagagtcaccccagttccccagactccaggccgtgcgcgcgggcggggtggcctgagcccgggttccccgctctccctgcttcgggcccttcctccgaggggtccttcctcccgccgtcactcggccccctccgcccgactcgggtttctcctcggaggcggcccctcctcctttttataactcgggggaggggagaggggactgtggcctcgcgtggactctttgggtccggggggaaagaggcgatccgcaaggcgcacccccttctcgtcccgtcccaaaccccacattgaggacccggcgacccgaaagccccgccagagccagcctttgcagtcctaacgcgactcctggtcacgtctctccccgaaggggcgctgcgcggtccttgctcccctcaaacgccgctggcgaaggcgcccctgctcaggaatgcgcatctgagtgcaccaggaagaggaacaaatctttgaagcaaattccctttctgcgcgttttcgtccctgagcgaattcagggtaaaagtttttccgaacttttccctcccagtcccccgcccctcccctcaggaatccgcccagagcgccgcggacaccgcctccgccactcccgcgcccgccccttccgacttccgcccaatccgaaggcggccaccgaaaaaacaaaggccgccattgggccgccggggcctggggccgcccccggagtggtttgtgaatggggggggaggggaggggaggggaggggacgggaggggacgggagggggcgggccggcccggaaccccgcgagcccgacgcttcttctggcgaccagcgcgactccgaggcgttagtcggcgctcactcccggcgggcggcggcggcggcggcggcggggcgccaggactcgctgctggggctgcgaggggctggaggggccggggccaggccgcgggcacgagcgcctcgcggtttcggacgcagtgtgactgggtttccaaaaagaactcgccgtgctcccgactccggggccgagatcggactcagcaagagccggccgtttggctgaaacttggggccgagcttttggggctgaagaaggagcggggtgtggaggaggaggcgaaggaggcggcgacgagcggagcctcgaggccaggaggcggggcagcaccgcggaggcggcggccggggcgagcgagcggcggcggcaggggttctcctagcggggaccggaccaggcgcggggggcgtgcgcgctgcggtgcgccgggggtccagagtcttgggcaaactttgaagggtgccggagccgcttgttgctcctcgcggcggagggagccgcaccgttacgtccccgcggggagagcgaggcggccctcctcggcgcccccaacccaggctgacgagttttgggcccccggcggccctgcgagtgcagggcggcggcgtctgcggcgccttcgcggcgcgggcacccaggcggcagcgccctttgctccacgccgcccacggcccggccccggcgccgtgaggactctcatgcgtcgggcgcggcggcgcctccccgcatccaagcctctcccaaccgcctcgtcgcactcctcaggctgagagcaccgctgcactcgcggccggcgatgcgggaccccggcgcggccgctccgctttcgtccctgggcctctgtgccctggtgctggcgctgctgggcgcactgtccgcgggcgccggggcgcagccgtaccacggagagaagggcatctccgtgccggaccacggcttctgccagcccatctccatcccgctgtgcacggacatcgcctacaaccagaccatcctgcccaacctgctgggccacacgaaccaagaggacgcgggcctcgaggtgcaccagttctacccgctggtgaaggtgcagtgttctcccgaactccgctttttcttatgctccatgtatgcgcccgtgtgcaccgtgctcgatcaggccatcccgccgtgtcgttctctgtgcgagcgcgcccgccagggctgcgaggcgctcatgaacaagttcggcttccagtggcccgagcggctgcgctgcgagaacttcccggtgcacggtgcgggcgagatctgcgtgggccagaacacgtcggacggctccgggggcccaggcggcggccccactgcctaccctaccgcgccctacctgccggacctgcccttcaccgcgctgcccccgggggcctcagatggcagggggcgtcccgccttccccttctcatgcccccgtcagctcaaggtgcccccgtacctgggctaccgcttcctgggtgagcgcgattgtggcgccccgtgcgaaccgggccgtgccaacggcctgatgtactttaaggaggaggagaggcgcttcgcccgcctctgggtgggcgtgtggtccgtgctgtgctgcgcctcgacgctctttaccgttctcacctacctggtggacatgcggcgcttcagctacccagagcggcccatcatcttcctgtcgggctgctacttcatggtggccgtggcgcacgtggccggcttccttctagaggaccgcgccgtgtgcgtggagcgcttctcggacgatggctaccgcacggtggcgcagggcaccaagaaggagggctgcaccatcctcttcatggtgctctacttcttcggcatggccagctccatctggtgggtcattctgtctctcacttggttcctggcggccggcatgaagtggggccacgaggccatcgaggccaactcgcagtacttccacctggccgcgtgggccgtgcccgccgtcaagaccatcactatcctggccatgggccaggtagacggggacctgctgagcggggtgtgctacgttggcctctccagtgtggacgcgctgcggggcttcgtgctggcgcctctgttcgtctacctcttcataggcacgtccttcttgctggccggcttcgtgtccctcttccgtatccgcaccatcatgaaacacgacggcaccaagaccgagaagctggagaagctcatggtgcgcatcggcgtcttcagcgtgctctacacagtgcccgccaccatcgtcctggcctgctacttctacgagcaggccttccgcgagcactgggagcgcacctggctcctgcagacgtgcaagagctatgccgtgccctgcccgcccggccacttcccgcccatgagccccgacttcaccgtcttcatgatcaagtacctgatgaccatgatcgtcggcatcaccactggcttctggatctggtcgggcaagaccctgcagtcgtggcgccgcttctaccacagacttagccacagcagcaagggggagactgcggtatgagccccggcccctccccacctttcccaccccagccctcttgcaagaggagaggcacggtagggaaaagaactgctgggtgggggcctgtttctgtaactttctccccctctactgagaagtgacctggaagtgagaagttttttgcagatttggggcgaggggtgatttggaaaagaagacctgtgtggaaagcggtttggatgaaaagatttcaggcaaagacttgcaggaagatgatgataacggcgatgtgaatcgtcaaaggtacgggccagcttgtgcctaatagaaggttgagaccagcagagactgctgtgagtttctcccggctccgaggctgaacggggactgtgagcgatccccctgctgcagggcgagtggcctgtccagacccctgtgaggccccgggaaaggtacagccctgtctgcggtggctgctttgttggaaagagggagggcctcctgcggtgtgcttgtcaagcagtggtcaaaccataatctcttttcactggggccaaactggagcccagatgggttaatttccagggtcagacattacggtctctcctcccctgccccctcccgcctgtttttcctcccgtactgctttcaggtcttgtaaaataagcatttggaagtcttgggaggcctgcctgctagaatcctaatgtgaggatgcaaaagaaatgatgataacattttgagataaggccaaggagacgtggagtaggtatttttgctactttttcattttctggggaaggcaggaggcagaaagacgggtgttttatttggtctaataccctgaaaagaagtgatgacttgttgcttttcaaaacaggaatgcatttttccccttgtctttgttgtaagagacaaaagaggaaacaaaagtgtctccctgtggaaaggcataactgtgacgaaagcaacttttataggcaaagcagcgcaaatctgaggtttcccgttggttgttaatttggttgagataaacattcctttttaaggaaaagtgaagagcagtgtgctgtcacacaccgttaagccagaggttctgacttcgctaaaggaaatgtaagaggttttgttgtctgttttaaataaatttaattcggaacacatgatccaacagactatgttaaaatattcagggaaatctctcccttcatttactttttcttgctataagcctatatttaggtttcttttctatttttttctcccatttggatcctttgaggtaaaaaaacataatgtcttcagcctcataataaaggaaagttaattaaaaaaaaaaagcaaagagccattttgtcctgttttcttggttccatcaatctgtttattaaacatcatccatatgctgaccctgtctctgtgtggttgggttgggaggcgatcagcagataccatagtgaacgaagaggaaggtttgaaccatgggccccatctttaaagaaagtcattaaaagaaggtaaacttcaaagtgattctggagttctttgaaatgtgctggaagacttaaatttattaatcttaaatcatgtactttttttctgtaatagaactcggattcttttgcatgatggggtaaagcttagcagagaatcatgggagctaacctttatcccacctttgacactaccctccaatcttgcaacactatcctgtttctcagaacagtttttaaatgccaatcatagagggtactgtaaagtgtacaagttactttatatatgtaatgttcacttgagtggaactgctttttacattaaagttaaaatcgatcttgtgtttcttcaaccttcaaaactatctcatctgtcagatttttaaaactccaacacaggttttggcatcttttgtgctgtatcttttaagtgcatgtgaaatttgtaaaatagagataagtacagtatgtatattttgtaaatctcccatttttgtaagaaaatatatattgtatttatacatttttactttggatttttgttttgttggctttaaaggtctaccccactttatcacatgtacagatcacaaataaatttttttaaatacaaaatgaacatttatttagtttactattcctgtaatattaaaccaaagaagagaaagaaggaaagtatgggaaaatagtatggagggacaacattgggtgtgtccctcaaagagaatggtgtatattattgaggtcttttttgctcccgcctttaagatagagtataatgaatgccttgactgtcatttaattttttttttcctgttgttgctgcttcctgccttcctccacaccaccccactacatacccctaagcctttttacatcctgctttggatgactattgaaggtattgaataagcatctcttttagagaagtgctgtctgatctatgtttttactgcccttaggagatgaaatccatattcaaaagggactagaagatagtgtttatatttgctgctttttttggtagtgtttcccttgtgaagaatacagtgagtttttgggtgtttggttttttgtttttttttttaaactgatcagtgttttggtattctaatgtaacttatgtagattggtaatccttaaatgctttgggttcaggtgctagggaaagtcagtggatacttcgagattagaagccttgcttgtggagtgttctcagctgaaggcttccctctaccttctaggtaaaccaagcaaaggtcaagcagctcccaaggtggcaatgactcagcagctccggcagcaatagactccatgcctgaccctgggatggcctctgaagccactgaagctattctttcctcttgagaagaggctaactttggaatcagattagacagggaagccttcactagccagaaactttgatatgaaagagtccctcgggaatggaaaaggcactttaatacatccaattctgagccttactagaattttttttctttccattcacctctcttctttaattccggtgcctatttcctggctttttctagtacagtggcttcattccctggcagccgtggggactcaggagcagactgggtgctgctgtttctcttgccccgcttggcctcaaagtttctgtagttctaaagtacaacagaaacagttctgtttttgttttaattaacaggctcacacacatggctcgtgtgtttttcaaacgcatgaaatgaaaaccagtgacagttctcgcaggagcaggaagccgcatgtatacagttcgtgcaaagcagcttttctttaagatcctcccgggttttgagcatcacaatgggtatgtgaggtcatcttaacctgtgaagattttggcatcaaggaagggaaaacagtgattgtaagtctctgaaggtttacccagtttttgttcataaaatgacaccttttaggttaaagcatgcctctcttaacaccacactaataccgcctgttaagaatgtttgcttttagagtaggtggaaggctcccaacggggttttttccttgcaaattaactgctgaaggcacttagacccttctacagggaaagcccagtggctgctcctctgagtgtgtccccttcgtttcatcagcactgccttgtctttcagggctctcaaagattgaagagtgttggtctttagtaagggaacaaagacggcagatgaatacattgctacctgcttttttttttttttttttttttggtaagcaaagataaaagtgttcagtttaattcccttcacattgtgctgtgttcttatgcagtcaattcatacctaggaattttagaagcgcagggatttttcttaaggaggcacatctctgcagaaaatatgtgagggagagtgtttgtgaaagagcatgtgtagcatttaagaaaaacattggcaggagtttggtgttaatccccagataaggagtagaaacacttgtgaaaattttctgcagtttataaaacaaaactactctgtacaacaaccccatgcaacacctaatctttttaagtaggtatgtgagaaatcttggcaagaaaaaaataaaataaaagtctggacaacatcttaccattaaaatacagagagagaattttaaaatgtgcctaaaataaaataatgatattagaaatcatctgggtagaactctagtagtataacagctgtaggtttgagccctgtaattatactgggaaaatctcttctaactctcccatctttaatttcactgaaaaggcaggtggctatttatagatggtatatttttatatatgcatacgtgaagggtgaataacagcctacggggctccaggaaatcctagaagggtccaaacccacaccaatgtggactgaaataagcaattcataaatctgttctatttttctctgatttacccccctcagtggcattaaaccgaattcataaaacttggttcttcacttctcctcactgtgtgacatttcttacatctgaatctgtgttctttacatttcatgctaaagtaaactagttaaaaagggtacgattaaaatgccagctctttagtaaacacacattgtgtctcttactctctttggttctttaaaaaaaaaaaaaaagatctagtcacttggaattttctcaatttgtggatttgtagtagaaggaaaaaaggaagtttgaccaagacaatagttgtttattataagggacccagttcaacaagtactgatcaagcagccactacactgaaggtactaggaaaaggactggagggacgcagatcaaagtaagacaaagtccacctgaagtaactgtcaacatagttggagtaaggagggtgtcccccaaggaagaataagcaaagaactttaatgctggatagaacctggcacatgtcagtgtagaagcacaaatgctgtttggaataatattacctgacatttggtggcatttactgtttttaaaagctcttttcacattcactatttagcttgactctcacaattattacaaccctgaaatggcaataatttctcttttaaagatgaagaaggccgggcatggtggctcacgcctgtaatcccagcacttcgggaggccaaggtgggcagatcacctgaggtcaggagttcaagaccagcctggcagacatggtgaaaccccaggcatggtggtgcatgcctgtaatcccagctactgaaattgaggctgagacacagaatcacttgaacctggaaagcggagattgcgatgagccgagatcacgcaactgtactccagtctggtcaggagaacaagactccatctcaaaaaaaaaaagttgaagctattgtgaggaattcagatgtaccttagctgagggtttactttactttgtaaggaccatttagggagcagaagcccacctctttttggtcgttaagcttcttttaatgctttccacctgtaaagctctttatgctggtgggccctggcatcagattcagcttagagtgtaagaagtggtctccaagagatgtgcatctaacgagcaagaaaggaaatttgggaggcagggaaaaagtggagaggagtgaggagatagataaagttctatctaggccatgaataaagacaagttgtttgaatcatctaacctaatactacttacccttagaaaatctgatccccaaacttcagcttggccttgcagaatctagaggctaattgaattaaaaggaaaagcatgccagggagagtatggtgggacagagactaggaaatatggtaccagcaatgaaagcatatgcggcataacctagcaccgatgacatttttcaatttccaaaggaaaaaaacaaatggcatacagcatttggttccagtttccaggcctggagtctctggagggagggttgggggtggcagctggtcatagcagctttttgcagcagacatagggaacacatccttagctaaaatcatgaattatcttcacctccaatagatggtttcttgaggacctaccacatgccaggtgctgtgctagccctgtgtgtttagcacagtggctgctgggactcactctctccagtctcagccagtgcatcaacccacaaacagcacacctcgcttatttcccacactagcttctggagggggatgaggacagtgggccaaaaaacactgtgcttttcatttcagaagtgtctttgtccccaggttcctacagtactaatgaataaatagcagcatcttgatcacgttgtaaagatggggaaaccagcaccgtgagtctaaaagtagcttgtgccgtgtcacaagtaaattataacaggccaagccacaatgaaggatccacccaggtcacccagtgactctgaatttagtcatctttcccccacagccgtaggttttgaagatgtggtatggtctaaaggaacctgagaggggcaagggaggggtggggtatggggaccagctttgtcaagggaagcagggtggtacaaacatgtcaccaaggacaataaagattagctgtttgtactttgttgataataatgatcattgtctttataattgctaacatttattgagcattacctgtatgctaagtcttgagtacaatatggtatagtggtcaagatagctcacacgaagcctaaaccatagtacttggcatctaataagtgatcaataaacatcaacattattattcttatataattatctcatttactcttcacaatatccctaggagataagtataattattccccatttgacttgtaagggaactcaggctctaaaaggcaagctggagagccgcaaaattggctccagtctgtgcccctaatcaccatgccacaaatatttaccaaggttttaatgcctgccattctctattattattctcaatttaatccagaaccattcaaaaaggaggaaaataacttacatcaggacagaatggaatcgaggaggggattttcagtgttagtccccagaatgtatttatttttttcttggtgagatgcagaaggcttgtaaatgctgtttacattctgaagtgccagatgctccccagtcttgtcctgcctaagtttctacattggggtcctagggcttggcagcaagagggagcttgggaaggtgcttcccagacaccacgtctagcccctcaggagttggtgtccgagtccctaagaggcctcctccactgccacaggccccttccctgcccattccagccctgaagaacagggcaggctcaaggagggtgggacaggggcttagtgagaaaacttatccttcttgcagaacaggacaggctgtctttctgctaacagtgagtcagtgagtgggaaaatgaggaagacaaaccccagcaccacggaaacccccttcctgaaggcctgtgtgaagaatcacaaaaacattcacgtgattcttatcgtatatgtcctatcaatatcatcataatgaaatggcgacattgatagctgtcacttaatgtgtcaactatgttctgtgttaagcacttatattaactcatttaatccatacattgtgagatggaaattattattttcatcttacaggctttcaatacgaacttgtgaagtcatacggactgttagagtcggacatgagctcaagagagagttgtgcaagtatcctaccctaaatcccttttaattatccccagtttaacagggcaactgaggcacagaatttaactgggccttaaggaggtacactggggaatattttaggtctgcttcccattgaagtgctcttgggaaaccattcttgggcaagagtgaaaacagttgcagagaatgtagttaaatccctctgtccttccaccctgaccccaggaagtgtaaactctgaagacaacactctttctgttattgttatccttaaaaaagaaaaaaacacatgaaataatttcacaagtttcaacaacaacaaattcagggcatctgcagagaaagaagtgggtcattgtctttcttctggtgctgaatgtcaaggtaaaataatatcttgcacccccattccacggtaccacccccttctggatttgtggttctgggggcttacaatatttgccagcaagaaaactgaatttccaacaaagggaaagttccagtcatcggggacttcatagaagaaattggtaaaaagaaagcgaagtctttgcccagtacaactgtctactaatctgctagttaaagcctgatgttagttagatatcatggagggctggagtccattctttagtttatccagggcctaggtgagctctagattgcttacaaattctacattctcacagaaaatcaagcatgcataaaaaagatgaaagggggggatggtggtggtgtgtggtatgtgtggtatatgtgcgtgtgtgtgcatgtatgtgtgtgtgtactatttcaaataaagggggatggtgggggggttgttcaagctggattttgctgctctaaaggggagcagatgatgagggcaaatctaaatgttcagataagatctttttcattttgtccattattaaaagactatttcttacacattctctctctctcatgattgacattgaaatgctacatttctcattgttaccttctgggtcttgttccatgaaggctgacatggatgtcaaatggatggcatctgacacccttacacaaagacacataccagtctgaaaggagattatttaatttttagcagaaaagaatccattctaaggatgatttattgtcattttgatcaccatttgtacttacaattccaaggagttaaattagaaaataacacactttctttaggaaaaaatatcaatgccttattaatttgccaccagtactcccagcttccagcatagcaggcatctgccagtccctcttgcacattcttcaaaggccaaacggcttgataaagtcagaagacccagaaaatgagaacaactgtttccaaccataccatcctctcaagcacaaagaagtttcctcttgccgtcagcacaagtggctaacaaaaaagaaggctaaaaattaaacttttcgagtccttcattcagactccattaggagcactccctctacaaaagtgaattcatgtttcgtttgaggtgggaatctatttcactaggagttaaatgaaacagcaaggaaattccgttagttcatctctgatgacaggaaggcaacatacaattcctccattcaccaagtggtttttggtctacaagttgtacaaaatgtttatttcagataactaagtcctctttcagtgcaaactaccactattatatatttaaaactgctctgcatttgtctctcagattactaaaatctgagctgttgaggtgactactgaaaaaaatctaaatgcaatctctactgtccaatcagaatgctatctaaattgctttttattatttaaattataaaacacaatttctagtagtgagaacattaggtttggatatctctgaataggcatagaaagactcaacaggttctacctccaagacagttactgcatgggtaggagtaaacattaatatgtctcttaatgctggctatttggttttaaaaatgaaggacccagatatagccttttgcgtaggatcagcctttaagaaaaattacaatggagctagcctcattttccttggggatgcttcttttaacctagagatcttggggacacttcttttaacctagagatctttcttacctgtcactctcaaccaagaaaaaggaaacacagagatggaatgcattaaaaaaaaaaaaagatcaaagggaaaactcaggaaagagagggcaagatagcaagagagaattctgaacacagccctgttcctgagccactgacacctttattcaatcattcttttgacaaccatgaattgactttccatcattactctcactccctgcacctgagttataataagcagtaacatgcatgagttttgatgtgccaggcatacatgtagagtgtactaagcactctatacatcttatctcatgcgattctttcaacagctctctgagacacatactattatccccattttaaagatagggaaagctgagacaccaagaggttaagtaatttgcccaagacccctcaactcgtatgcgtgctgcttctctcgctccctgaatttttttccagccctgactactaaactgttgatatccacagaatcaaccccgtttctttgaaatattgctaaaactgcgattagcttttcctgtgattcaagtacatctatcccagtcatgtgttactcgttagcagaaaattaggccctgcttttccatgatctacatttaatgacctcaccccacgtggcagggttccacaggaggatcatggccacctgttgggctgatagactgatggagccacagggggcttggacttagctcatctccttgtgttcttaggtataaaaggcagagaagcctgataagagcacccctgggcaagaggcctctggaggtcggcagcgaagtccaggcaactccctgcatatgctccgcagtgctccccctgtgctcaggctccaaactccccttgaaaatgagagagttgagagataaccacagattccctaaggaggttgggagttgcttgtaaaagacacattaatggctccctccaagcatgaaaaaaagtcatcattgtcattccagtttggggaaatatcttcagctcagctcttgggttcatggtgctaagcaagccaaggacacaagaatgtcccagagccaaactagggtcctccaccctatagtctgagatgtccctttccctccctggggcatcctgggtaggacaacatggatgtttaaaagcctcctcatctgcactgttggaagaagaaggtggggcaggcatctctctaacagccagccagttattgtagttccttctacaggacttgcctcaggggacagagggcagattacatggaaaaagacagccacgctcttcctgatgttgtcaaggactggcatgctccatggccgtcccctgcagttctgcaggttcttggtgtttaagaagcatcgtggactactgggacaaggtaattgggttgagatctaacagctggtattatacattttactctgctggaatctgcaacttatcctcggctgtgtcctctccctcaatccttacaatcagccaaccaccatagattctgcttcctccccacgaccagtacctgttgctttgatcactctaatggcgccttaactggcctccctgcctccattttggtccctcctccaattcctccacaccctgtgctagagggaattatggcaaatgcaacgatgacaatgtctcttccttgtttaaaacccctaagcatggcctgcaaagccttccttgatctctgcctggctctccagccttatctcccactattcccgctctgcagagaatattctggccgtgttgatctgttatggttgccctgcacactcatgtgtcacaagaattcattttttgatgaaagagagaatttgtggctattatgaccattgaaagctaacaagccccttattggacgcactccagccatctttgctcccaccagaaaggggctggaatgcgagtccagaaggaaatcagagcgaaggcctggacttcctctactcctgatcactctaggacaactaaaggaatcctcaaaaaaagggggcactacaggactgaaagaagaaaaaaaaagcaaatcaaaaaagattaagtattattagtacctaaaaagcagcgattttcttctattcaatttctagtgcccaacacaatatccagtgcatagcagatgctcagtgtgctggcttagtgtccccccaaaattcatgtccttctagaacctcagaatgtgaccttatttggaaatgggtcatcgcagatttctttaggtaagatgaggccatactggcctagagtgggcccttaattcaatattactattatccttatgggaagaggaagagaggccaggcgcggtggctcacacctggaatcccagcactttgggaggccgaggcatgtggatcactgga

SEQ ID NO: 542 - DNA, 3859 bp, Homo sapiens
ctctcccaaccgcctcgtcgcactcctcaggctgagagcaccgctgcactcgcggccggcgatgcgggaccccggcgcggccgctccgctttcgtccctgggcctctgtgccctggtgctggcgctgctgggcgcactgtccgcgggcgccggggcgcagccgtaccacggagagaagggcatctccgtgccggaccacggcttctgccagcccatctccatcccgctgtgcacggacatcgcctacaaccagaccatcctgcccaacctgctgggccacacgaaccaagaggacgcgggcctcgaggtgcaccagttctacccgctggtgaaggtgcagtgttctcccgaactccgctttttcttatgctccatgtatgcgcccgtgtgcaccgtgctcgatcaggccatcccgccgtgtcgttctctgtgcgagcgcgcccgccagggctgcgaggcgctcatgaacaagttcggcttccagtggcccgagcggctgcgctgcgagaacttcccggtgcacggtgcgggcgagatctgcgtgggccagaacacgtcggacggctccgggggcccaggcggcggccccactgcctaccctaccgcgccctacctgccggacctgcccttcaccgcgctgcccccgggggcctcagatggcagggggcgtcccgccttccccttctcatgcccccgtcagctcaaggtgcccccgtacctgggctaccgcttcctgggtgagcgcgattgtggcgccccgtgcgaaccgggccgtgccaacggcctgatgtactttaaggaggaggagaggcgcttcgcccgcctctgggtgggcgtgtggtccgtgctgtgctgcgcctcgacgctctttaccgttctcacctacctggtggacatgcggcgcttcagctacccagagcggcccatcatcttcctgtcgggctgctacttcatggtggccgtggcgcacgtggccggcttccttctagaggaccgcgccgtgtgcgtggagcgcttctcggacgatggctaccgcacggtggcgcagggcaccaagaaggagggctgcaccatcctcttcatggtgctctacttcttcggcatggccagctccatctggtgggtcattctgtctctcacttggttcctggcggccggcatgaagtggggccacgaggccatcgaggccaactcgcagtacttccacctggccgcgtgggccgtgcccgccgtcaagaccatcactatcctggccatgggccaggtagacggggacctgctgagcggggtgtgctacgttggcctctccagtgtggacgcgctgcggggcttcgtgctggcgcctctgttcgtctacctcttcataggcacgtccttcttgctggccggcttcgtgtccctcttccgtatccgcaccatcatgaaacacgacggcaccaagaccgagaagctggagaagctcatggtgcgcatcggcgtcttcagcgtgctctacacagtgcccgccaccatcgtcctggcctgctacttctacgagcaggccttccgcgagcactgggagcgcacctggctcctgcagacgtgcaagagctatgccgtgccctgcccgcccggccacttcccgcccatgagccccgacttcaccgtcttcatgatcaagtacctgatgaccatgatcgtcggcatcaccactggcttctggatctggtcgggcaagaccctgcagtcgtggcgccgcttctaccacagacttagccacagcagcaagggggagactgcggtatgagccccggcccctccccacctttcccaccccagccctcttgcaagaggagaggcacggtagggaaaagaactgctgggtgggggcctgtttctgtaactttctccccctctactgagaagtgacctggaagtgagaagttttttgcagatttggggcgaggggtgatttggaaaagaagacctgtgtggaaagcggtttggatgaaaagatttcaggcaaagacttgcaggaagatgatgataacggcgatgtgaatcgtcaaaggtacgggccagcttgtgcctaatagaaggttgagaccagcagagactgctgtgagtttctcccggctccgaggctgaacggggactgtgagcgatccccctgctgcagggcgagtggcctgtccagacccctgtgaggccccgggaaaggtacagccctgtctgcggtggctgctttgttggaaagagggagggcctcctgcggtgtgcttgtcaagcagtggtcaaaccataatctcttttcactggggccaaactggagcccagatgggttaatttccagggtcagacattacggtctctcctcccctgccccctcccgcctgtttttcctcccgtactgctttcaggtcttgtaaaataagcatttggaagtcttgggaggcctgcctgctagaatcctaatgtgaggatgcaaaagaaatgatgataacattttgagataaggccaaggagacgtggagtaggtatttttgctactttttcattttctggggaaggcaggaggcagaaagacgggtgttttatttggtctaataccctgaaaagaagtgatgacttgttgcttttcaaaacaggaatgcatttttccccttgtctttgttgtaagagacaaaagaggaaacaaaagtgtctccctgtggaaaggcataactgtgacgaaagcaacttttataggcaaagcagcgcaaatctgaggtttcccgttggttgttaatttggttgagataaacattcctttttaaggaaaagtgaagagcagtgtgctgtcacacaccgttaagccagaggttctgacttcgctaaaggaaatgtaagaggttttgttgtctgttttaaataaatttaattcggaacacatgatccaacagactatgttaaaatattcagggaaatctctcccttcatttactttttcttgctataagcctatatttaggtttcttttctatttttttctcccatttggatcctttgaggtaaaaaaacataatgtcttcagcctcataataaaggaaagttaattaaaaaaaaaaagcaaagagccattttgtcctgttttcttggttccatcaatctgtttattaaacatcatccatatgctgaccctgtctctgtgtggttgggttgggaggcgatcagcagataccatagtgaacgaagaggaaggtttgaaccatgggccccatctttaaagaaagtcattaaaagaaggtaaacttcaaagtgattctggagttctttgaaatgtgctggaagacttaaatttattaatcttaaatcatgtactttttttctgtaatagaactcggattcttttgcatgatggggtaaagcttagcagagaatcatgggagctaacctttatcccacctttgacactaccctccaatcttgcaacactatcctgtttctcagaacagtttttaaatgccaatcatagagggtactgtaaagtgtacaagttactttatatatgtaatgttcacttgagtggaactgctttttacattaaagttaaaatcgatcttgtgtttcttcaaccttcaaaactatctcatctgtcagatttttaaaactccaacacaggttttggcatcttttgtgctgtatcttttaagtgcatgtgaaatttgtaaaatagagataagtacagtatgtatattttgtaaatctcccatttttgtaagaaaatatatattgtatttatacatttttactttggatttttgttttgttggctttaaaggtctaccccactttatcacatgtacagatcacaaataaatttttttaaatacaaaatgaa

SEQ ID NO: 543 - protein, 574 aa, Homo sapiens
MRDPGAAAPLSSLGLCALVLALLGALSAGAGAQPYHGEKGISVPDHGFCQPISIPLCTDIAYNQTILPNLLGHTNQEDAGLEVHQFYPLVKVQCSPELRFFLCSMYAPVCTVLDQAIPPCRSLCERARQGCEALMNKFGFQWPERLRCENFPVHGAGEICVGQNTSDGSGGPGGGPTAYPTAPYLPDLPFTALPPGASDGRGRPAFPFSCPRQLKVPPYLGYRFLGERDCGAPCEPGRANGLMYFKEEERRFARLWVGVWSVLCCASTLFTVLTYLVDMRRFSYPERPIIFLSGCYFMVAVAHVAGFLLEDRAVCVERFSDDGYRTVAQGTKKEGCTILFMVLYFFGMASSIWWVILSLTWFLAAGMKWGHEAIEANSQYFHLAAWAVPAVKTITILAMGQVDGDLLSGVCYVGLSSVDALRGFVLAPLFVYLFIGTSFLLAGFVSLFRIRTIMKHDGTKTEKLEKLMVRIGVFSVLYTVPATIVLACYFYEQAFREHWERTWLLQTCKSYAVPCPPGHFPPMSPDFTVFMIKYLMTMIVGITTGFWIWSGKTLQSWRRFYHRLSHSSKGETAV

SEQ ID NO: 544 - DNA, 42563 bp, Mus musculus
  misc_feature (1)...(42563): n = A,T,C or G
tgcagaacgaacaatttgagtaaaaaaaaaaaattctcaaagaatattataccaaaaaaaaaaaactttgatcattgaactcaggattacgtgtgtgtgtgtgtgtgtgtgtgtgtgtgtgtatgaagactgtaattgtaacatttagtcgtgtgaagtcatcggcatttaaaagtgacttgctgacggagcctctttgatttatgttaggcagatgtgtagggtgtcatagagtgaggaccacgtcatagactgtcttggaggaaagagttactggaagcttgaaaagcctttcacagtcaaagcaggtgccagccatatcaagttggaaattaacggttgttgatggtaaaggaagagatcgactctcagaggagaattcttgaacagtgcggtggctcagcctaaaaccctcatgggcaaaagtctcagaatgagtggccagagccaacactacgtagggagggtttcatctgcccagacagaaactgtctccagcagccactcagttgtctggctctgaaaccagccactgtcctggcccagttctaaaactgccattgtctttattggggagcggggctaggatgactgtaggtaggagtgcttgctcttgcccttgactcgtggaagatcactggtagtcagctcatggtctctctgtagttgggaacatcctcagaagacaagaagacaccatactgccagttgtgttaaactaaaaaaaaaaaaacaaaacaaaaaacaaaaaaaaaagaagggctcgggtgggacagagggagacgggatgccagggaccatcttttacctttgccttttcccaggactgtgatgagacgcttggttgtgggattttaaagttatagcgctcaaccacacagcaattcaagaatctcctccttaaaaggtctattccatatcatcagcctaggttttacttgagctgttcagctggtggggtgcatataggtcagaagtccagactctggttgtggctgttacaagttctttccctggagctgaaatctggctccctgtgacttctagcggagctgtgtgtccttcagcagcagcgtccccccctctcttctgggggagctctcactctctgcccttggctctcacagatctgcagccctctctctttcaggtttgtttacctgggtcttttcagtgttcctcatttcatattttcccatcatcctctagtgaaccgtgctgcctttcacttgataagctccacttctgtcactgtcactcaagtccaaccctcaccttgctgtacaagaggtcacagtgatgtggtctgatcatcacagatgacggcgggacagatgctagttaagacagaattaatgtggcttggggtgtggctcagtggtgggatacttgactagtgtgcctcaggccctgagtgctatctccatcgtcctctgcctccaaagagaaggaccaaattaatgttgatggctattatgtcacactaatacggcatagtttgttatgcataaggtatttctctagttctgttactccacttacacagtcgttatcttaaaacccaagctaacccttacagggctggtcgtattcctatctctccttaggtttcatgaatatttgcttgactagctttaggttaattattaagtcatttgcatatttgaaatgaatggtgttttctattgctttcatttacagttttaataaatgtgtgaaaataaaacaacaacaacaataaaaaaaatggagagtcccatagtacccagagctcttgttaggttttggtcaacttgacacgaactgggtcatctgagtgagaaactgggtcccttaaattggcctgtatgcaagtgtgtgggagcactttctagactagtgattgatgtgggagggtccatccaattgtgggaggtggtgctggggagtaagaaatgagagcctgaggagtaagccatgaagcagtgtcctcccatgcccctgcctcacgtttgccttgctcggggttcctgtttgtccttacttccctctatgacagcctgtgattgtgacatgtaaaccaaacgaacccttccctccctacattgctttttcttgtgccttttatcacagcagtaaaagacaaactaggacacccagacagatatgctaagaatgattcaactgctcaatgaatgaatgaataaatgaatgaatgaactaacccttggtcatgatattaatccatcagcatagcccattggttgtagtcttatctcttgattaatccacttctactttttttttttttaaaccaccacagatcaactagccatcactttcactcaaacactcactgtgagacaggcttctcgaatctttctggcttctctgatactcaaatgttataacaaaaacaaatcttttttgatgtagaattttgattatgtcactctgctattattactttagtcataataaagaacaaaatctttaactaacccacaaggcaagtgtgttctggcccatgctgagctcttctgccttgtctctcactcacctgcatgtcaaccacagatactctcaaatcttccccctgccccagtgcctttgtatgtgatattactttggctcagaacctttctaccttgtcacccctcccagcccttcgcctggttagtgcctctggctctgtttcctttagatgtacattacaaacgttcctagaggcaaggctggaccatttcactcatacagttctggggttcagaatttggcctcagggggattctcccattctctgtggtaacaagggcctgatttgactgccatgagtggatggcatttgtctggtagcttagcagatgctggtagcttagcaggctacgctgagctaggacttttgacctaaacttacacatgggagctctggcactgtgatggcaggacagaggaatatcttacacggtgggctcaatccttagaaaaatacatttttagaaggtcatgtagggtgggaaggctttttgtgtctcagaagtttcagaacatttttaatgcttcatcctaagttagttaagggccaaccttggagtcaggagaagtgattagactccacctctttgtgggagggtatcaggacacaggtggcaatactgaagctgccactttatccttcaaatagcactttagacgagtcacatgaaaactttcttcagcaccacgcagacctcttggtagcactcttcattgtaaaaattttatatttgtttatgtttaattgacagttattttgctccttggccaaactaagcagctgtactaagcaaagccatctctgactttgctcatctctctgtccccagcactgagcagagtgtctggctcaatgaatgtctgttgaagcgtgaatgaacacagcaccacccgaaccttgacggcagtgattgcgcactgttctcaagcgcgtcattgtgccggagccttgttaacagtcgaaagcacaggatcccaagcgatgcctatccttcacagttcagaaacttcagatgaaaggaaacagccccacccttttcctctcagcgtctcaacgataacactagctgctgttagcatgcgcctttagcttttgggactctgtgaagaaccccagtactttatggcgcagtagaggccaacagaggctccagcaaggagtgttcttgggatctatgtccctctgccagcagatggatccacccacagtaggcttgttgagccgtaagtatgtacagacatagaggagcgaccaggccctagtgcgcttgcgcgaccggattgggtccttcctctagtggccatgccatctgctgatttgctcctagcaagaacaccgtacacctcgggaggagctaagtgctgcggctctccacggtgttttccagcttgacttattcctggacaccctgcctttctttttagtgctatttgaaggatccaggcctatgtatctttacatctccctagacctctagaagaactttaatgctgaaaatactcagtaaatatttgcctttaagacagtgaatgagcaacctagctgagacaatgctcctcttagtagcattttcctactacctggttaccgctaagttcagggcaaagtcttttccattgatggcctcctgattgctcccagggaaccattctcccactttctctttcagaacagcgtggtcctttgtgccacctcatctcccctcttctgcctcagctagatcccagtgcctacgctaaagcctgttgcctgtgaggtgtggaacagggtagtgttctacctggcacatagtaggtgctcaagcagcatctgtggaatgatttgcctactagaacaaaacctcccatgatgcaaatggaggctttgaccccattctaccccacctcagggtctcccaagggtcctgtaatgattttagggtatgttctggtagtgccctgtctcctcttatcctgccagtgggcagatttggaatctctttgcttgctgcccatgcactactgaatctggttggcattgtgttaaagaaaaatcagtaaagttggatcagtttgaatctcagttctgctattaccagtttcatggccttgaacatatcttcaccctttgaaactggttcttcatctgtattatgggggttaacaatctcacccagacatcagaaaccagggtgcttggtcattcaccccaccactcttacttgtgtaagagtgtatataaagtcagcgaagatggtattaccgggcactttgctttctagactgtaactcctcccccccatccccctccccctcctcctcctcttcgtttttggatgctgaagacaaacatctttattaaagatactaccaaaattttggcaaacaactcttcttgtgtgaacagtcttcctttttaggcttttcgctagctcacccacccctcagacccgattctgcttctagtgacagaaatctgtcagagaatccccccataaattcttaggttctttcctctcccattgcgtctgctgaacacccgctctgatagtaagaatttccatttcttgggccatctggtaaaagccttgctggtgtttggagtttgggggacggttcattcctggggaagtgacagctctgttctgagccaacaagagtggagaagctagcttcctcacacacacacacacacacacacacacacacacacacacacacaatttctaaaggaaggttgtgtccgtgttttaggaacgggcaatggagtgtctgccaggctggtatgcagtctccttgtgagcattcgtgatgctcctctagggaactgggactgtctggcaaggccaaagtgtgaggtgtagaactttgccatcctcaagctcctaaatggcttttgctgaagcctggcttactgtgggtagtttcagggatcatgcatttgagacaaacctgagctatagagcaagaccctctctcaaatccttaccctgcaaacacacacacacacacacacacacacacacacacacacacacacgcacacacaaacaaaaaacaaacaaacaaaacaaagcaaaatactcacaaagctggtatcagtcaactcagaagtagtgaaggaggctgatgtttctaatcagggaaagacaagtttccaaacagagaagtttgcaacagtatggacttcctgggcagggccagagtttgccccacccagtgagtttcagggactatttgttcgagattttggaaggctattatgcaggggctctcaaccttcctaatgctgagaccccttaatacaagctgtggtgacccccaaccatacaattgttttcattgctgtttcataactgtaatgttggcactgcaatgaatcgtaagtaaacatctgatatttctgatgctcttcagcagccctgtgaaagggtcattagtcccacaaaggggtcacaacccacagattgagaacgctgccgtaatggttccatgtgattacctgagttaaactaatcaattaagtttatagcatagggtcatttgatttggagacctcgtgtgtttgacatgtcaggtggggaaaagttctctgattagatccagtgtgttgacttttcaggtattatacagactcctatatttagggaggaattcagacctaacaaggccccagccttcagatccatgataaataggatactgtgagtgacttactgtgacaaaataggcaagggtccccaggctctgcccacgtgccatgtctgctatagctcaactgacaatgctaaaccctaacatccattacagttactgggagagagggagaaagctactgggagctagacatttggttctcacaccaaacatctaatattttggcagctgaacttacttgtaacattatcacaaactgctaaatttctatatgggaaaaaaaaaaagagcttctacagtttaacaagagaaagtcagactcaagacaggatgcggggaggtggggcggagagggctgtgtgacgaatacgtggcgtaagaatacaaacgtattaatcatgtggcaggatactcagattcataagagaaatttgttttgaaataacagtggaaaccacctaccagatgtggcttagactttgaaaagcaaatcagaaaaaaaaaaaatgtcgcccaggatatggagaaatccgttattggttgcctttgatgggaatgtgaagttctggtggacagtggttcctcagagggtttaaaatagaatctccatatgacctactcttccacttcttggtttgtatctaaaagaagtgaaagcagaaaactggggagaaattcgtacacctcatgttcacagcagcagtcttcacggcactaaaaagatgtacataattcaagcagccctctgcagatgggcacagacgctgaacccggtgtgagcatcttcagaagagcagggatcccagcaggtcctacaatgaggatgggcccctaaggcagcgctaagtgaagcaaacccaccacagaaagctaaatactgtaagattccacttccatctaaagaactcaggtccatggagacagaaggtggtttctgagaccggggtggggagtggggggcaggaaggaaaaatgaggaacgatcgctgttgactgagtccagagtttccatcttgcaatgtgagaagacttggggatactgtgatgttgatggttgcacaatgcaaatctttcatgtgctgctgcatgtttggaaatgatcagtctagtaaacattgtatgtattttaccatatttaaaaaaactacgatgagagggttgaggaattcagtcagtggggcacttgcctggctagcgcaaggccctgggctcaattccaagcactgtcaaaaatgtataatgaagcgtcattttaatctttaaatggtacagatcaaaaattcacaaatttgaaaacattccccccccaaaacatgtgaaagtaagtagtctcctgtcggtggaagttttaacgtataattgtggaggaaaatctttctgtatctgtgaaaactaaaattccattactcgtcagctcttggtcaagagattctccttctgagaagtggccagctcctgcaggtatgaggcagaatataatttgggtttttctttacaacagaaaattaggagcaactaatcaggctatttgcatcaagtagattacagcagaatagtatgcaactgctaatatgatagtgctaattattatggatataaaataatccctaagctggtagcatctatgtaaaagtatgtattgaatgcttctatttgtgttttaaaatcaaacgctaatacatgtggatctgagttattactttgttgtattttgtctaaaataagtgaaggcaagaaactgaaataggtaactggtcattccaggcacactttggaagaaagttagatggccagggaccagagtccatagggatcctggctttcaactatttgtcactctgatagctaataatggctgccaacttgaatcaccaatctagaattctgggatgttgtaagtgactgggttatttcaagccatcttcaatgcagcctgcatcattgcgtgggttggggtctcaggctgaataaaaatgggaaggcaagatgagtaccagcatcttcctctgctttctgaactgagggtacaatgaggctgggtgcctcccacccctgcccccaccccatgatgtccctgaaattatgggctgcacccaaacctgtaagccaaaacaagccttccctcccttccttatgttgttttatcagatattttgttgcaacaacagaagaattaactgatacctcaccattactttaaacaatcaaacaatcaaacaaacaaacaaacaaaaaaccaaggtcttactatgtacccttgttggcttaaagctcactagcctggcctaggattcactgagatagatgaacatttacctctgcctcccaagtgctgggattaaaatgcatctgctaccatgtccaagactcagctttactttagcattttcatgttatgttcagatataatctctaaaaattcttaattaaaaaaaattaccgtctcgaaggattaaagcacacacacaaatacacacacacacacacacacacacacacacacacacactgttttagcccactgccctgtgccaagcactataagaaaagaaggaagtatacagacacgacctgaaggatggagaatggctgtagacagtccaccctccaagggagaaatttctgctattgaatgaataatacttgtgtgtcttcccaaagcaccactttccttttatatacaaagctgagtagtaatccacctgctaggtttccccttttatattagccattaaaacgctgcaagccaaatttgagtgtcacctaatactaggtggttcattcctagggtaagcagttagcgtcggccttgtattgggatctgctccaaactttggtaatcgatttgtttccccaccagtctaatgttggtctttatcctgtgcttctagtaagctctaacatctttttggtctatatcgagcggttgagtcgagaagcagagagaaagcgagaggaagaagaaactagacattataaagtcttgcctgacgttttttctttagcatgccttacagatgaagtgagtatgtcaggtagttagacataggcttcatttcaacttatggccagatgctctgtgcacgaggcccaggaaagtgtttggcacgctctcccggtgactttccatgcacgcgaaactttgaaaaccacgggaaaatcaaaggaagttcgattttactcaagggtctcggtattctctcatattccctgcattggttgagacaaaagtaatgccttgctctaccatagaatgtcccacagctttgtcatctaacatcaagtacttctggctaatgtcacagtctcgatcagcatgggaagggtgtggaggggtggagaacgctgttttatactacttcagtctggaaacttaagtctctgcctttatgagacgtgggcatcgtattagcccttgcactttttcttgagatttcctgagtctgggaaggaaaaggagagaggagtggggagggagaagagggaagggaggaggannnnnnnnnnnnnnnnnnnnnnnnnnnnnnnnnnnnnnnnnnnnnnnnnnnnnnnnnnnnnnnnnnnnnnnnnnnnnnnnnnnnnnnnnnnnnnnnnnnnnnnnnnnnngaggaaggagaccgctgttaccatgtttagaagcagcagacatattttctgcccccagtatcatggcctgcctcactgcaaaggaggctgggaaatatggcctgtgtatggagctaggtggggagaaatgacttcagtgaatgtgggaacctacacgaattttaaatactctttctagttcatgtttcagtgaacaattgttttcagtctcactttctaactaagttttatcttgtctttttaaactccagcaccatgggcttggcaatccttatctttgtgacagtcttgctgatctcaggtaagaacccttttctgtgtaaagtcctggagtccttctgctgtcattcagtgagtcagagcactgaaagcccaggcctgagagttgttggtatggtttgctcacgtttgacttgagttgccgaagactccatagcaaatagctttcctagagagtacggaaggatcaggaccatggccagctgtctgggcatcttcctcctctacaaccaaacccccaggacctcaacacacagcacaaggtggagtgtcctgtccaggactcttagaggggtaaagagagccatgacagtaaagcctctaacttgactccacacacacacacacacacacacacacacacacacacacacacacacacacatctggtcttttcagtccccattttcagtattctcaagcccttagaaaattgctgacagctttcaaaggcttcttcttgtaatactggctcaccaccacatccttcttccttagcctgtgccctaactcatactggtcatgctttgtgactctggacctccagttaatcatgccagccactgtaccaagctaaagttaactaagctaatgcttcagggctccccctcacacaggctccccctttctaacccctaaggaccccaggaggacctcagcactatatcacatatcttacaacttggtaagatttggataagatagccacaattaattacgattgcctcccccccacccccgacatcactgtctcctgctgggtgacatcttgcatttgaattatgtgttattttttctaaaaagctcactaaagtttagaactgtgaggcctccctgaattcagcccttcctggctctctgctctctgggatgcacccataaacagctggctggaggccttgccatgcatcctgcaactgaatgccattttgtttctgctggcccactctttcctgtactcactttctctacctcagtgctgacagagaagccatctcagtcttggtgatcagcagacaggataggtgagcttccggtgtgcctgcagcagctgcaggccacccctgaccacctggcctctgactaaccagctcagccacaaaatcacctcctctataattgtcacacaacagtcccttggccactgcccctagccctggcagggtaaagaggaggagttgagtattatgaagagatatccctttagacctcagcagatacagtccttttgtgatttgtgctttctgcttagcactcaaggcttgcagaggccaccagatgatgtctacaggtgttcacctagctattcatcaacgtagatgagaatggcagctttcacctgccagggccagtgacccagagtctcagctcctggggagatgtgtacacacacaaatatcagaggtgaggaacataaagatagtttgtatgtgtgtatgcatttgtgtgttctctctctctctctctgtctgtctatgtatctggacgtgactcaatatgtgtgcatgcatgcatgcatgtctctgtgcgtgtctgtgtgtgtgtggtgtttgtgtgtcatgtatatatgtatctgcatgcatgtttgcctgtgtgtgcatgtgtgtgcctttgtgtatacatctgtgtgtgtatgtgtgtggtgtatacatgtgtgcgcatctacacttgtgtgtgtgtacgttgtgtgtacgtgtgtgtgtttagttcaggtacttataaagttctgagcactttataaatagcaattcatttaaaaaccacaataacttgctgcattagatttcatcattattcctcattttaagacaaggtccctaaagtgctgagacagctaagtaattgactaagatcaacacagctcctaaacagagaggccagattcatgcctagcagtgcaggctgaaggtcatggatgcgcgttaccaggctattcctcctagctcttcctcctgaggcaatgacaagtggctctgcttctgaatgactcagctttgcttcagcttggcccctccttgtgtggcctccttccacttcctgcttttatcttaagccacaccccagctgtccttaaaccttaggccttagcactacaggttagaatggcaagtttagcttttatgatctgggagagaaatgtcctggaaacaaataattcagtaacagcttgactgagacacctttcctgtccccaaactttcaggctcagccctttgaaagtgagtagatagagctgagaaacccatcaaaaccaaggacaggtgccacttctcttttgacctgctctgaaaccatgtggaaactcctagctccggaaaagggggtcgatgatattgaaaccataagaaaaaaatatcttgagtgaaaactgagtaggtttcattgtagcaaggggatgtatgggaagaggatatagcttgggacgaacagatataaagatggcaggcaatctgcttcaaccgccagaaaatgaagctgccaatacttcactcatcaataaacgcaatgataaaacagtcagcatctatttctaacctttcatttttttttttactcttaatcatgtataatcattgataaatatgcttctttagcttattttttagtttcaaacatgcatacaaatatatcttggttatatccatcccatttttccccctccaacctctcattcccacacaaaaaaaacccaccccccatctgcctctcaactttgaacacacatacatggaactgctatgtccacaaccctaatcccagaggctcagcaaacattactggagacaagaggggaagaaagaatttaagagccagaggatggggaggagttctgtgaccactggccactgggcaggacatagctgtttcacatgcaaattctcagaagctgtggttatctgcacaagataaccacagggagaaattcttttcttggggtggggacattggtacctatgcctagtagatgacccacacaggtgcgcttatgaacaacactaaatggccttagagtgtattattaaattaaaagccaccttttttttaacatggaaaatatatctaatttgaatctgcctcttcttgagctatggagtagagacctaccccagggcaggcatccaaagagagaaaggagacacagttggcactaataatccacggggggagggggggaattacaaggctgataacttaagataacacataagacatagagcaaaatagttttgccctgccccctacacctcccacatgctttgcctggaaattagataccattgttatgcccctgatcaattgctaccagtgtggctggcaaaggacaaccctgtggggtctgttctcttcttccacctttaagtgggtcctgagggttaaactcggcttatcaggcttgcacaacaaccttctaggccatctcatgggcccttcactctgggaatgctccagactggccttagagtagctatgaccataggtgcatccaccatgcttagtccagttggacatctggcagttgttctcttcttgtctgaatctccaggttttagggttcttatttcgcctgaccaacaccactggtcaacaataaccctggagtgggagagtcttccttcacttaaagacgtacattaaacagcttcagattcttgtgttgtggagaggcggactctcttcccccagattctgtaggttctggcttgggtggtacatgaaaatagcattcatgggtctccttttagctctatctcttgtcattgtctaccaacactaaatcaagtacctggggtaaactaacaattcaaacttaatctactcaaagagccattagttcagctgctgtcttggggccttttcagatttaagaggaaatagagtgtatctcttgctatctacttgaaaacatccaacaagccatcggatatggtgcctgggacttgactaatggctatggactggagatacgcaccttgtagcttatccctgagagttcaatcagtgggcatacagaataaatcccagagtaaacagacacatggaccaggaagtcagactgaggaagttaattccaagtaaactggagtttaaagccatgttacttttggtacaatggccagatggggtgaggtccaaaagagcacagagctttcttgatgaaaactggtaacaccttttgtcagaaaagcttcaggagagacaggagtgagccgtgtagggggagaaagctgtctctgctcactagggaatcgaacagaaaagaaaagcaagggcagaggggacctgttgagacaggatgatgagcctggaggctgtgtttagagaagtagactatcacaaatttcaaatgttacctatctgttcagtgagattatttcctgtaagggtacttacccacccagctgtaagatcagatctgtagattcgaaaaaagtttctttagcataacttctaccagggccaagagatatatttagtggctttttactggtgagaaatggttaaaaagctgtattatggatttattttgtgtgtgtgtgtgtgtgtgtgtgtgtgtgtgctgtccagtataatagccactatccatatgtgactcattaagttttaattaattaagattaaacaagatgaaaaaaaattcaatttccctctccagcactgtaaaaaatgatccagtttcttggtcacagttactacttgttgaggattcacattgtgcaaaaccagagaagaattctctcctctcaaagtattctttcggaggaataatactgtgaaatcaaagactggggtctaagagagctaacatctcaacaaagttgaagaacagctatgaagaaaatgagagtaaacactgggggtcagatctgaggtattaagccctctgggacactgctcaggattgtgccatgggaaatggagggttgctgagcaggtctgtgggtgaaggtctctgtggtagataaagtaaggaactttgacacaaggttgttggcagacttgttattgatgaataaactgttacattatcttggtggttatgttgagtattggttagagagaagagccttgaatataatgccgaaatcctccttgaatgaggacacagtgaccaatagttagtacttcataaccatgagataggagacacctctgagtggagaggtgctcctcaaagcccttgctgaggaagccaggagtgtcttgtgggccacatggagtcctttgggtagaactagattccatggaaaggacatagagggtaatatttattgaagaggatcagctatagtgggatctagtacaatggaacgggactttcagcgggcctagaaaggctttgggcgaagtttacagaaagaacaagaaccttggagtgtaacaagcaaagaaaatgcagaagagatgatgagtttggggtaaccgaccagggaagactgatattctggtgaggtcatagactcacaaagtgggacactccaggggtttctgtctgcagaggtccttcagtattcttgatcactggttcctgagtggggagatatgtggctgaattcttgtgtccttggctcctggctgcatcataacaatcagtcatagctaagtctaaagcatttctttaacccacatgttagaagagggaggatttctcagtgctttccaccaatggaattctagggagttcacttgctttgaggccccaagttctggggaccataacagtggaggcctgaaggcactgggaaagaacagaccttgagtcaaatcttcccgatatggtcacagctaagatatgtctgcttggttcagagtacaatcaagacaatcagggtctgatgacaaaccaagcatgtggaatgtgaaatactttcagttccattcagaatggctacagagtagtttctcgccccgtggggaggagaaggggactggagaggtagaagtgtatgtggctggttatcagctctgatcccctcagcttcccaaatagaagttcatggtaaaatgcaggttctgattcagatcttgtgtggaaccagagagtctgtgtttctgaccagccctcaggtgaggccaaaggctttggtctactttttattggtaggtaaagagggaactgagggaagatgaagtccctgttactttgtgggagagggggactgggtcagagaagttggagagggagtgaatggaaaggagattgggtactctgggtctccacagaagaaaaagagtctgtgtgttgagcggatgtaagaatctcagagtgagttcacttctagacccaggaagtgcaactaaaaactgggcaatataagaacacaccaaccaatagctggccagtgctttgcttcagctgcctgcttggtttctccatcagaaatcatttgcccagaatcacaataagttagagccaaaccagaatatgtcctgccctccgcacagtccaccagtcctcaccaaacttcgaacatttacagtaggtggcactcttgcctctcacttaagagattagcagaggtggaacaaaaagccaaatacaataaatttttcttaggtcaattttttggtattgtgggaactcagtgatctccctcttccctctgatgcagacatgcatgtgtccttcacggatgtctggagtatcctctgagaccccttgattgtaggttctcatggggtgttctgctttgccaagtccatgccatcgtacctgcctatactatttcctgtttaaagggaggctaattggtcaggtcagtttaacttctgactcaccaccactgtgagtgggactcctcatctccctcacccatcactggccctcccttccctcccttcctgaagtcccgaaggacgagctgtttttatgaagactctcctccattcttctccccattgcagcctccagcttcatatgagcctttaaaaggcacacccacctcacctttcacctttcacctttcacctctcgcctctcatctccctctatttattttctttgctgagtctccagcaattctgtggcctagaaaaagtcccataagctggcttatgccagtgcgtcctctctctgaacttttccatcattgctccctttgggttctaaaagtttccagggcactgcagcccaggagtagccattggtttcttcagggtttctgcagtatgacaaggctcatcctcaccttcccacatacagttctctcccagcagcttgctcatcttccttaaatatcctgacctctatcatctcccaagagccattacatttgcccagcttcctttctggtccctgaaagattctagagaggtcactgagaatagagacattgcttgacacttgagtcacttcaaaccccctttttctctggctctgggagtggaggctgtgggggcaggaactagttgaatgtcaaagaagtgactcagtagggctcccaaataatggagactaataaaaggtggtagcaagtgaggaaccatccatcatcaacaatctttaaaaaaacaaaaaacaaaaaacaaaaaaacccaaaaaaaccaaaaacatagcagaccaaagtataaagggattgcatggggcaggcagggtttaggcagatggcatagcagttgtggaggcctgtagcaattatgatgatggtagtcaatgctctggttttgaaattcgcagaagcacagagagaatcctagaacattactacagaccacttccttaatctggtgagaaaacagattcacaaagtttgcagcctgcacatgtgaaccaagtggagcaaaacgaaagcctgagcttcagacgtccagcatggatgcctggttccagatcctagcacccacctctccagtactatcactgcctgacaagctggaagctgggtgctgtttcagagcaagggatcttcctcttcttgtctcctctttcctaattctcagtttttctattttagatgctgtttccgtggagacgcaagcttatttcaatgggactgcatatctgccgtgcccatttacaaaggctcaaaacataagcctgagtgagctggtagtattttggcaggaccagcaaaagttggttctgtacgagcactatttgggcacagagaaacttgatagtgtgaatgccaagtacctgggccgcacgagctttgacaggaacaactggactctacgacttcacaatgttcagatcaaggacatgggctcgtatgattgttttatacaaaaaaagccacccacaggatcaattatcctccaacagacattaacagaactgtcagtgatcggtatgtggtcagtgctgtgtttagattgtcggctgctcagatgagaccatgactgagcaaagaaacattgagggtggatatttgaacagactggaaatgaaggcagaagagagtcacttctagaaagtccatttggagggaatgtggggtctgagagtggggagctgaaagccctttgtactttgacagcttgtttcttggagatcagtgagaattttttgagataagatagggctaggtgaacaaagcaacacagacagattataacaatggacaatgtagccactccttctattttctccttttagtctaagatttttttccacccgtagtaatctgggtctcttgctttatctcttagggttctgtcattctgagaatagcgtataaatggagctgaactttaatctttaagatgaacttcttttattcagcaaaatgccttttgtgtttcatataagttgagtgtatcaaaaatttggaagttttattttttttaattgatgaattccattatactgtcaatcactgaaagatactgggttgtttccagtttgaagctgtgacaaactgagctgctatgcaagtgtcagcctctgtgtggatgtatttgtatttctctagtgtagattcattctgaggcataatgttgctggactcgaatgaattcttcacgaacttggaaaaggcagactgacaccttttgagaaataatcctcctagaatgaaccatttctaaatccacaggataaaccacaggataaaacaggcaaacccagacacagcatggagggttgctctccttgagcgtgacttgattcagtcgtggctacagggcttccatttaacaaggtgctaagtttgggttctcagggtgtggcaggcccctttggagaaacagtgtgttttaggagggggcacagaccagcctttaaaacaggttgtctattcattataatgtgtatcagtactacaacttaactcatgactgcaaaagagattgttgatgaagctgaatggactctagcaattcttaccaaacatcagcagaatgttcagggagcacaatgagattgcaaaaactcaaaagaggatggcatgcaaatgacttccattgttacattgttacatgttacattgttacatggtacaatcattttgcttatgagttccgcctttagtggctgagccatctctccagtttcgtactcaattatcaactaatatgtagaatccacacgtgtcaggtccaggatctttgtgccagtgtacttcagccctaaaaacacacagtggtaaacaaagaggagagagttttgaatttgcctccatatgaatcatttttttcagcagagtggtctgcaaccttcctaatgctgtgaccctttaatatacttccttatgttgtggtgacccccaaccatacaattatttagtttctacttcataatggtaattttgctactgttatgaatcataatgtaaacatctgatatgcagaatatctaatacatgaacaccccccacccccgcaaaggggtcacaacccatgggttgagaattaccactgttacagcacataaagttagactatgatagtcatgtcaaaaaccaacaatctaagtttgtaagcagaaagacctcccttattactcttacttgtaggttcttaaagatgagacccagagcatgcaaggaccataaaccctgtgagttcttgatggaaatttacctcatccctgagtgggaaggtgagatgtttccctgtgggaatggaggccagatagttagagttgagaccccagttcttagagtagtggcttcactatagaccttggtaagataattttaggtagcctatgtctcagagagcattctctagaggaacaagtagatgtcttgaaagataactgtacgtttattatgcagccctcactatgggctgaggcccacatggaatataccttgagatggtcaggtctattctgatcagaaaactggctgtcagtcacttgtcattcctttgtatcgacatctacatttaggttgactgattccatctttattctgcttccagccaacttcagtgaacctgaaataaaactggctcagaatgtaacaggaaattctggcataaatttgacctgcacgtctaagcaaggtcacccgaaacctaagaagatgtattttctgataactaattcaactaatgagtatggtgataacatgcagatatcacaagataatgtcacagaactgttcagtatctccaacagcctctctctttcattcccggatggtgtgtggcatatgaccgttgtgtgtgttctggaaacggagtcaatgaagatttcctccaaacctctcaatttcagtaagtctgcttcctaagtatttatttcacaaggtgctataagcaaatcttttatccaaattatccaatgtttactgattgctgaaaaaccttctagcagaccactaggaaggagccaaatagaaggctatttttacattttcatgactcaagatccaagctatacttgaagaaacatggtcttagccctgaaactgacccagtctttggaattatccttggatggaggacaatgagatgctgtggatacaaaatagaggatatttcctagcaagaagctttcaactgactaaaacacacacacacacatacacacaaatatatatatatgacaatcatatatacctgcctctcaatggtacttattatgcatatagactcattgtagtcattgttggctgtaaagctgaaaactcagaagatatcttctagttcttgagactctcccaggaaaataagaaatccacgatgtacatatatgacaaccaagttttttttaaaagatgaaattcaagtctaaattatagctcatggaaacaactgcctaaatttaaaacaagctgatcatcagttctatgagcattcagaggcaggcaagatctttgaaagtcatgtaagtcttcctaaaggcactggggccttatcctactgtaaaacagttactgatactgataacagactattggacttagtaaacatgacaaaaatagaagggagggcgatatagagttctctatgaaagaccctcacatttgcagtgactttctgcatgctcagccagtgagagaaccacagcaaattagctgtacccaaaaggagcaggaaatatgttcaagaaaagactgagtgaaggcatgcttgcagcatcttcttgatgtgcttccacagtgatgaaagaagaggttgaaactcagtgtcagctttgccccatagagagctagcctaacctgtaccccacttgtgacaagccaccattcttcctagaatgaaggcactcggttcccacttgatgctcatcattcattggtgtttattctaaggttcatccccttccacaccccacccccaaacccacagccacctgccttctgcttctacggtcccttttccagccctctaactattatttgctccttctgatggcacccatccatctctttcttcctcccctggctttgcctcgtccttaatcctggtggctccctcaggaacttggcctatgggcatactctgagaaacatccccatggctagcacctacaccctacaactgagcctaccccctctcccagtactgatttccttttgctcagatatcgcagccactcagaatctagtaaaagatgtggtcattcagctgtcctggttgctcccactgaaacattttctagaaatatagaagatactctaagccatacctgaagcttatcgccttcaggtaaccaccagcatcaggcttccccacccttgtctacaagtgagcaggcactggtaagctcatcgtgactcacctctactagttaactatcttagaacttgcccaggtactaccatccgaaatgcttcagccctgggtacctcatccaaagaacttgcatatctgtgtccctaaatccttgccctgaccagagataggttagctattatcttagttatggttttattgttgtgaagaaacaccatgactacagcaattcttataaagggaaacatttaattggggttggtttatagtttcagaggtttagtccattatcatcatggcaagaaatacagtggtatgcaggcagacatggtgctaaaaaaggagctgagagttctacgtcttgatccacaggcatcaaagatcatagcttcagcataggagccttcaaagtctgcctccccactgacatactttcttcaacaaggtgacacttacttcaacaaggctactcttttctaatagtgccactctttatggccaagcattcaaacacataaatctatggtgaccattactattcaaaccaccgcagttactgaatctttttgtgtatcaaaaggcagaagtctccatataagagccataacctcctttattggaaatcccaaatagattcaagtgagacaaacagggacacactcaaaaggtattaaatatggtccacaatgccaataattattttccttactattctaggaagagagcacatgcctaaaaattgtatctaaactatggtatattttgatcctaattttcctataatttaggattaaacagaagggttgttctttaaatgtctattaactgaactacttagttttccattaatttccactactgcagtttaggctttcctattctaggaagtagttgctggccttcagggatctgattctctagggaatgaagaaatagcaaaggtttcctaacagagaaagcatactgaaagtcaggatgaggaagcctggggttagctcagtaaaattaataatcaaatactttgaagtatttgttctgtttgctcaaatgagaggtgatctagagagtaacttcaagatgatggtggatggaggaaccattacaaaagctcctctaagttcctcttgttgatttcagtttcctatggctctaggacccagggggagatctcacacacacacacacacacacacacacacacacacacacacacagagagagagagagagagagagagagacagagacagagacagagacagagacagagacagagagagagagagagagagagagagagagaaacagacagacaaagagagacacagagagagagaaggagggaaggaaggaagaagaatagaagaggggagggatgatgaaggcagggaaggaaggaagggaaggagggagggaaggatggaaagagggaaggaaggaaggcaagttgtaaatttgaacctttcataagtgagtttcttactaatggaaaacttgtggtcatttctagctcaagagtttccatctcctcaaacgtattggaaggagattacagcttcagttactgtggccctcctccttgtgatgctgctcatcattgtatgtcacaagaagccgaatcagcctagcaggtgatgagtgtctttgttctgtctaaagatcaccatgtaaaatgtgttttaatgagcatatgagatgaggaggaggaggtagctccgtgttacggtgttagtgttaaggtgttccttagcaatttggtctccaacactgaagaaagtgtttttacatgagaatatgaaacaatgggctttgttgtgacactcacacaagcaaatgctgtacttagctcctcattgtcatctcctgtccctgcccaacacacacatacacacacacacacacacacacacacacacacacacacacataccagttaccctcttcttgataattctcaggagatagatggttgttccatcctcaggctcttacattctttctgccccatcttctgtgaaggtccctgagccttggggtagggatgtgctggtagatatagatgtctcattgatggctaaacaaagtcacttattttcagcactttgaacaacaatgtgtctctgcactaatcactacccacaccaataacaaacctctctggccaacgttgggggcaatataagtctacagatataaatataaatatttagaaggcaatttgataacataaccatttcatagaacaagatcagtagattccctcctagagtctgtgacttcctccatccacttcactgtactaggcatgaatttatccccacaaaacagacctcaaatcccaccaatagagcagttggaaatgtccataaggttacagttgtgcagtgggcatatttggtctagaaagcagatgtggtagcatgcagagaccagtgcttgctaagaccattgatggcttttctctctgagcagcctttcaaacaccttctagcactatgaaagctatctggcagggagagagtttcctgggcagttcaaaattgatttcttcatgacttgaaaccacagtatgttgtgtcttcagcaatagaatctgactatccagttcagatgagcattgttttggatgttcctaggtctctctgacaaattttatttcattcagtttttgctttttttttttctcctaaagtttgttcacatcctctatgacttgtttgaacataatcaatggaattctttgtgtggttcttcaggctgctttcattagaggcatatctattagggggttggggatttgggaataaggtatgttgtcttgggtttggtgtgtgtgtgtgtgtgtgtgtgtgtgtgtgtgtgtgtgtgtgtgtgctgctttcctttttttctgcactgggtgggtcttacatatgcaaagtgacctgctgattgacatgcctgcctcctttcttttatttctttgtcattgttattgttgttgttgttgttgttccggtcacctctttcaatggaggtgtttacaatgttcaggggaagccatgtttccctattcagttcaggtgttcctggatgaaaaaacccaaaaccgggtctttgtgtatcttctatggaactgtcctgtccagttttttccatgcagaagactgtctctccaccctgctggcttcactgttcagcatccctttagctgtgtgcagttgcatttgtcacgtcatgctgttatttcctgagttacaggagttctttctggccctaacttgcctggccctatcttgagtgtttatcctatgcgttcccctaaagtgtccaagaaggcagtttattttcattaagatcttcacccattttaaatagagttttctttacaaggtgcaaagtagagatctagttgtggtcaatacatggatatttaattctctgggcatcatttattctcttcttctctaatatatgttcttggcacatttgttaaaaaaaattagcctatagttgcacgggctaatttctgaatctttcattctatcccattgtcctgcctgtctagttttgtgccagtatcatgctagttctgtagctgtgcctatacaatatgatttgagatcagatattgtgatatatttcaattatgtgggttttttctatatcaattttatgaatttcttcctatttatatgataatattgtcaatttattgagatggaatggaatctgtacagtgcttttggtaatatatccattttccaccattttccagcctgcctgtgagcatggagagtttctccctctagtacctcctttcagttcttttttctcttcagtgctttagtgctctcattttgaggtccttcaccttctgagttaggcatccacctaggtttgctgttgttgcttgatttgggggttttgttgtagtttgtttttgatagtgctagttgaactcaatatgtagaccaggcaggcctcaaagtcacagaggtccacttgcctctgacttccaagtgctgagattaaaggagtgcacactcacgtgccctgcaagacagtgccacgtcattgcttttccacggtgtacaccaggctagctagcccatgaatctgtgaggagtctcctgtctccagctcccttctcgccacagaagcatcagggtggcagattctcctgctactcatctgtattttacattggttcaagaatttgaacttgggtcctggcgcttgtgcggcaagccctttcacccactgagccctctcctaagcccctgatgctcctcctcaagccttacctccttgtctagtctagtggctttccatgggacttttaaaattcaattcattgggttttcatttccagcatttctgtttcttttctttcccaaaatgtgtttgcttgttgggtttttctatgtatgctgttgacttccacattcgtgtcctgaattaatttccttaaataattgggttacttgtttaatgccttcttagaggtcattaatcatttttttttttttttgctagcaggttttttgattatttgccccaaatatctttgtgttcagaagttaaggaattacgatcttttagaggtaccatgctgctaccttgttttaatgtatttcctttgcctctgggtgtggtgtaatatccattgggatggatgtcacttctgcttggcaggcagctttcccctgatggctcagactccaacagcacttaaagtattagccatacaagtagaagcgatttctagatgtgaatgagtagctcgccaagtttcctttctcagtggaatgaacagtttgcaacgagaacaaaggagagatggaataaaggaggaaaaaaaaaactttctttctccataaggcaaccagaaatattcgaaactacataagaaagtcaaggatgatatgtgtacatgcaagaaagaagttggagggggatgcacagaagctaaatatgtgtaagatagtcacattaaactatgttatcagaaggcagagaacaggagagcatagcacatagatggtccccaaaagaatggggtacaattattgatagcaaaaagttatgcggtcagacacttagacatgacagtgagtttggtcaaagaaaggaaccttgacagatccaagaaggagacataccatgaataatcaagccatgtagatataccatgctcatgcatttgagttctataataactttctttgctttgtagattcttcttctgatctccactgcaataagtaaattacttctttttccaagttcaaagccaacaatgatggctgagcttctatttcaaagcttctatttcttatacctaaaactatcatgttaccttttaaatatggatttgtttttattctacatgtgtgtgcattttgcactcatgtatatgtgtactgcatatatatcctggtacccttaaaggccataagaggatgacagaaccactggaactagaattataggtaaccatcagctcttatgtgggggctcagaactgaaccacggtcctctgcaaaagcaccaagtgttcttaaccactaagccacccctccagaccctctggatgttatcttataaggcacaaatttatatgagccgcagaaacatacccaggtaggttagaaagctatgctaaaagaaaggagaggcatatgagatctggagaaagctcagccatcattgttggctttgaacttggaaaaagaaggacataaacaaggaattcgaatcacttcgagaggctagaaatggttctcacttgatagccaagaaacgagcagtccattcagctctacaacctccaagaactgaattctgccaacaggccaatcaggagtgagcatgacctacccacaaagacctaagctcattgacaaccagtaggaatacattcccgaatggaacttcctccaaaaatgacattaaatccacttctcagaagagaaccttcaaaacaactaacctggcattaaaagtcctgtccagggttcatttgtttattctgccttggctgtgtacatttatcctatttaaatactaaaaaggcaataccaagtccattctaggtaatttctttttttttttttcattttttattaggtatttagctcatttacatttccaannnnnnnnnnnnnnnnnnnnnnnnnnnnnnnnnnnnnnnnnnnnnnnnnnnnnnnnnnnnnnnnnnnnnnnnnnnnnnnnnnnnnnnnnnnnnnnnnnnnnnnnnnnnnnnnnnnnnnnnnnnnnnnnnnnnnnnnnnnnnnnnnnnnnnnnnnnnnnnnnnnnnnnnnnnnnnnnnnnnnnnnnnnnntgatggccgactaggcccatctttttgatacatatacagctaagagtcaagagctgccggggtactggttagttcataatgttgttccacctataagggttgcagatccctttagctccttggctactttcttctagctcctccattgggagccctgtgatccatcccattagctgactgtgagcatccacttctgtgtttgctaggccccggcatagtcttacaagagacagctacatctgggtcctttcaataaaatcttgctagtgtatgcaatggtgtcagcgtttggatgctgattatggggtggatccctggatatggcagtctctacatggtccatcctttcatctcagctccaaactttgtctctgtaactccttccatgggtgttttgttcccaattctaaggaggggtatagtgtccacacttcagtcttcattcttcttgagtttcatgtgtttagcaaattgtatcttatatcttgggtatctctaggtaatttcttaccccagacctggattgataagaaagaaaaaggaggagatgtgtaactatgaattattgccttcgtctaatctgaagttatcctatcagtttgcccatttgggaattggcttgactaaaaaatgtatatactagtgtgtatgaagctaatagtttttacagtttgcttccatacagcaaagttagaagagcctcggctcttgtagttactttttatgttttggagacaaagtctcaccacatagctctagctagctatcgcagactttactatgtaggccaggctgtgcttgggctcacaatcacgtacatcactcattcccagctgtttcatctgcatctcttgcctctgcttcttgagtgctaaggctgaaggtttatgctaccatatcaggctagttaaaatttcttaaagaacaagtgtcctttccaaagtgactcatcttcatcatcatttaaacagaaatctccacagagtttaaaaactgaaagttggggatctcatcgcatttctatttcaaaatactgaagttaacgtccattccaaaagtgtgtgtcacacttttgtgtcttttgtctgctttcatttttaaactgaggcttcttgtaatgatgctgcctttgccatgggtatgaaaagatcatttgattattttctgttctatatttatctgggacaccatacctagctataaagcgccatacttttaaagaggaatctaggcaattgtaaaaatctaatcagatttataaagaatccaggagctcaaataagaaacagctcaaatgcctcagttcctttgtatgactaaaacaagatatcaaagactggataccttaagggaaagtttatcatggtttatggtttggggcagaacaggatcaggcagctatgttgtgctgcattgtgacatacagatggtagagcaagaacagtgtatgtgagtgtgtgtgtgtgtgtgtgtgtgtgtgtgtgtgtgtgtgtgtgtgtgtgtgtaagagataccaaggtgaggaggggggcattataacaacctgcttctacagttccaatacctgagacctaactcatggtgcacattaattctcccaagtgtggccccatggccaaatcccctccaatcagttcccacctttcaaggttatggaacttgttcttgcccccacaatgtgcttcaaagtacatgaagcctctaaagttagaaaacagggcatcaaataaccaaagaatgctcaacccgagaaaaggcctaaggaagagagagtctgctctcaaatatcagaaggagtagctgtctccaattgcaaaggtcatactcaaaactgtactccaaaatgcatctcagaaggagagactatattctatgaggacagcagagcaacctgcctaactactaatgctctcttgaaattgtactctataaaccaacaataaataaacacttaggaaatgaggttttgtttgtttttcaagaaaggctgtcctgaactcacagaggtctgcctgccactgcttcccaagtgctgagactacaggctttccctgccaccaccactaccaggccacagtaaatgtttaaatccagtttctaggatcatcaaatactaataaagttttggctatacatttaacaagacaaatgcaaacattacggtggacagaaatggaagtagacctaattagatggaagcatatactgggttcatggattaggagacaaaatattattaagatcacattttttttccaaattcatgaatggattgaagtaatctaaatccaaagcctggaaggtttattagtaaaaattaaaaggccaaatgtataaagatagagaggagtgcaaataacccacagctggtaaaatgattttgaaaattaagagcaaaattggagtcagacatggtgatacagggctataatcctagcagtcaggagatggaaacaggaagattgagtttaaggcctgccctatatggtaagacctgtatctcataaaagaaacaaactaaataattccaaaagagtggtcatagacccgtgtggcactaataaaaggacagagatatcagtcaatgagggaaaaggggtaaaaaaagaagataaaatcaaatggttaattgcttttgataagaaaaaaataccaagtaattccatgctgaaagcgcaatattttcaactattggtattggaatagctagaattcaggagggaaaatacgatttacacaaaataagataaattatagactaaataaaggagctgaagttaaacatttctgaaagaaaaaaaaatctttgtatctttagattaattaagcaagtacaaacaggaaagggtaaatggatagagtaaacttcatcaaaattaaaatatttgtccgttgactttgtcaagaaaacagaaagtcacaaacttggagaaaatataaatatttctacatatacacttgacaaaggaaatatatatatagagagagaatatacagttacatgttactaatcagagacagtccatctgcaaaaacaggtacagtcatgtagtgaaaaaccacctagccatagaaaccaatttccaaagctgtctgctgaatgaaggaaagagaagactgcagtgtgtaatcccgtttatctcaagttcgagataaagaaaagctaaacaaatcaacgatcaggaacagcagggtgggattaaaggggttggctgaacagatgcagaaaggaatctccacaatgctttctgtctcacttgggccagagttatataccatgatcgtttgttaaacttatcaaatcttttccatggctacacacccatgagggtggtcattcttaaatgtgtacgcacatagaagagaacaccaatgacaggaagtgttctggaagactctgggaaaggctgcatcataaaagcaccaggatattgttgagtgctccctgtgttttcatttcaggcccagcaacacagcctctaagttagagcgggatagtaacgctgacagagagactatcaacctgaaggaacttgaaccccaaattgcttcagcagtaagttcattcaaagagcaactcggccttcggagagctagctggccggaggtttcctactttagcctgtctgtgcaaccaacacatgatagtattgggcagcaccatctaacccttctaggcatcagccttggggttgattttctctcctctatcttctaaacccatatgtacaccccctccacagacacacaaaggcaactctttcctggtcattaaatgactggtaaaactgcatgtgttaccctcatgcctctctatttccataaggataccactatatgagggtggttttatgtccaacattagaagttaagatacagtcatcaaaaggatacttttatcctggggatgcagaaaaacttcccagcccacacttgtaatttctctctgagacccaagagtctaatgcctcatcctgtcccctctttctctgtccgagggctttcctggcttctgaagttgttttcgatctctttcagaaaccaaatgcagagtgaaggcagtgagagcctgaggaaaggtgagttgtgactgcatctctgttgaaacaggtttgatctccccagtgcctgtaacttgcgcaggctttaactcctgagacacagcagggacttatgataaagctagccgggatgggggagaaagcaagggaaagcagggaggaaagtagccataaacaggtggcagtgtccgctgcacagtgcccaagggcatgccgagtcagtcaaggtcaaggaataaacagtatatagggttgagatttggcaagcatagcccagagtctcactcaccatggcaactaaaagtgaactagaacattcctggtatacatagaatgaataaaacgaggaagcagagagtgagaacatgttccctttaaccccagtgcctttgcacctgttgtgcccagcacttgaaagtatcttctaccatctctccccctcgttcctcagctcttgcccttcttaacaattaacactttcttaaaagcctaaacttactcatgaccacctgctatattattctgtgaatccttgcttacttactggaaaccatcttaggaaccactgttactcactgcactctgtagatggcaggaacctcagcagctgaaaacagtgctgtgctctgaccccagaagctattacaatgctgggcatatttaaaggtttctggtgaccaggcttctgacagcatgacacaattgggttgtctgtccctccatccacactgaggagctgggagcttgggaacaccaagacattgactgtctggttatggggatgagcctggttgaagagacaggttataaatccaggatgcaggggccataaagagctctgcacttagcaggtgctagcaagaaatttcacccctggagttttgcataaaaaagccactgttgaggtgctactaactgtaagactgggttcagaaatgatcgggaaaggccagcagagggaagaaatagaggagttggcacaatggcagagcaaggaccagaaagcatcaggccaaagcaaagggtggttgttgctggaagcttgggtaacagtgtagcctggatggctttcctcgggctttctcttcctgtcttacaatactttgtttctatttatcaacattatgtggtctcctacttgtatcttatctttgaaatctcacccaacctttcttctttgtttgtttgtttgtttgtttgtttttttcagagttaaaaattgctttgcctgaaataagaagtgcagagtttctcagaattcaaaaatgttctcagctgattggaattctacagttgaataattaaagaacaaaatacacaacagtgtccatattttatcctgtttcctttccaagtttttgggcaatgtcaattgtgtcccctatgccaggagcagacatctattttgtcttgctttgtttaactcagtgcacactcataggccaagagcactgaaatggcttctttcccaggaataacattttggatcaatctctcctacttgagatcagattcttcttctaattttgcatagtgtgtttttatatggaactccttgttgtaggaatactggcttttatctgtcttgcacacttgcatacttatatacttatacctggacagctacctcttcagtcaggatgggagtggtatatttggtgatgttatttgatgtgttcgtgttgctatcttaaaacagcaaagagcatatactatagtagctcaactacaatgatctagagaaagacccagcacttataagaaacactgtccctccatcagggtcaataatgaatacaatgacctaagtaatatacaggtgacagcaacagcacagagttctcagtgctggcaaatcaagaaacacaaatatggaaccatctctagatccaagagccactcctacctgggctgccacagatactggaagaatccacctgcctggccagcaagtcacaacttagcaggcagcactgaagaaagcaagatgtactgtatgcccttttaagaaaatgcctggaaaggtctggagaatgctgtgcaaggataagacagccaagcactcaaaaccaggagacatcactagaatccaaccaacaaatgtttatggaaggactgatctgcccagtccattgaaaagtcaagaggtcagagatagaccagtgtgtgtctcaatggatgtagatatcagccacctcggtgctcaacaggtattttatgatctccttgtttcaaattcatctagatgtagaactagggagagagcagtcacattgatgaaaggctaggactctttcagctcatggcttgtgtggaaggagggaaagcagaaatcacaacactctgagactactgtagtctgcagatacctgagtgggtgtggcttggcctttcaaaggacaaagagcaactaatgctgaaagcacatagtgtatctatacggcatggaatagtcatcacccagacttaaagagaactttggcaggtctgagcagcaaaatattgttgtttccattttacataaagggccctggagggctatagactattccgctggcagggctcatgcttgtaatgtgtccatcttgattcaccctgtgcagactcttaagatctggccagttaccaacatgttctgtacagagtggatttcaataaagttttcttgaattttttcaagtatactttttttttgttccatgtcagtagtaatattatgaaataatgttcctattcacctctcacatctctgtggctaaaagtctctgactcctccccaatcctcctttctttccttcttctctttgtactgtataagaaatgaggtttgtttgtctaaatatatatctcaataatgagacttctctaaaaattgagtaatatttattttctgagtgttagtaggaaccctcagaataaggaaacaaggcttttcagcttgttatttttcaagctgagcaactttaaaattatgtgcatatatatatgagaaaaaaagcttaatgtaaaatgattgcctgaaaacacacccttgataagttaataatttaataatatatgtcacacacacaaaaaaaaaacacaagaagagccaattattctgcaacagagagcttgtctgaactatggggggcagaactatgtctaagttcttcactagagaaacccaggtactgaagacagtgcctcaaaatacattttttgaagactagatgaaacattaatacaccctttagtgaaaacatctctccgttgcttattacattttctagacttcttgtgctccaagtgtgagggctaagaaaagcaaaagagagctgcagccggtcatgagggagcacaccagcaaacactgcctgttggtcgtgggctcggctctttgatattactgttccacccagtcctcccaatgactcttgagttgtagctcatgaagcactgtgcccactttgctcatgaataaatctaagcagagggatgtcagaggaatttggtgtctcctgtgaaccctcttgtttagccccccccaccccattcacagacaccccactttctattctctccagacatagaagaaacagcattttgttggcccaggttgattacatgagtccacatcctgtgctacccactccaagttcccagaggaggtaaccatgaagtcagaggctgtggctaaggaggcacgtgaggagataagtattaggagattctgtcatagggaaagtgaaacgtagaggagtctgcacatcatattcattactgatcctgaaagcctcccacggcttcctctgcctgccatttgttgtcctccagttgacatcttccccaccccctgccttttgagacagcttcacctatgccctgtcttcacattttctaatctaagtctgaaagccaagagtcattttgacaccaaccctctgacattccctcagaacccacttcaaacctaccctccttctggctcatcaccagatgatgatggttggggaaagcactcctccagggtggacttgccctgtctactcattccaactgatcagtccgtttctctcactgtcctttaatcaaaatgcccaaagaaatggaactatccctctcattcctttttccctagacatgccactctgatgttacaaacccatctatagacacacgcaatctctatctatctatctatctatctatctatctatctatctatctatctatctatgtgtacatgcatacacacacatgtgcagcctctcttcgggcagaacattcctgctaggatgattaagaaaagggtcagtctcacatgtgatctgacagcagctttggtgtggttatctgcaaaaaaattcagcatgtacaaggagaacctactgaggccccacccttgttgaggagttattgggtagtgatgtttgctgaaagagtaaaagtttcttttctttattggggctggccattggtaggtttcccatgtcccaggagatgatttcacacccatatgtgtatagaaggagcattagactcagtgtgttaaaaataaatatataagcaaataaaattaaaagactaatgacaacaaaaataccaagataatattaatttcctgattcaagcagatctgggtttgaatcaccttggataaattacttatttatttataaaatggaataatggcaaaaccctgtgcatctttattgtatccatgttcaattttaccaatattgttagtgtgatgcttagcttcggctattaacttaatgtgacttagagtcaccttggaagagtctgcataagatagtatccacatggttgggatggcctatggttgtgtctgtggggaactgtcttaagttaattgatatgtgaagagccatcccaccatgggcagcactagtccctaggcagaggctcctgaactgtataagagtggagaagcctagttgagcaaaagcaaacaaacaagcaggtaagcatgcatggatctatttctccctgctcttgactgtgagtgtgatctgactgttttaagactccaccttgaattccctacggcgatgaactataacttagaattgtaagccaaaaataatccccttctcctgtaattttctttgtgtcagagtattttatcacagcaacacaaatgaagttagaacagttagaacttaaagtgaaaccaccatgggttttctcaatgttgacctattcaccccaggagataaaaaagatggattcccatgctgttcctagacacatttctaagccttcagtcttatatccaatgtcatcaacaatatgactttaaatctaactttttacccaccttattttccccctcattctattagcaaaccatgatgctactagatgtaattggcttatattatctgagttgtcaaccacctatgttatcccttcattctgaaatacttctcatcatctgtctctgttcattacagtcctactcgtttgtggtgtgtgtgtgtgtgtgtgtgtgtgtgtgtgtgtgagagagagagagagagagagagagagagagagagagagggagttaaggctcattcatctggctaagctggatgtccagagatccccaggaacctcctgtctccactttatccatactgagattataagcatcaagctgctgggactgtcctaccatttttatatgtaggttctgaggattcaaactcaggccctcaacctacacagcaaacactttactaccctactgagctattttcccagccttctgttttgctcatttttaaaacaaagccttgcatagaacaaatcctattagaccatgcactacactcctggcaagactgcacatagttggtactgtgtccttgaatcacagacagcttccgccaagagtgttcagtttctgtctcagtgctcacctttcccacttggattcttgactctgtccattagtcaatatttagaagggcttcagcctgctgaaggagcacgaggaccctggacaagtgagcaaattgtgtagggtacagaagccaccctaaagctcttgatctgggggggggggcttcatattctacagtccaacccttctcctgccatcttggtgtctgacctctgcttgctgtatcacttggccctgatcactaactcctccttgatttctatcctcatttgctttctgtgactataatgaaaccctgaccaaagggtttatttggcttacaggttacagttcatcataagggaagtgaaggtaggaattcaacacaggaacttggaggcaggagctaaagcagagagcacagagggatgccgcttacagccagctgtcttttttgtacagcccaggggccacctaaatatgacctaaatatgatttatgagccccaaaaatctgctctgatcaaacagggcagtcatctcaggggtatgagtattcatatcagtattcacaccagttctgctctccccagccagtggtaacatcaggataatagaatagataaccctctattcaggaggaaaatctgtaccgtctatctagcactccattttggtaaaatattaagtaaagaaaaaaagacttccgtatcatggtatcatatatttttaggaatcgaaaggggggagtcccagttgtgctttatcttctcagaagatgcaggtgaggcactacaggtattgagaagcagggtctaaagaggaaagacataaaaaacaaatatccagaggcagggatgcaggaggatctgtgtggtttgtcaagggtgaaacagaaaagaaaaaccacccatttacagcaagatttctgggactgactggactgttttgcagcttcttgtaaagacagtcatttctgaatgttccctgtgaatttttaagaaggtattttcttgtgaccagcacattaaagataaaaggtgtgaatgatgaagaagacagcaaagagagccaaatcagtaggttttgcatattacgaatcagcacttaagagtccccacttttcaaagtgtttcctatttatccacaatttcaattacagtaattgattaaactcttactagcatccgtgagaactcacacctgacataccttctagtattcttaagtacactctatacatgaagtgtctaattcagaatggtaaggttgaggcaaccatagacactgtgtctactaatgatgtttccaggacaaacaaaatgcccccaaattcctcattctagaaccacccccccatctcccctatttatatatacacagacacaatggagtattttttataaacaagtgtgacatgataaaattattatgttagtattttgaaaacattcctttgaaaaatagacatgatcctggcttagaacatggccctctaccctagccatgctgatggcttgaatgtggctgtgatttctcttcttatgatttgattgtatatataccatcgatcccataattacacactgtgaattcatgaggttcctaactgccagaattgagagcataaaaaagcattaagttgttcctacagtctattgcaaatggaagaaatgtgcagagcatccggaaagccatcctattttaagaaacagccaccctgtttaagaaacaaagactacaaagtaatcaccagatagcagagaacgacaggagcagaactccatttttatctttgtagggcactttacaccctactatgtctgaccttccatgattctattatctaggagagctagaaagggaatattgacatggatacatctaatctagcaagggcatggcctttcagccacatatgacagtgtcgtgtgacctgactgtgaacttcatctctctgactctggttcctcgtttgtaaaacagagtcaataacgcctgcttacatcatgagatcaaagttaatcctaaagatgtaatggtccagtcactaagtagcagaatggtttcctagcatgtgcaaggccctgggttccatctccaggactgctagggaacaacaacaacaacaaaaaaggtgatgactatagttcaaatacggagaaaagaaagtaagaggaggggagagaaagtgaaacagaaagagccttatccaaggagcagttagatcatttgtttcggcagggtggggctgggggtggcgcatgagaattagtgccataaaaggagaagagcccagcccacactgcagattcattcatgttactcgaaacccagaaggtctgaacatccttttgaaagccagaagtattcccacaatccctcctacaccagtgtcaaggtaggtctgtctcttagcccctcaaccagacatgactcatgagctcactgaggactccaggcttccctaccccttccactgaggccacctttccagaatctctctatcttccttttgtcatttcctccctgacctccaagacttctctgttaaagtgacaagaggctctgtccttactgaatatagcacacatttatatttagtaattaagtggttaggctgaagaaaaaggagaagggtccaaagctcagaggctatcaggcaagattatagaagaccattgtctagagcagtggttctcaaccttcctaatgctagaacaaccctttaacacagttcttcttgttgtggtgacctgctcccccatcataaaattacttctgttgctacttcatctgtaactgttctactgtagtagggaatttaaatgtagatatgtgtgctttcctatggtcttaggtgcccctgtgaaagggtcaacccacagactgagaaccactggcctgtggggaagccatgtctcggggcagggaaatcagcaaggaagctggcccgactaggctaacaagatccgaatccctgctaatgaggtaggacaagccacccgacccttacacgtggatctgggtgcctaagtatgcccggccagataaaggacaggatggacttcaaaacagatgtgaacagagggcagtggaaactgggggccacaaagcgttctgtacgaaatcagagcaagaaggatgaaatcctcaaacctgacattggaaagtctgggtaatcctgatggagttggcagactggagaaagagttagaaaccatactcttcagtttagtcaaaaggtgaaaggatcttttgtcattcacagatccagcccaggaccagggcaggggttaacatcaggtacgaaccattggacaccaagagcagagcagggtatagcgcctgacttcttcagatcattgccaaccacgcatacagctgaggcttattattagaccatgtcaggctatgcccctgtgttgactgttacacaaactagttccatgctgtttccaccagtccacctgcccccttttaaccacacacttcaaatatttgcccccgggcttcagaccttccaacctcatcaagaatagtcaagctgtgtccatttagtgggaagacaacaagtctgtcctactgtgagaaaagtgggtaggaggacccaaacaaatgagttcacatacttcatagtgatctactcgggtttttttctccggtcttcaatgtagttgttggcctccaagactcttagtgtaagggttatatttaagactcctgctaggtaattacagagaaaagaaggaaaaggaatgccacctttaatgttaaaataatccccgtccagcctggccatgcatattaacaggcacgaatgtcctcggggcttaaagagttctggttagcaagagtcacagggaagggggttttgtaagaattattaaacagagggcagatctgtgcatcttgagaattctcattctctccaaggaagcacctataattttgctctttgggaggaagcattggaaacggttgtcatgtctttccaagtctgggtcaagagacagcagagggccattgtctctatcaccatcagtgccagcagcagcactgagcacagagctgggcaccatgtgtgataacagctgtattggaagctagagaaatggtacagcacttgcagaggacctgggcttg

SEQ ID NO: 545 - DNA, 945 bp, Mus musculus
actccagcaccatgggcttggcaatccttatctttgtgacagtcttgctgatctcagatgctgtttccgtggagacgcaagcttatttcaatgggactgcatatctgccgtgcccatttacaaaggctcaaaacataagcctgagtgagctggtagtattttggcaggaccagcaaaagttggttctgtacgagcactatttgggcacagagaaacttgatagtgtgaatgccaagtacctgggccgcacgagctttgacaggaacaactggactctacgacttcacaatgttcagatcaaggacatgggctcgtatgattgttttatacaaaaaaagccacccacaggatcaattatcctccaacagacattaacagaactgtcagtgatcgccaacttcagtgaacctgaaataaaactggctcagaatgtaacaggaaattctggcataaatttgacctgcacgtctaagcaaggtcacccgaaacctaagaagatgtattttctgataactaattcaactaatgagtatggtgataacatgcagatatcacaagataatgtcacagaactgttcagtatctccaacagcctctctctttcattcccggatggtgtgtggcatatgaccgttgtgtgtgttctggaaacggagtcaatgaagatttcctccaaacctctcaatttcactcaagagtttccatctcctcaaacgtattggaaggagattacagcttcagttactgtggccctcctccttgtgatgctgctcatcattgtatgtcacaagaagccgaatcagcctagcaggcccagcaacacagcctctaagttagagcgggatagtaacgctgacagagagactatcaacctgaaggaacttgaaccccaaattgcttcagcaaaaccaaatgcagagtgaaggcagtgagagcctgaggaaa

SEQ ID NO: 546 - protein, 304 aa, Mus musculus
SSTMGLAILIFVTVLLISDAVSVETQAYFNGTAYLPCPFTKAQNISLSELVVFWQDQQKLVLYEHYLGTEKLDSVNAKYLGRTSFDRNNWTLRLHNVQIKDMGSYDCFIQKKPPTGSIILQQTLTELSVIANFSEPEIKLAQNVTGNSGINLTCTSKQGHPKPKKMYFLITNSTNEYGDNMQISQDNVTELFSISNSLSLSFPDGVWHMTVVCVLETESMKISSKPLNFTQEFPSPQTYWKEITASVTVLLVMLLIIVCHKKPNQPSRPSNTASKLERDSNADRETINLKELEPQIASAKPNAE

SEQ ID NO: 547 - DNA, 85121 bp, Homo sapiens
tgaaaaaaatgtatattgtgttgatttggggtggagagttctgtagatgtctattaggtccacttggtgcagagctgagttcaattcctgggtatccctgttgactttctgtctggttgatctgtctaatgttgacagtggggtgttaaagtctcccattattaatgtgtgggagtctaagtctctttgtaggtcactcaggacttgctttatgaatctgggtgctcctgtattgggtgcatatatatttaggatagttagctcctcttgttgaattgatccctttaccattatgtaatggccttcttagtctcttttgatctttgttggtttaacgtctgttttatcagagactaggattgcaacccctgcatttttttgttttccatttgcttggtagatcttcctccatccttttattttgagcctatgtgtgtctctgcacgtgagatgggtttcctgaatacagcacactgatgggtcttgactctttatccagtttgccagtctgtgtcttttaattggagaatttagtccatttacatttaaagttaatattgttatgtgtgaatttgatcctgtcattatgatgttagctggttattttgctcgttagttgatgcagtttcttcctagtctcgatggtctttacattttggcatgattttgcagcggctggtaccggttgttcctttccatgtttagcacttccttcaggagctcttttagggcaggcctagtggtgacaaaatctctcagcgtttgcttgtctgtgaagtattttatttctccttcacttatgaagcttagtttggctggatatgaaattctgggttgaaaattcttttctttaagaatgttgaatatcggcccccactctcttctggcttgtagggtttctgccgagagatccgctgttagtctgatgggcttccctttgagggtaacccgacctttctctctggttgcccttaacattttttccttcatttcaactttggtgaatctgacaattatgtgtcttggagttgttcttctcgaggagtatctttgtggcgttctctgtatttcctgaatctgaacgttggcctgccttgctagattggggaagttctcctggataatatcctgcagagtgttttccaacttggttccattctccccatcactttcaggtacaccaatcagacgtagatttggtcttttcacatagtcccatatttcttggaggctttgctcgtttctttttattcttttttctctaaactttccttctcgcttcatttcgttcatttcatcttccattgctgataccctttcttccagttgatcgcattggctcctgaggcttctgcattcttcacgtagttctcgagccttggttttcagctccatcagctcctttaagcacttccctgtattggttattctagttatacattcttctaaatttttttcaaagttttcaacttctttgcctttggtttgaatgtcctcccatagctcagagtaatttgaccgtctgaagccttcttctctcagctcgtcaaagtcattctccatccagctttgttccgttgctggtgaggaactgcgttcctttggaggaggagaggcgctctgcattttagagtttccagtttttctgttctgttttttccccatctttgtggttttatctacttttggtctttgatgatggtgatgtatagatgggttttcggtgtggatgtcctttctgtttgttagttttccttctaacagacaggaccctcagctgcaggtctgttggaataccctgccgtgtgaggtgtcagtgtgcccctgctggggggtgcctcccagttaggctgctcgggggtcaggggtcagggacccacttgagaaggcagtctgccggttctcagatctccagctgcgtgctgggagaaccactgctctcttcaaagctgtcagagagggacacttaagtctgcagaggttactgctgtctttttgtctgtgccctgcccccagaggtggagcctacagagacaggcaggcctccttgagctatggtgggctccacccagttggagcttcctggctgctttgtttacctaagcaagcctgggcaatggcgggcgcccctcccccagcctcgctgccgccttgcatttgatctcagactgctgtgctagcagtcagcgagattccgtgggcgtaggaccctccgagccaggtgtgggatataatctcgtggttcgccggtttttaagccggtctgaaaagcgcaatattcgggtgggagtgacccgattttccaggtgcgtccgtcacccctttctttgactcagaaagggaactccctgaccccttgcacttcccaagtgaggcaatgcctcgccctgcttcggcttgcgcacagtgcacgcacccactggcctgcgcccactgtctggcactccctagtgagataaacccggtacctcggatggaaatgcagaaatcacccgtcttctgcgtcgctcacgctgggagctgtagaccggagctgttcctattcggccatcttggctcctcccacctatttctttttcttacccaattgtttggctagggcatccagcactgtgttgaatagaagtgatgaagtaggcagacttaccttgttcctcatcaaggaaaagctttctgtttttcaccattaagtgtgatgctagcagtgggattttcacatatcccctttattatgttgaggtaaattccttctttccttctattcctagtttgttgagggttttatgatgaaagagtgttaaattttaccaagtattttttctgtgtctattgagatgaccatatgattttaatgatgtaccatactaattttcatatgttgaatcatctttgcattccagggataaatcccacttggtcatagagtataatccttttaatgtactatagaatttggtttgctagtattttattgcagatttttgcatcagggatattggcctgtagttttcttttcttgtagtgtctttttctggctttgctgtcaggttaacactggccttgtaaaatgagtttggaagtgttctatcctcttcaaatttttggaagagtttgagaaggattagtgttaattcttctttaaatgtttgatagaattcaccagtgaagtcatctggtcttgagcttttctttaatgggaagcttttgattgatgattcaatctgattactagttacaggtctgttcagattatctatttctttatgattcagctttggtaggttctgtttctaggaatgtgtccatttcttttaggttatccaatttgttggaacgtaagtgttcacagcagtctcttacaatatttttttaatttctgtggcatcaattgcaatgtctcctgtttcatttttcatcttatctgagtcttctctttttttttatagagacagggtcttgctacgttgcccaggctggtcttggacacctggcctcaagtgatcctcctaccttgggctcccaaagtgctgggattacaggcataagccaccattacgctttaatcattatttcctttctctgctaactttgggcttagcttgttcttctttttttagttatttaacatgtagggttagattttttatttgagatatttttaatatgtttattgttatcaacttccctcttagtattgcatttgctgcattccataaagtttggtatgttattttctttgtttctagatattttctaatttcccatttgttcaagagtatgttgttgcatttccacatatttgtgaattttccaattttccttctaatattgatttctggtttcattccattgtgattggaaaaggtacttggtattatttcaatcttaaatgtgataggacttgttttgtgatccagcatgtgatctattaaaaaaaaatgttctgtgtgttcttgggaaaaatgtgaattcttctgctattaggtagaatgttctgtgtatgtttatcaggtccatttggtctatagtgtcgatcaagccccttgttaactaattgatcttttgtctagatgttctaacctttattggaactagggtattaaaatcctctattattatcatgttgctgtctatttctcccttcagttctgccaatgtttgcttcatatacttaggtgttctgatgttggtgcatataaatttatcattgttatatctttctggtgaattgaaccttttatcattatatgatgtctttctttgtttcttttgacaatttttgatttaaagtctgttatggtctgaatgtccccaaaaattcatgggttgaaacttaatccccattgtggtggttttaagaggtggagcctcttgggacgtgattaaataatgaaatatctgccttcatggatggattatagcctcatcaaatgcctagacagaactagcttaggcccttttttctcttctactcttccaccatgtgaggacacagcaattcatctctttttgtccttcttccaccatgtgaggttacagcaagaaagccttcacaagacttgaatgccagaacctttgacttcccaatctccatagctgtaagaaatcaatttctgttatttataaattacccagtttcagatattttactacagttgcacaaacagacgaagataaagtctattttatcttttgtaggtatggctactcctgccctcttttggttatcattcgcatggaatatttttccatccttatactttcagcctatgtgtgttcttaaatctaaagtgaatcttgtagacagtgcatagttggatcttatttttttaaaactcattcaactgtgctatgtcatttgggcagcttagtccatttatatttaaagtaattattgatagaaaaggggttactatcaacattttgaaatttgttttttgtgttgtagctattctgttgctctttttatctcttgctatcttcctttgtgtttcatggattttttatggtgacatgattttatacctttcttactttcttttgtggaaattccataggtattttctttgtgctcactgtgggacttacataaaacagcttatagatataactatctttttaaagccgataaaacttaaattcagcttcatataaaaactttgcttttacttccccccccccacagttatggatgtcacaaattatatttttaataatgtacagccattaatatatttttataattataattacttctatgcttttgtttttttttaacttttataccagaattaagtgattcacacaatactgttacactattacagtattctgtacctgtctatatatctatctttaccagttagctttatactttcatgtttttgtattgctgtttagtatctttccatttcaacttcaaggactctctttagcatttcttgaaaggcaactctagtgatgatcttattctgcttttgtttgtttaggaaagtctttatttctcatttttgaaggctagttttgccagagagagtattcttggttggctggttcttttctttcagcacttttaatacctcatcccattcccttttgtccttcaaagtttctgctaagaaatccattgctaatcttataggagtgtccttgtatgtaatgaactgcttttctcttgttgctttcaaaattctctttttggctttcgacaatttgattataatgtgcttcagtgtctatttgtttgggttcatcttatttaggcctattgggcttcttggatctgtagtccattttctccctcagatttgagaagttttcagccattatttctttaaatgagctctccaacccttctctttcttggactgctctaatagatatattggtacatttgatggtgtccaataagtctctcaggctttctttacttattttctttgttgctatttttattgttcctttttgctcctctggataatttcaaatgacttgtaattgaattgctgattatttcttctgcttgatcaagtctgtagttgaacccctctagtgaatgttttagttcagttaaaattgcattctttggctccaaaatttctatttggttccttttaatattttctatccttattgaatttctcattggttcatgcatcactttcctgaactcattgagcatcaatatgatggttatttagaattttttgtcagataattcatatacctctgtttctttaggatctgtttctggagacttattttgtttctttgacttgaccatttcccgtttcttcatatttcttagaactttgtgttggtatctgcatattaaaaaacaaaacacacaaacaaacaacaacaacaacaacaaaccagccacttcttccagtctttaccagccggctttgtactgggaaagaccttcataatctttagcctggctaaagattctggggacctctcaaacattttctgtggatacgttttctctgggcttgtgcacgtagattcctaagtagagagattttctggcttctcttttttaagagttcattatctcttgctccatctgttgtctatcttctatagtgtgtgtcctccaaagtagcagcacactgtccagctctttttttttgatcttggcagcccctagtcttctagagtatgttagaccttctctgccttaagtggggctacatggaaaccagtccctttggcagccctttgaaaagccagaattctggacacatgttctatttttctcttgccctcctgaagaagagggcactgagctgtattggcctctgctgtgccacaggtcctctgaaatagcatcatgctatttagctctttggtttcttttcatggggccccaggcatctagagtatgccagtgattcaagacagacaagaaagaaaccaatcctatgggcatctccccatttccccaaaaagcaggaatattggttgcatgcttcactcttttccatgtcccctagggataggccactgaactgtatcagtctgtatctgctgtagcaagaaccctctaggacagcaatatatcacccagtatttttttgttctcagtgtcccccaggcatctagagtatggtgggtcctataaactctctaagacaggtaagacagaggctagtccctcaggcagcccccaggaaagtcagaactttggttttttgttgttgttgttgttttgagacggagcgtcgcttcttcgcccaggctggagtgcaatggcgcaatctcggctcactgcaacctccgcctcccgggttcaagcaattctcctgcctcggccttccaagtagctgggaggaatgtgccagcatgcctggctaatttttgtatttttagtagagatggggtttcaccatgttgaccgggctgatctcaaactcctgacctcaagtgatccgcctgccttggcctcccaaagtgctgggattacaggcatgagccaccgcgcccggccaaaaagtcagaactttggatatatggtctagtcttctcatttcttcttcagggagaagccaaaaactgggaatttcctcctaaccatgtggccctgtgccgagaggacagactatggtgagggtataccgtgaattttcctactggcttcagtgcagttgttttttttgctcacctagtgtgatgtagcctcttagccagcttctggatttctcacaaaaggaattggtctgtgtatagttaagttagtgtctctctgggagggagcacaggctggggtttctcattctgccatcttgctgacgttcactgtggttttgatttgcatttccctaatgactagtggttttgagcacattttcatgtgatattggccatttctatatcttccttgaagaaatgtctgttcaactcttttgcctactttttaattgtttgttgtttcttctgcaaagttgtaggagtttttttaatcatatattctggatatcaatccctaaacatttattgttttaaggaaataaattttgagataatttgttatacagcaatggataactaataaatactaaaaactcctaaatgtatatactaaatatattaattagaaaattgtaatataaaaatactaaaagctaaaactgtctgatattaggaagataattttactacaatatataccttttttgtgtgtatgagacaaggtctcattatgttgcccaagatgttctcaaactcctgggttcaagcaatcttcccacctcagcctcctgagtagccaggattacaggtatgtgccattacagccagctttcacagtgtatacttgatgtactattaatgtactatttaatgactactaaaaagtttatgataacaggagaaaatgcttatgctatcttaaataaaaatttgagtgtatgcattgataccaagaaatggaaatttgagtgtgtacactgctaccaagaaactgaaaaatgacatcccatacctttaatatttaatatttataacaaatgaggtttacatggatttttttatctcatcttatttctgatgtgttatgtagttataaatactattttatttgcactcctgctctgcaataattttgaagatagataacttatattattgctgtcttcattttttaaaattctcaaatccagatgaaattatcaaagttgataaaataatcattgttctatcttcttatttgaagattaataattgtgttgattttgcttccttgctctagttagcagtgatgtcatctgctatttttaaacttccttgaaataatatatgtaatctacttctaataagtttttcttatttagcattttggtctaaactaatttataattatttagccttatttctccatgtttaacttgctttaaagctcagcactggtgttttcagccatggcttctccattttaaggctattttaattcatttattattctggaatatatccttaaataatttatttaggaaggctgtcttggtggtggtatttctgttgcagttgttgttttcttgcctgcttggtgacatatttctattgacttgacacttaactggcatcttatctaggtagataatgctaattcaaaattctgcagatattgttctgttgttttttgccatttagggttgagtaagatgccaagttgttttttgtttctctgtagtcattctgttttcattttgtttttagctttgcctttggaatttaaaatgttcaaaatgatttgtctggatgagaatcgattttcataacttttgctttgatacactaaacagtttgagtttctagatgatgcccattttaattcatacgaggaaatatcttctagtatagtttctgcttgattaattctatgtttgtctcttagggacatctattaattttataatgctgcctttttttcagacttctgtttcagaatattcgctttcatcaatgtaatccttggctatagtaggaatgaaataataaaagcagtagcttctgtctgccctccttggttatgcagtccttacagaacatctccccatctcccatccccccaccccagctcagtgaaactctccacactttggttgtggaaattggcagggttaggtggctactcactcccaatccacatccacaataaatcactttttattatcttatcaaaatctgtagaatgcctctttattctattttgttgctgcggaggtttgttttctctttctaattattttattttctaggttttttgagggaatttcaagaggggagattttttattcaggctcatcttaacgtcatgtctggaactcaagctactgaattatatattctttaatacatatagacctacgtcaatgagtttaaactgcaaggaaagggttaaatttcttcctcaagtgtggtcaaaatctgtagagaaaagaggaacagcttctcttaaagaaagttagctgggtaggtatacagtcattgccgaggaaggcttgcacagggtgaaagctttgcttctctgctgctgtaacagggactagcacagacacacggatgagtggggtcatttccagatattaggtcacagcagaagcagccaaaatggatccccagtggtgagtaataattcttattctttgcagagaagttatgagttgtgactgcagtgaaaggctgaggttgaagatggtgctttgatgtgtgtccttcacttagttcctaagtggagaagctttctttttctacaaaagatctttggcacataaaggcaagaattatttgcaatgcccaaagcagttcattggtggtagttatatatatttttaggtgcctaattttggttttgtaaatctgttattcaaatactgaatgttacagtcattgattttagtgaagaatcaggaatttttaaaatatctgcataagaatgacaaataacagggaatatgttttttgtctaccagggtcagtttggtctgagggtggaggaatgagatagagaaggtagagggagagagatcaagaaaaagaaagagaaaaaagaggtataaggagaaaatgcaaaactcagttaatatgtcataatcaggccatgggagattctgggcagggttgggtagtggaaggaggtagagtgattaaattagttaccatgtattgaacatgcatgatgtgctgggtactttactagtgctatttcattgaattttattcttcacaatgacttttggaaagacatcatcattctttttgacagatggggtaactgtggcttaaaaaacttgcccaagttcacactattcataaggggtagagctaaaatctttcctgcccgcttcgtggtgcgccagaaggtttctccatgctgtggagacttcctggaaggagtcacacccgcccttctcttgggtggtggcagctggcgccagtcactatgtatttatttatttttaattatttatttttgaaacagagtctcgctctgtcgccaagctggagtgcagtggcgcaatctcagctcactgcaacctccgcctctcggattcaaacgattctccttcctcagtctcctgagtagctgggactacaggcgcccaccaccacgcccggctaatttttgtatttttggtagagacggggtccaccatgttggccaggatggtctcgatctcttgaccttgtgatctggccacctcggcctcccaaagtgctgggattacaggcgtgagccaccgcgcacccggccgtcactatgtatttataattactgttctttgaaaatcgaagtaactttcatctacccagtgcttactggtttgagaaaaagctttgttgcttttatttcagaagattaaaatttaattttccagtaaagattccttttgctccagtggaattttgaagcgttatacttgtatgaagaaaaaaagaatttcaaaatttataatttttgtggtaccatagaggggatactacttaattatgctagcactgtctgcagaggtctaaaaaaccataggctgctgtctatattgaacttgttaagattccttttgtttcacagtgcctgaagattggtcatgaaccagtaatagccattaaacaatgtctgttctcataagagatgaaataaatacaaattaaaacaacagtgaagtatcattttttctctatcaaagagataaatattaagttttaaaaagcaagcaatcaagaaccctctatcttgctaagaagggaggattatttgtaccctagttgcgcactagtggtgatatcatctttctggacaataatctagtgatacatatcaaaagcctttaaaatgtatatgccctttaaccaagcaattcaccttttaggaatttattctaagatataataatacatgtttgtaaagttttagtgatggatatttttcttgctattgtttctaataaggaaaatcttagaaacaatttacgtgtttaaaaacaagtgattggatgattatggaacatccataatggaataccatgtaattatttaaaattccactgtagaacaattcataatgtgtttagttaaaggggaaaaatgcagaacgaacagtgctatcacttttatacatgatacatgtatacaaacaatattaatcagaaatataggtagtttgtattttctactgtgtgcttttcaatttgaatcccatctgtaggcagaaaaataaagttaaatatttaagatttaaaaaaaacaatagctggtttttttcagagaagtaaccatctagtgatgtgtgataatttataagttgtgagattccatagttagggctttagccctttgcatttatctttcttcatctcttgaatcctcttcaaaatacacccactctacccataactcattagatcttgaaaggcatgttctgatagaattttatatttagaacaggctggagcactcttcccttattttacagaagtgattgcatggctctctagggtgagttgcatattgagagggaggacagtgcagtggctaagtggccgcacattgaagccaggctgctggggtttgaataccagttccccaacttcctagctatgtgattttggacaagttgcttaaccattgtaattcccagtttcttgtctgtaaaatgggagtatggtaatatgtcgtaaagtagttgtgagattttaatgagataatccatatcctgctaagtactcaggaattgttagtagtttttattactattactgtttggattaagaaacagaggaaaagtgatttgtccaagattatacaaccacttaatggcattactaagaacagaatggaggaaggttttttccagcagaaatgttcagtatcctctgtgcctggcaggacaaccccaagttgtgcttttgggatggaggagctgatctaaaacaagcagtacccaggacaaggccagcctccagggagtgactgatgacagtgggaagccaaatggtagaaaggcaggtgaagttaaggaaactgagagtcaacttaggagcaggaatgaagcctggagcaaagagctagtgcaagagagagcagatgactcagagctactggggcttttgtaggccaccagctatgggcttcacgggaggttaatgtggtttaaagtctcaagacctgggtaattaaatagacaaatggggtctaggtgcatgggggaattttaagtatagctttgagaagatgcctaatggggagtaataatagagaaagaagctgggtggggccagaacaaggagcccacagtccaggcatccagctatgatcatcctaaaggaacagcctaagtttgaagaatcataaacaaatagagacatgataaaatttactttaaaaaaaatcccttggcagaagaatgaaaactgatttggagtgacaaggagatcatttaggagactattggagtaagccaaggagaaatggcgagggcatgaaaccagggcagttatggtgggatcagactggagaggatgcatttaagagatattttagcaccagaattgacagaatttggtttttgacagatgtagacactgggagaggaggagagatctaagtgcatagtggcatccttcacaaaatggaaggtataggaagcagagtgggtttgcgccaggcagagagaaaagacagatggtgaattccttctctaacatgttgagtttgaggtgcctgtggagcagctggatagagatgtccaagcagacaagtagatatttaggtgcaagttcaaaaaagagggatggcctggaatgcacatgaagagtcttctgcataagtatggttgacagttgaaattctcattgtgggtcaattcagtagcagagaggttggaggattgagaggaagccaaggacagaacctggaaaaccttgacatctaaggagggagatgaggaagaagaatctacaatagatactaaggaggggctagagagactggagcagcccaggagaaaagtggtgtcatagaaatcaagtgggcctgtagtcccagctacttgggagactgaggcacgagaatagcttgaacccaggaggcagaggttgcagtgagctgagatagcaccacggcactccagcctgggtgacagagtgagactccgtctcaaaaaaaaaaaaaaaagaaagaaatcaagtggggagatggatgcaagaaagaggagaatgcattcatggaaagagcatatttaccaagctttccatgttgaacacatgagatgtgacatgaaaggtaactgtagtgactacatgttaagcgttgaattgtggctcccttaaaattcatatgttgaaatcctaactcccagggcttcaggatttgatcatatttggagatagggtctttacagagataataaaatttaaatgaggtcattagggtgggtcctaatccaagacaattgttgtgcttattgtaaggaagggaaacacacagcggaaaagcggtgtgaagacacagggcgaagacggccatccacatacaagccagagagaaaggctcgcaacagattctttcctcacaaccttcagaaagaaccaaccctgtggaaaccctaagtttggactcctggcttccagaaaaaaaataaattttttttgtttaagccaccccagtttgtggtactttgttaccacagccccagcaaactaatacacttggtgagagtgcatacagccagagaaagaagctgtgaataagtgcatcagggaggagggaaagaaaccaaaacaggattacatcacttaaattaagagtagaaacatttcacaaagcagagtgtagtcacaggtcaaattctgcagaaaggcgaagtaggagaatgactgaaaatgtcagtccagaggccctcagtgaccttgacctttgcagaacactcccagttgagtggaggcagtagactttggagagcttggaaaatggaggcagcacagatggtctcctgcagaaagtctggtgataaaatgagacctcctcactggagtaaactcacctctgctgtcggtggaaataatctggagtcaggccagccagacccagagttcttccttcctccattttaaaggttaaacagagctgaggtcaatggctcatgcctgtaatcccagtgactcaggaggcggaggtgggaggatggcttgaggcgaggagttccgttcaagaccagtctgagcaacatagcgagactcccattcctaaaaaaattttaatttaaattaaaaaaaaaggctaaccaaaaataaaatccaatactttatttttcccacccaaaactagtttgggaaggatttctggaagaaaataatttttgcagtcattttacatgttggattttgagtgcacataacatacagattctattctgtattatcagttcagaggcaagttgagatttgaggcttcgcagaggtaaagcctctggtgaatctggtgagataaagaagaaaacaagcccaagaggaatttcagggatcatttataatttacatcaataaacagaatgggaaaaaaaacccattagagtttggaatagagaagtattaaaacactttcttagaaagctttgagtcaaaattaatctttctgtagtggcaggaatatgataagccaaacaaccctaatgtcacagctctatattattaggtgtcgaatcagatttgcactaaaacatcaagtaaaaataaaaggaatgaacatttggttaagtgaaccaattagtcaatacacgccagaaaatggtaaaactggataaacctaaaatactcaactacctagattaatcaaggccaacctagattatcaccccaatattacaactattttcaaccaactaaacaataaatctttatcaagagcctgatagtttaaggtactgtgatgaatacaaatgaaattgctgatactttttttcaagtctatttagaaatagaaacccacaattatgaaatgacaaaaacaattaatgcagttaataattcagtaacttttaaaaagaaataaacatgacaaaaagttcattctcaccaaatactaaagaaatgccaattcaaacaccaatgagatattttcctgtatcagattagacagtaaaacaaacaatccaatcagaaaaatgggcaaaagatataaaaagacatttccccaaagaaaatatacagatggtgaacaaccatataagagagtcaacatcatttgcctttatgaaaaaattaaaccactacctacctataaaaatggttaaaataataaaagataatgacaacaccaaatgatggcaggatgcggagaaactggatcatgcatacattgcttgttgggaatgtacaatggtcaagccactctagaaaacagtttggcagtttcttataaaaccaaacatgcatttagtatatgacccagcaactgcattcttgggttttgatcccagagaaataaaagcctatgctcctgcaaaaatcagtatatgaatatttataccagctttattcataatagtaaaaaactggggaaaaaagtccctcagtgggtgaatcgtaacacaaactgtgtgtgcaagatgttaccactgaaggaagctgggtgaaggtacacaggacttccctgtacattttttcaacttcttttgaatcaataattatttaaaaatgaaaagtttaaaaagtaaaaaaaaaaaacaaaaactaaaaatgttcatcttcactaaatattaaaaaaaatgccaattcaaacacaagatattctccttttacaaattaacaatttatatggattttgggagggttgggagtaatcatgctaataagtatgcaataagaggatactttcgtatactactgattgtgggaatatgaatggggagaacatttctggaaagcaatatgtcaacaatatcaagagtcttaaaaatggttgtacaagcagacacccattctgggcactgccaatttctccatgtccttagtacattttttttcagttcattcagcatctttgttccaggcactgtgctaaacattaaaaatacaccaaagatgagtatgagtaaacatgatttctgttctcaagaatttcagttttgtggtaaatatatcaaaggtgattttttataagagttttttataacagggtgtgacgtttcataggagcatgaaggtagctgtttcctatttgtctgtaggcagtatgatgtcttagataaatgccagggttttgagctagtttggttggtatcaaataataagtagttaataaatcatcttctatttattagtggtatcactttgggaagcctattagcttcctgaacttcagtgtcctctgtaagatgaggctactaagcacttgccaatgccatgaggaatataacaatttataatggacaggaagtcctatggatataagatattttaggactcacattctttgctttaaaatctattatttcctatatttttaattgtcagagttctttagctctgccttttctgattgatttccagcagatggactcttacctataacctagaagttgctatagtagacctcctaactatagataagagaagggcatgccaaatgcagttgaatcaggtgaaagtcaagcaacaaagctgcctaaaataaattttatgtaaggtagggtgccaaaatcattaaaataaaattctattctataactgtaatcacgtaagtgctttcatgaagttgtctatgaaaactttctttttcgctttctggacttcaaatattttaagtttgcttttcatttacaaagatttttttgctcattagtaatcatgaactgtattcaaacttacacttctaattctagaagatatataaactaccattttttaattataaaaatgtttatatatcttgctttaataatttcacctctagggatctagctagttaaataacaagagctacggaaacatatttgtgcaccaaaatgtttattacattatttaatgtaatgaaaaataagaatcaacctaaataagtagaagaataggtaagtaagttaaaaatgaagttaataatgactccttaatgagagaagacaacataaggctacatacagaattgtaaagaaaataatccacagaatgtgtgttttattttggtaaatggttcctaaaactaagtaagtacatagaaagaattttttttttttttttttaaagacagagtctcactcacgttgtcacctaggctggagtgcagtagtgcaatctcagttcactgcagccttcacctcccgggttcaggacacgccaccacacccagctaattttcttgtatttttagtagagacacagtttcatcatggggctggtctcaaactcctgacctcaagtgatctgcccaccttggccttctaaagtgctgtattataggtgtgacccaccgcacctggcctaggaagaattttagaaagaaagctccatatcaggaattgagaagccggtgttttaattgagaatatatttgcacagaaaaatcttggcataaatattggtttacaaaacaaacaaacaaagtaatgtcctttaatcttggatcaggagctgcccaacaactccaaaaagtcagctcatgcaaaaccatccaaggacagatgaatcagccaaacaagagagaaaggggaagggaaagtgtcttttcacaggcagcttttgaggcagtgcataaaccatgcctctgcaccatccagaccagacagttgtgacacagggttgacaaagcaggacaacgaagggtagctgctcctaaggtggggatgatgctggagcaagggggagcaccaagaggaaaaaaaaaaagcataaaaataagatagcatagtaaaaaataagatagtcatagtagttacctcttgattgatgggattatggaaatagggttatttctttgactaaaattgccagatcttcagtacaattacattgctctgctgagcaggatgaaatcaagttgaaaagtaatctagtagtgaggtacagcccgtatgctgcaaatggccaacatagatcctcagatgacagaagtgagtgatgcaggcctgtggtttacgtacagctccatgacgtatgaatggcagaagctgtgtatgtccacaggcgagccccatttcaagaagtgcttctggtcaccactctgttgtcctgtgtataaggatgtggttcagaacagccaagtcttatatttcaagaggagccagaaagacaaacttaccagtgaaatcctaatatttatataatagctcaatatctggaggggctggtttggtataaatcaccagttttacctctgacctctgttaatgcatcagaggttcaggagagagtgagaaaattgtaaatggaatattttaggactattatattggggcccaggctttagtgagtcagagcgagaaagtagggggctgaaactatttgactattaatttattcaataaagttttatttaatgttggaaagatgaagatgaatcagatagaaatcctgtttagaagcttctatgggaagagatatcaccatagctaatatgtcttagcctctaaaaggaattatggcaaactatattgtatcatatatgatctcatttaatcatcataactgcaggaggtaagtagtattatccctgattttccataagtgaaaactgagtctctcttagttacatagctgacaacacaaccgggattccaaatgccagtctgatcccagagccaagctatgaacaaccatgctatatattatggcagatcagggaaggaagacattacttctagcagcaagaaacatttgtggatgaaaagatttgagcttggagagagctgtgttgagccatgtccaaaacaatttctggcaaccatacgataaaggtaaaagccagagattgaaaagtaaaagctggtggactaaaaatggtccatagacagagagtcatcaaaacaacaaaacaaaacaaaaaccttaatcataattaattgccaatatttcaaaagtctggagaattcacataagtttagatttccagctcttctggagaattagaatatctagtaacagtgtgctaataatcccacatggtaacaactggtgaatctggcagaggctgcccagcttccaatggtgtataagctctcctcttcctatgcaacctgcctgcctcatttatatgagctgcttggatgctgcagatgcttgaatctaagagctttggtctggaaagtgaggccctaacgaggaagaaggaataacctatggatcaaggagaactgggagtccagaaatgaaggttatttgtaagtctggacccagccattccaactcctttgaggaaataagattctaaggaaaaggccgtttgcattctgctctccaagatctctgggtgttggaagaaactgaattgggggagagggggaaacctgactgggggctcaatacagacatgtaaatttgaaggaaacagagagtttagatgacaggcagtagaaaagttaatgtgtccattctatggctgacccaagattctgtttccagaagacctctctggcttgttaagtgttcatggttgcaggggaaaagttagaaaaaaagaaaaacaagccaaaacccagctccttaaatgtttctaattttattttcaaacaatcaggcagagtaatccctttacacactcttcaggcattggctgagggtcccagtcaagaaccattcagttttgggggccttaagaaaaatatttcctatgattaaaggaactttggacaggttattaccttctttgagcctcagtttctttgtcacttagaaggttgaatggtttccacattctgagggtaaggaatacgagagtgaatgaagaaatatcaagtgcatagctcagagtaggaagaaagaagtgaccagggacaaggctaagaacttactcaaaaggtgcccagctgctcagcattctgtccaaaaaagggacactgacatctctccagcattctaacagcagtcacatagcattatcagctagaaatgaaaacagattcaattctatatcctgctaaaagcttgagggtcacactagctgtgtgatctttggcagctggccaaaaccctctgaaaggcagtttcctcacctataaatttttaaaaaaatatttattgtgaagattaaatgaagtaatgcatttaaaatacttagggtgccttagagttccagcacagttcgtagctcatagtaatcagttaatagatattgactttaataaatagatacttaactgagcctccaccctgggcctgttactatgctaagtaccaggagtgcaaagggaaatgaaacacgttccccaaacttgtggaactcagagcaggccaactatatgagtagtagatttttaacacgatgaggaaactgttataatggaaaaataaatagtgtgaagagggactaaggaagataaagatatggtgaaaaaaagagggttcaggctccaactgtggcatgatctagatctgcaaggaagagtagagaattgcagtagagaaagcagggaagacattccaggcagaagaaacagcttccacagaggtaaagaaggcaaaacgttttcaaaggttctaggggtgggggatggtggggaagatggtcacggaatagtgaatggttcaagtgaaactgttgtatgggttgtgagggcagttttatgggttgggtgataaaatcagaagagaaaaattgaattcacgctttgaaaggccttgtgtgtcttgctgagaagcatgaacactaactcatgaggagtaaggcgcgggtctttaaaggaaggaagtttcataatcaaattgttttccatgaaagataatgaagggagccagccacaaggctgttgcaatcaatcgtccaaacaagaggtgacaaagactctaaaactggccaccaatgaattgaaagtggatggtgaggaagaaagaatacagggtgacataaacacaatatgtaaaatccaaggtatgaaaatggcctggtcccttcgtccttaccacagtcatcccaagagaccaaaacaaaaacacagaaaatctcttttaaaaataatctcttttgtttgtatgcaaataggccatccacagtgaaaatgcaactcaaatgcaatattttatctgcagtccaccaaatgcaaagatcaaattggtttacaaatgctgtccttcttaaaaattccaactcctcacattaaaactgtagccagctagtgcaagttaagattgtttgcaatcttaaataagatttgagtaaagctgaaattgagacacttttcaaaagaggccatcccttactcacattgctgaagagtagaaagattgacaccttcttttatcagaaaatttctttcagggagtaatgcctcttgtgtggtggcagacccttcaagtcttccagataaagcatgtgatggaagtagcagggagctgcaaaaattgcaactctatgattctgcatcaccgacttgaaaactacaagcccaggttgacaaatgtacattttaagtgttcagagaagtcttaagtgccttgctttggtcacaaagttgccacagggaagtaagtttttgaatgtgcagtgccccgtccccagctctgttgtgaaatggaaactttaaaaaaaaaatcactgatttaaaaaaccactggttttgttttttaacaagtttagtcatattgcctgtgttctatataccccaatctattttattttactttgtagtgtacatttaatttatactcaaataaatattttacataaggtgctttcacggaccttcatgcttccctaaatattaaatatgctgcccatttgttaaaatgtgttagttttgttatgtattatatcccttcccctgcacacatagaaaaaaaaaatatgaacttaaccttcaagcaagttttacgtttagaatattacctcattttatttcttctaactgaggttataaagaaaatggcaaatgtcatgtgctttgtaaagaaatgacagtttctcagaatacgtaaatgcacacccttagacaaataggccacttaaattcagaatcacagtcttttgaatattggtttaatattctcagataaagattgaaaggataacaagttttggaatcaggtgtttactttgagttctgaaaggtgacatcacaggtgttggtagtttattgatatttaatttttaaatgtgctgctgtatatatttcatttgattagaaatatgttacatagttatgttatttgttaaataatagaccatcttttgtataacctatcagaagaagttctgagattgtaagattagattgtaaatcctattgcataactagaatacagaattattaaattggaaaggaagttaaatcacttagaccgtccttcccccaggaagtcctctctacagtgttatccatgacaaatgtttatgcaggcaccctaaccatttaaaatacgaagagaaggagaagagatatatcgagaaaactattcctgagacaagagaccaggggaaaacttttcttagttgtaacctacacaactagctagaatctacctcatgctcttaagatggtgtttaatcatgaggatatcatacataactgaaattgtataatgttgaacatcttttggtggcaagtaccttgactttattaaatcagtgtaggtctcctgcattcaactatggtctctaggagggcagggaccacacttcttagctcaccttggatctcaagaccagtccaaggccttcattcagtcagagctagttaagcatttgttaattgaatgaaggaaattaaaaaaaaaaaaactagaaattccaaattgtgcaattacatctgtgaattttaaggtgttattggaaaatgggaaaaattactgagattcgaagatggataggaacaaaggtaaagcatgaaaatgtgcatatttgtgtgttgctagagtcaatagtgattgccagttcctatgcagccctggcaccacctctgaaaccttggccaacccctgccattaggtgttgagatacacgacaggcaggtgaggaaggaggggtgctctggatgtagtcttgccgctagactgtggtctttagtgtccatgtccatggggtgagttgtgagcccatcagtttcccacactacagtccttctctggcttagccttccttccctgtcctgtggtccaggttacccctggcccctgtggccttcctccagagatggaccttcctccacacacttctcaggagctcctgattctaggcatgccccagaacacctcaactccactctgccctgtctccatcagaccagagacctcacttagaccctgggtatggggttgttggttctccacttgctgcggttgtcactagcctgagctctatcctgagctctgtccatccttctcatcttcctcattgccctttctgctaaagcaactgcacatctgaaggctatacttatccctagtacaatggtactttttctaaaatgcatacaccctaatgcttacccttttgacaattttttcctgaacctaccttttaatataagcaaattcagtcttcaattcaaataagtgtattttgctgctgaagccaccatgtgattttgagagatagtgaagacagacagtcttctgcattcacttgtagaatcctgaaaatacctcttggtgtcccttgcctttctgacttcttgcttgaagacatctagacaaaaatgtgtccctgggtcctagtttctgggttcagaaattgatcgaatgcaagaaaacaatacacattgcctcttccttagcatgcatgaatggtaggtgtgaatttgcatcatgagaaagtaaataaaagaagattccccagggcagctagggaggcagaaaaagccagcctaggatgggagtggaggacatgttagaggttatgagagtgagggtccatcctaccccacctcggtaactcactggtatggtataaatgcaaaattttggctcacacaaagaaaaatactcaacttctaatgcttaactatgtaaaatttgcttttaaagtacaagttaaaattgtatcgcccctcaaagaaacaagaaactcattacatttctaagaatgttccttcagaaacatggaactgaaagctatttttaaaaattgatctggcccttagaaaactggggccttttctttaatttacctaaggaattgacataaaagtctagggttctgcaccagaaaaatgcagaaagtgtcaaaataaaaggcagaaatacaaaaggagactttttgcagcaacgttctatgtatagcattgattccaagggtgcaacatagggaagtgaacatgtggactgtgaaattgatgctaattttctttcccactagtctagcagccctctaaaatgtcacattattaatttagttactttaccagaaatccgtgtatgtggttagcatgtgtgtttttttttaattaacagactttacttatttttagaacagttttagattttcaaaaaattgagcacatagtacgagaattcccatctactccctttgtggaacacaatttcccctatttttaccatcttgcattagtgtgatgtatttcttacgatcaagccattgttgcttcattattattattatttaaagcccataatttacattaagtttctctctttgggttgtacagttctatggattttgacaaatacacaatgtcatgtatccaccattatagtatcatacagaatagcttcactgccctaagaatcccctgtgctctgcctgttgacccttcccacccctccccaacccctggaaaccactgatctttttactgtctccacagttttgccttttccagaatgttctatctttggaatcatacagtatgtacccttttcagattgacttctttcattaagcaatatgaatttaagttttctccatgtcttttcacatcttgatggctcatttctatttattaccacataatattccattgtctggatataccacagctttaccaactgaggggcatcttagttgctaattatgaataaagtggctatacatattcacgtgtaggttttgtgtggacataagtcttcaattcaattgagtaaatatacctagaagtgtgactgctggatcatatggtaagagtatatttacttttttaagaaactgctaaactatctcccaaagtagttttaccattttgcattcttttctttattttttttttattatactttaagttttagggtatgtgtgcacaatgtgcaggttagttacatatgtatacatgtgccatgttggtgtgctgcacccattaactcatcatttagcattaggaggtaaatctcctaatgctatccctcccccctccccccaccccacaacagtccccagagtgtgatgttccccttcctgtgtccatgtgttctcattgttcaactcctatctatgagtgagaacatgcggtgtttggttttttgtccttgcggtagtttactgagaatgatgatttccaatttcatccatgtccctacaaaggacatgaactcatcattttttatggctgcatagtattccatggtgtatatgtgccatattttcttaatccagtctatcattgttggacatttgggttggttccaagtctttgctattgtgaatagtgccacaataaacatacgtgtgcatgtgtctttatagcagcatgatttatagtcctttgggtatatacccagtaatgggatggctgggtcaaatggtatttctagttctagatccctgaggaatcgccacactgacttccacaatggttgaactagtttacagtcccaccaacagtgtaaaagtgttcctatttctccacattctctccagcacctgttgtttcctgactttttaatgattgccattctaactggtgtgagatggtatctcattgtggttttgatttgcatttgtctgatggccagtgatggtgagcattttttcatgtgtcttttggctgcataaatgtcttcttttgagaagtgtctgttcatatcccttgcccactttttgatggggttgtttgtttttttcttgtaaatttgtttgagttcattgtagattctggatattagccctttgtcagatgagtaggttgcaaaaattttttcccattttgtaggttgcctgttcactctgatggtattttcttttgctgtgcagaagctctttagtttaattagatcccatttgtcaattttggctttggttgccattgcttttggtgttttagacatgaagtccttgcccatgcctatgtcctgaatggtaatgtctaggttttcttctagggtttttatggttttaggtctaatgtttaagtctttaatccatcttgaattgatttttgtataaggtgtaaggaagggatccagtttcagctttctgcatatggctagccagttttcccagcaccatttattaaacagggaatcctttccccattgcttgtttttctcaggtttgtcaaagatcagatagttgtagatatgcggccttatttctgagggctctgtcactatacatctactagaatgggtaaaatccaaaaatctgacaataccaaatgctgctgaggatgtggagcaacaggaagcctcattgctccacatcctcagcagcatttggtattgtcagatttttggattttagccattctactagatgtgtagtggtatcttactgttttaatttgcaattctctaatgaggtatgatgctgaccaccttttcatatgcttatttgctgtccgtgtaccttctttggtgaggtatatgttcagatcttttgctccttattaaattgggctgtttgttcttttatctttgagttataagagttcattgtgtattttggataccagccctttatcagatatatcttttgcaaatattttttccccaatctttggcgtgtctttttattcatataatggttgatacatgtttctgctttaaggaggaagggttttaaaaatacaatttacagtagcagtaaaaataaaaatttattgcaaatgtcttatgttcactctcaggtgatgtcagggaactatggacccagcagggtttaattaaaggggagtgtcaagtcctgggggctgtggttgacaatcctcctttattggcaattgtgcagcagggctgggagtaagaagacaacccagtcctgagctgcatcacttctaaattaagaataattcaggaactgtgtttacggtgaaatcctggcccttctcacatagattatattatgcataggatatgaatttctgtccatgaatccaagtatatatgaaatcatcactttgaaaatttcctttaactcaacttaatcccactggtgagcctcaatcctgccagttgaaaaagagactgtaactgggtcatgcaggagtctccttcctttcctgcagcccagtcagaattcaagaagttcacctggtaactggaaaatgatggaagggcctcaagtccctagtctgtcctggttgccattggcacccttactatctgagcccatagtggtctgtgaagtccggcagctccctgcccccatgccacagtggggaatgagaatatctactgatgctgggccccatgagcaaagcatgctgcctttctaggcatgagccatcacacctgaggttgctaccccctcgggagcactgatggaggggcagttgggtttctactgctcacaggacccagacaaccatcccctgccctcccttcttcttgcacttcaaaagcactctcttcctctcttttcacctctaagccaccggtatcatctcttccatgggctttcacaaaagtctggatgaacctttgaacttgtatctcttctgctttcccccttgcatcaagaaagcttagaaaacaaacactaattaacgtttcaataaataatgctgctctaattatttgtggaaactattctgtattagaactaccatcagcaccgcctcctagagtgcttttagacttgaccactggccgcaggaggccacttccatataacaacaaacagatggctgaaattggaaaactcagctaaatgttcagatgtttctagactcccacgggtttctggctctggcacatggagtagatcctgactgtgtggtcctcaggggactctctctggtgaagtttggtgaggtcaacttccacacccacacacaccagctactgtgtgtagcctgtcctcctctggttgcttctacttgcagccttggcctcttcagtcctgagagcgttggagaatgaggcagtggaggaagcagccccacacagaaagcagtttctgaagtaacctcagcaacttcctcctcaccaaacacaaggaactgatcttctccactgggctcggcctctggtcagccaaggacaacactgttgaccaccatcacggttggccccactccacccttggctctgatgacatatgtgggagtcagaggaattttgattggctgactgctggcctgtcacacaaacaagatggggcaagggggttgcgatatgacttgacatgtgaaaaaaaaaaaagccgtggtcagcaaccccctgcaactgttgaaaggctaattcaatctctgactctttaacaaaagtgatcttgttcactgcctgttctgccctgagagccttctctgctaggaggtaggttgactgactcagggagaagggtgctggtggcagagctgccaatgggtgagggtcctagagactatcgacatgaggggcagttgagaacactgtagtatttagctgagaggagagactattaataaaatttacaaaatcagctttcagctatttggaagggtttatataaaaggataaaataatatgttctggtagttctagaaaacaggacagagacaagtagctggtacttatggattggaggagtgagtggcagtagtttggggattatttataaaaaagacatttttctgttaactctcttttctaatagtgaatttcccaacctgacaagtaagaaagcacaggctagacacgcatctgtcatgacactgaaggggtccttgcttgagtgagagactggaatgatgagttttgaggtcccttacagtccagcaactctagctaagttggagaataagagaattccatgacaccatatcaccccctcatttctgctgcctgcctcaccattcatctctctttactccttttaatatcattctacgttacagcattggaggaggctgctctaaataggaactgaaataagtagattaaagaagtgctatggaagggaaaacaataaaacaacttgttttttaagagcctactattgccaggatctgtgctaagcaccatatatatgccatgttatttaaccgtcatgacatgcctatgagatatttagtattacttctgtgaggaagccaaagctcagagaggttaaataactgccccaagaacacacaggcattaagtagtggagcagggtttgaacacaggtctctatgactccaaagtgcagtgtgatatgttatttttactgatctgtttatggaaaatgatactgctttctaatttagtattaacacaaagatttttttctaaatagatttacttaaagtatgttataaaaatactatataaataatgaaacagattttacatgagtatgaagtggtactagtagctagaatgatgaaagtttggggaatactactccaaatattttgatagctagcctttcaatttagcctgtcttatatttggactgctgagtacaaggaaaagaaggaaacatgaaaattaagtgaaatatgagttacttcccctgtgctctgataggtgggtaattgatcatatgtcacaataagaaaatcaaatgaaccctttcaaacaacagcaaaatctgtgattgtaaaatccagaggaaaaccccaggtgggatctatctgtatgaaggatgaaatttccaaggtctgaacatagaatggctgagaggaagtgatgaccctgtgagtcaagaccctggaccctgggggagccctgtgggtttgagaagccctgggtgaaaggtgaagggttttacaggcctgtttacagacctctgtagtgacagaagggagatctttgtgcaaaggtcaaagtaagaattgggaaagtctgaaaagaaaacaggaaagtaataatgaagatgaaataactacttggcatactctgccacatgatttacaggcaaggtttcctttgtttttcacaacaatgcagcaaagaagtgattatgagtcacatttcataagtgagaagactgacattcaaacatgttcaataactggcccagggtccagtggtcaagccaggactggacttcggaccaccagttccaaacccacaccccttcccttgcaccacacgcttttgtgtggatgagcctccccaaccctgtcaacaacaaactgtcactttgtcacttttaatgtctcctgcttcacaggacacagctagcctccaagagatcagggaggcatgcccagagggtgctgcttctctcttttgaagctcaagtgccacagacctcagaggcacataaatgtcccccacactgagcagaggactttgcagtgcctgatcagggcagaaaaaggaggcatgcacctgggggaggatcacatacgagtgaaacctgtccccgctgaagcactaggtttggagaaatctactgggcatttacacacctttcccacttctgcttatgacttgtagccaaactcaagagtaccacccacttccaggaatagtgtaccaaggtaacagaaacattctagattcatacaattggggttagattaggatcatctgaaaatgaaggttgtgtatgtcaattgccttctaacaggatgggtggagagatgtacttaatgaatgattttggggaagggctagaagtgaagcacatggcctctctgccctcactcattgaaggctgtcttctgaagccccgtggagctcagtgcctgtcacatggttgcccacatttgttgaactgaactgcattttcatctatgggcttcaaaggctgtgtgtactctgggatctctgggaatctgtcagggaaggtgtctttgtcatgtttgtggatggggctccctttgggggtttcccagggctttacactcatgctccgagggtacgtttgtagtcattctcatcagtggaaatgcccacctgccggcagaagttatttggaaccaagcaagagcactgtccctggctgtggtgttgtttctctagtcagttcccctttctgtatttgagttctaccgtcagtcctggcattatttctctctctacaaggagccttaggaggtacggggagctcgcaaatactccttttggtttattcttaccaccttgcttctgtgttccttgggaatgctgctgtgcttatgcatctggtctctttttggagctacagtggacaggcatttgtgacaggtatgtttgtggaggctcagacgcctagggagtggcatgagataaagctgcaagctgcatctggggcagaaatgctgatgtgctaatggccggccagagaatgagtaaaagggattgcagagagcatgcttaaaacctctgaccatcaggtttgcttctcagattgactacattggaggtgggatattacaaaaatctgtctcttcctgccagatcccttcatctgtttttcgtgagctaagagacaaaataggcaggaaatagaaggtgccacttaccaaataattggcagctgttcttggctttggggtgctggggtctccgagcagcctctgctctagaagaagcagtccaaagatgtcagctcgcctcgcctgagtcccctgtgccagtgggaaatccagagaagggggatttcctcctcttgcagcctctctgcaatggacttacttggctttcctgtttgacctttcccttctctggtccagagacccttccccaatatttcttcccatccaagtgccccatcccaatattagccccacttggcaccagagaccaagatctaatttaaaaagaaatattcttgggtcaaaaaagagcccaagcaagtgattgaacataatgtgtttcacatacggtgaacctatttgcatttgcatttgcaaacgggcttaaaatatcatctctattaatagcaatttaaggttctggagagccaggtgaaaatagtttttgacaaagggaacttcctactccccttaaactgtaataatgaaggaaatgaactgtttatcttacatgtaacctcaatcttgggactaaggccctgtactaaaatgcgtctatttatgtgctcagacttgcagttcgtgttatgtctgctgctgcagataccgttaatattatttatgtgagctatcctgtgtataatggaagcttttataaatctctatttatttattcctaatatagttattaagtgcttgctatgttccaggtactagggacttaacaggtagcataaaagacataaggaaaagctgcactcttgttttctagcctagtggggaaatcacattaatttaatcacactaaacatgactacatagcaatagtgctttaaagggaaggaaattgttctatgtgactatatcagctgattaattaccaagcctttgcatttgatattttggttagtctattcttcttgaatttcatatgcctcttcctgggtgggggtgaggatgggattttatggagttgaggctagggcaggtagggagaaaacatgagaaagatgaagagataagccaagccagattcttcagcagaaaaatcaaggttgaaataccatgtttcaaaaatcagactgaggtgggagttgaggttaggggtccctaggccaggggattgaagcttcaaagagataaaactagagcaaaagcaagcacagagagtggcagagaggtccctgggcatttttccacagtccattctagtgctggcaatccacctttcatggccaggcaggtaagagtatttgtggggtgggagaaaggacagggccataggctgggcacacagccctttactggcccttatctctcctctcttctcctatacagtgctgtttccgaactgtacattggcttacactcgggctgaggtttgggaaataggcgccattttgaatatgtgtggaggaagaaaagtgtgtcttcagcactttccacctccccatcacggccctgagacctcaacaccgggaagcatctcgttccctatcggtcctcctttattcatggacggatatgattcctttctaagttccatgtcctttttagataaattaacttgaacctaatgcctaatggcttaaaaacaaacaaaaaaaaccctcttccttccagctagcatttgcattttaacaggggctttcaaaaaatgccttagcccaaggaatgagtaatgtgggaattccaagcagcagggtaggactggtgcacagtatggggagagaaggcccctcaagttgtggccctgaaatgttggcttcctctctttgaccatgatgctgtttctgagaaaacaagaatcaggctaccttaggggaccaggatgggcatggctcccttttagtgagttctatgagcctcatacctgacagtcagagccctcgagtggatgagcacagactagaagaagcactgtgaaactttgcatgatccttacctttttggcaaaaaggaaaaaaaatcgttctcaaattcatcaatagtttgaaatagggtgtgccttgattcagaaagtttcgattctagatacaactcggagaactaggcgtgtcttgtacacagatttgctcttgggggaccggaaaagctaaatgctatcgccatgctatgctccttcttctaggccagtgaggggaacgcattcttcattttaatatttcagttgcctacaatattggaaggtggataaaagcaccctctgctccttctaaatctgcgaagacatttcttctctgcacctactcatccttgatgcagctctcctcatgtctgtatggaaacactgtgctctcaaatgagtttcagaaagaacaactcacgaaagaaaacaagcattcggtcagaaaaatctccacaaatgggggataagggggatttgctccaaggagagactggaaaccaagtcagacataaaatccagcctaagctagaaggagacatggctggtgggagcttgaggaaaacagagctcaggatggaggacgtctccacctccagtcatgtcctctgtccaccagacaccaagaagtgttcatgttccatcgaggcagccctcacacccatcccttcctcatcatgccgactgcctctttactgcttcaggctcaccatctcaagtcgacgagcctgtaatactggctttcttgatcaccctgataccagccgtcacctcttgacaggcttattttctttaagctgtcattacaccatttttctgctcccaaactattaattccaaacttccaattttctgttaaattaaatatgaattccttatttgactttccatgccctattaggctatcttgctccttgctttacttatagaaactaatctcccattatttatccaaagacaacctctgctgcaggccagtcagcttttcttactgtcctgtaaaaattccatggtcactcctccatttccatgtgtccttaaaaactgttatttgattgtgtctcagaaagtcgtcaaagaatatataccaatgaaaagcatcaaaaaggttatacttgatgttatgtgtgtatcaaaaatatggctgaaatatttatccagtgaaactcaatcaacactaaaaagtggttctttcggaagcatcagttctttgagacccattaaacagatgcctcggatgcagggttatatattatcaggaatctgtctagggaagaattattggaagcttgcaaagcctttcaaggacagaggacgatagctaccacgttgagttctaggaaattaaccattgttattgttaaaggaagacagcgtttctcagaggaagactgttaaacagtgcagtggcccaggctaacagccctcataagtgggagtatcagaatgagtggacttaattacttaaaaccaatacagggtggaacttcatctgctataacagaaatcaactcgtgcaagttctaacatgcagggtacagttctgagaccaagtctgactcacctgtcaaagctcagctcaactattaccacctttacaccacccttccaagctgtaggagtgcttgctgttctccatgtcttctgaagccctggatcacttgtagccagctcagcagactctacccagacagggatcctttaaatgtaccatattgtctactgtgttaaaaatgagaggaactgactcagggtgagagcgatggagtgtccagatgttctcctttatttctccttattcctggaaatgtaatgagaatcttagaggtgaactgaaaagttatgagttcaaccacttactcaattcgagattcgctcctaaaatgtctcttctgtgttatcacccccactttggtttgaatagtacttgtgacagggagcttatcacctcacaagaaaatccagtcattgcttgtagctctctattaaaagttttccatcatctggaactgaaatctggctccctgtaacttttagttattggaactacttgcccttcagcaacagtgtatgtatcctcccatggaagggcccttacatatttgcagacacccagcatatacttgcaatcttttcttcttcaggttcattaccctagtccttttagttgttcttcatttgacataatttcattattcactagtgaaccttgctgcccttccccttgataaaccgaatttgtcagtgtcattcaagtataactgacctcacagaacgtgataccacaagcgatgtggtctgattagcacagagttcagtgaatgaatcctacactaggattggatgaaatttacttagccataccacactaacacttatgtgatttttatgtttactatggatagactatttctcctgtgtccacttcttcctcttacacagttgttatttcaaaactgaagtacagattcttacacttaccctcaggagattcatcatgttagtattagtctctcttttcaggctttatgaatgttaattcagctaactcatttttgagctatctgtctcattttgtgccatctgcacagcataagtttgatttctgttgcttttattagtagttttactaaatacataaaagtgaaatagtgaaacacagagtcttgtagcatccactgtgggatcagtcttttagacaagaatgatgcagttgctgagtcaaatgaataaatgaataaatcaaacaatactttgtcctcatttcccatattgatctatcaccatatcctgttaattataattctaaatatttcttgatctatccacttttcccttacttcacctgctactatcccagaccaaacagccatcttctttcactcaaacaattgcagtagccaactgattggtcttcctgcatctgtcctggcttccctatcatccatttgctacacagaaaccatggtcatcttttcaaaatgcaaatctgatgatatcagtctcagctctaatttctttggtggttcacatataaagactgaaatctttaactgaccaataacacacgtgtgatctggcccctgctcacctcttcagccttgtctttcacctgtctcttcattttggccacagggacctcctcgtaccttctctcacgtgccctcctgcctcagcgcctttgcatatgctgttccctttgccgagaactcttcctgtcaactcccaagcccttcacctacttagcacctacctattcaatctgttctgtttgcctcttggtatgttacaaactgtctccaaacttagcagcttagaacaatgaatcctttaccctctctcacaatgtttggggtcaggaatttgagcgggccttggctgatttttctgttcctcatgccatcaattgatatcacctgatgttattaagctgatggatgggctgatctggagatgcactgtccagtttggtagccactggttacctgaaatgcagccagtcctaattgagatgtgctataactataaaacacccacatgattattgaagatttggtgccaccaaaaaatttaaaatattcgttaataatttgtattctgattacatgttgagattataatatttcacatacatcagataacataaaatgtcattaaaattaatgtcacctatttctttttaatttctttaatgtgactactacaagttttcaaattatatctgtggcttgtaattgtggcttgtattgtattctttttttctgagatggagtcttactctgttgcccaggctggagtgcagtggcgagatctctgctcatcgcaagctctgcctcccaggttcaagtgattctcctgcctcagcctcctgagtagctgaaattacaggtgcccgccactatgcccagctaatttttgtatttttagtagagacggggtttccccataatggccaggctggtctcaaactcctgacctcaggtaatctgcccacctcggcctcccaaagtgctgggattacaagcatgagccaccacacctggcctgttttatattcttactggacagtgctgatctagagcaggagtcaagcagttttttctatgaaaggccacatagaaaatgttttcagctttgcaggccatgcagtctccatcatagctgttcaactcttccattgcactgcaaaagcagccatagataataatttacaatagacatagcagtgttccagtacaactattaataaaaataggtggtagccagatttggcctacaggctgtagtttgctgacccctgatctagaagatccaagattttattcatatgtctggtggcttggcagggataggtggaaggctcagctgggaccattgacccaaacagctatacagtcctctccagcatgatggtctcggggtagtgggacatcttacgtggtggctcagaactccagataaggtactcccagagagacaggtagaagctgtgaggcttcttatgaccaagctctcgaagtcccagaatatcccttgtactgtattctatggtcaaacaggtcactcaggctagcccagattcaaagagaggagatccaactctacctcttcatgggaggaggagtagccaaggatatgtgtttctttttaatctattatatcattcttcagatctcagtttaggctggtcctgttatgggctctcaaagtaccatgaacctctcttttgtagcacttgtcatagctagttttacatttctctgtatgattacttgatcactatcttgcttttctactaaactgtaggcaaccacgtgaagaggaactgtttctggttttgctcattatattcctagcaccaaacacaatgcttggttcaataaatatttgtggaagaaacgaatgaatgaatgaaccaatagcaaatgaatgaatgagtaataactgtatcaatattaatcctacatttctccatattgctgtcacgtatatcataagatactctgtcagaagccttgctaaaattcaaatatatttgattcccagtaaccttcttattttgtagttcagaaactttataaagaaggaaataagcctatcttactcttcccagtatctcaaagagggtttctgccctgagctgctcaagagggtttctgccctgagctgctgttcattctgcaaacactgctcgaatacccactgtgtgccaggtacagagagttcttctctgctgtaatctggacaggcaccagcttcccagcgtgggtttaggcttcaggtgcacactactgtgtaccgtctaagccacacctagaagagctctggggaaatatgactacttgggcagaaaaggaaggaactaagaagaggtatctttgtgtctgaggtctgaaggagcgtgtgggctcttgttcaggcaaagggcaggatgaggggaggtggggtggcagcagccagtaatggggtgggacagcggaatgcagaggatgaaacttcaggtcctggtgctctgagaagtaacgctgtgcagcatgtcacacccagaggcaaaccaaggccccagggagctgatgttgcactggagctctactctcctctcagcgagctggtgacgtgccagtccagcaggcctggcttatccaaccacaagtatgaatcggcagaaggcaatgagctgggccctgagtgctgctgggctgaggccgacctaatccttcctccacagagactgtggtgtcccctgctttgctcagggtaagaactcttgtatacctcacaagaagccaaggactacctaccaccttccacactggccctggagcctgcattgtagttatttgtggacactttttcttctctttagtgccaggtgggggaccaaggcctacatgtctttacaacccctcaatctctagaacaagtctgacactgagtagatgtagcaaatgtttgcctgaaagactacctcaataaataaccttctgaggcaccagcaaacttctcagcatttttcctgatactccggttaccactaacattctacacaaagttgtgaaataagtctttttctttgttgctctccaacatctactgtggacccctcctctcacttcctgtttcatcctctctgcactcccctgtcccaccccattactggctgctgccattccacctccctcatcctgccctttgcctgaatgagagcccacatgctccttcagacctcagatacaaagataccccttcttagttccttccttttctgcccaagtagtcatatttccccagagctcttctagatatggcttagatggtccacagtagtgtgcacctgaagcctaaatccacgctgggaagctggtgcctgtccaggttaaagtggagaagtactctctgtacctggcacacagtgggtattcgagcagtgtttgcagaatgaacagcagctcagggcagaaaccctcttgatgcaaagggatactttggggccccttcttctcccaccccagtctgtctctctgagagtcctctcgattccaggagccaccatcacacctggccctaggctgtgctgctcccgtctgtctcagaggctagataacatcagagtcctttccactggctcctgtggcagagcaaaaactggttggcatttttaaacgtgctacaccagtgtgaaagaaacacaggctgcatgggtttaaatctcagctgtaccatttactagctgggcagcctagggcaagtactgtgacctctctgagactccattccttcatctgtaacatggggacaaataatctcaccctgttgtgagcagtaatagtatgattaatcatttagccaactcttattcatgttctctgatgggccagacatacaaagtaagtgaaagtggattacggcaggtgctcttcttggtttctggagtgaacctccatttacatggaggctcctctttttagatttctgactagttcacccaccttattcatagaccttattctgtgcttagctgacagaaatctcctctcagagaatccccccggtaaattcttaggttctttcctcttccattcccctttttgctctctccctccgaaggcaagagtttccactttacaggcccactggagaaagttatggcttctggttgtggttggaggttcattcctgagggagtggggacatttctacacttcttcacggccaatgacattggagaaactggcttcctaacccagcccacaccctcgcacacacacatcacacatcatggctagaatggagagaaattcttcatatggggcacttgtacttcatgaaagaaaatcatatcaatcttgagtattttaacatcctattacagcagggtcactgataaactaagtgtccagagtgttttctaggatggtgtgtggtctccaaattaacattagtgaagcttactggaaggattgttactcctgggccaggccaggattttgaggagagatgtgtttgctgtcaccaaatccttgacagactttggcagaagtgtgttaggcttactctggatagcttcagaggacaaaactagtattgacggaaggaaggtaaggagaagcagcttctaacccaggggaagagagagtttccaaactgagaaatcaaaaatggtactgattccttgtcagggtcagtgcttctccccactgtgtgaattacaggggccatttgtccaagattccttagagcaatactgatttcatgtaattatttgaatgaaaggtgatttgttaaatttatagtaaaatataatttgatttgtgtccctgtttgtcatgccaccccagaagaaaaattgtctttggttaggtcgaacataatggttttttggtttgcaaaccatgagcgattcccatattaggtgggagttcagattcaaagggccctcttttttttttttttttttttgtagtagccagcctaatgagtaggaagttgttctcactgtcattttatattgaatttcttttattttgagtatgaccatcttttcaaatgtatgagatagttatttccagttccacatactatctgtacatttcttttgcccgcttttagtttgggtctttggcctttttcttattgatttatagaagctcttttatacatagaaaattaatactttgtgactagttgcaaatattttcagttgctgaaatacacagtaggtgttccatgtaagagctgaacagctggttcctgattgctgtctccctcccttccagccaatagatttcagagtttgggcattacctattgagccaaagctgacaccacacaagcgcagagtatgggaacagagttctctgtctgattcctgtgagcttcctcatactaaatcaccaacagcaacctacttatcacagaatatgagaattgaacaagtgttggcaaggatgtggagaaattggagctcttgttccagttgtcgatgggaatgtaaagtgatgtcgctgctatggaaaatagtgtagcagttcctcagaaaattaaaaatagaatgaccacatgatctagcaattccccttctgggtatatacccaaaagaactgaaagcagagtcttaaagagatattcatacagccttgttcataccagcattatgcacaatagccaaaaggtggaagcaactcaaatgtccatcaaaaatgaatggataaacaaaatgtagtatgtacatacagtggaatatcatttagtcttagaaagaaaggaaattcaaacacatgctacaatgtggatggcccttgaatacattatactaagtgaaataagccagtcacaaaaagacaaatactgtatgagtttacttataccctaagcagtcaaattcatggaaacagaaggtggaatggtggttggcaagagctgagaggaggagagaaagaagagttattgtttaataggtatagaggcttagttttgcaagatgaaagagttctgaagatggatgtagtgatgactgtacaacaatgtgaatgtatttcataccactgtacactcaaaaggtgaagatggcaaattttatgtgtattatgccacaactaataaagatttctaaaacttatgagatctaatttcaccgtttcctattgctaaagatcacaaattagaaaacacgttggcaaaaggtacatgaaaataagcactcttgtgttgatcagagcataaacgtataatctcataaactaataaagatttctaaataacaaagatttctaaaacttatgagatgtaatttcaccatttcctattgctaaagatcacaaattagaaaacatgttggcaaaaggtacatgaaaataagcactcttgtgttgatcagagcataaacgtataatctcaggggagaacaatttgcaactattcttcaaccctttggtcaaacgattctgcttctaggaatatagcttactcccacctgtgtgatatggcatataatcaaggttttccattgcaacaaaagattggaaacaacgttaagtatccatcactagtggtctggaaatatatatatattattgtcatccaatagaatacaatagactaatatgcaacttttagcatgaggatactcgttacatgctgatacagaataatctccaaggtagtcatatgtgtgcaaaaccgtacatagtatgctaccatttgtgcttaaaaataaaaagaaaacagaatatgggtcaatgtttttgtttagttttgtctaaagtaactttaagtagaggcaagaaactggtaacatgtaacagtgatcacccctgttacctctgtggaagaaaactagacagctaagggacaaggctgggaggcagacttgctttccactatttatcacctttatctttcaaatttagtaccatctacatttagtaccatgatctattcaaaaatatttattaaaaaaagaaaaggtatagtctagaaggaaaaaaaacataacagacacttctagcccaatgtcctgcactgggtgctatgagagcagaggaaagaaacacatatggcttctagacaacaccgtctggggcatacatttctgctattcgatcaagaatagttgtgcatcttttcctggaaagaattgatttgtttttatcaacagacctatgaatttagtggacagacctgtgaattaattcactggttaggttttcctttttacattggctgttaaaaagctataagccaaatttatgtccccctcagtgcaaattgggcagatttctagggcaagcatttagcactggccttgtccttggctctgtatcatattcctgtatttggtttgcttttccacctgtttctcatgttggtcatctttcctgtgtatggccataccatcctgaatgtgcctgatcgcatctaatgttggtcacctctccttattctttgcttccttataagccactaagcagcctttttggtgctagttagggtaagtgcgtgggtagtgaaggagggaggagggagaggaagaaagaagatagaggttataaagcaaagcatatcctttttcttggcttcatcatgtagattaagtgaattgctctcaaagcgtggtccttaggccggcagcattgtcatcaccttatgttgttaaacataaaaattcatgggtttcatcccaacttactaagccagactttctgtggttgaggcccaggaaactctccaggtgatttttactcacattcaagtttgagaaccacaggaaaacaaaaggaaggcagatttctaagcgtaaatgcaatactaaccgattgcccccatcatgcctgttatgttggtcaagataaataatactagctactgcaataatcaatccctcaaattttattttttgccaatatcacaatccattgtagatcagttgtgggagaggtgtaaagagagctgctttattagtttattaagcaaaccagatctcttccattgtgagactttgcgattttctaggcccttggacatttcctctggatcccctgctgctaagaaggcaggagagggaggaaagagaagagactttagcagccagatctggaagaaacatcttttctgcccacaattccattggctagaagccagtctcatggcctgtataactgcaggggaggctgggaaatgtgacctatcgatggagctaagagcaaaaggaaatggctttgatgaagccctggcattgtctctgcacacccgagaacccaagtgaatcccaaactccacgtccaggtcatgttttggtgaacatcggttttcagtttccttttctaatcaagttttaccttttttttctcgactctagcactatgggactgagtaacattctctttgtgatggccttcctgctctctggtaagaacctttcagctttgttaagtcctggaatcctactgtctcctgatgagtctgaccacagcaagcccaggcctgagacttggtgggttttactcactttctactgagcattgtacaagaccacatgcaaaaaagactttcctggagaagaaggaagtgttatgattgagagcagctgatggcaggcagctgggatggagctctcccccccgtgtgcttcttcctcctctgcagtctcacatcagtgagcctagatgctcagagtagggtagcctggcccatcccatggggatgggggaaggctgctgcactgaggcccctgagacttgactcttttgttccacacatattctcttctggtcttctctgaccctgtttctgtctttctcaggctcctaggaaacaactgacagaattccaaaagtctcccttcattcggagcactggctttcacgtccctgacttccctaccctctctcactcccttccctacagcccatgcacatacctcatggttgccacggcttcctgacaactatggatgttcagctaattgtgtcagctgatttatagtggagccaatgaagctgaagcttcagagccctccatttgcacaaccctttctaaatccccctcaagaccctgtgaagggccccctagcagtgtggtcacctgtcttatgctttggtaaaatttgaataagtaagatattgtaaccacaataagttatgaccactgtctccttcctctgcaacttttccctccatgccattctcctgtctggtggtgttagcagtcaggggcattttgtatttgaattctacattctttttcttaactatccaccacctcccctcaaaattttaacagcatccagcctcacaaaactcagatcttccctgtttacagttccactttgagtttcagtttcttcatctataaacaggagttggctgcggtccctgccatgtatcctgtgactcagtgtctcgtagttactcctggcccaccccttcctgctgctccttgtctccacctgcaggcctgagagggaagccaccccactaagacagggaggtgaactaagcctgaagtttggctacagcacccacaggccaccagccatgagttcacctcctccagatggccacacaccaggcccttggccactgtccccatgtctgctgtggatgatgaggagtcagggaactacaaagagatggtccctcagatccatgctggctgggataagccttttcagatttctgtttttctgcttagcaccttgagcttgtggagtccttgagtgcaaggtctgtagatgtgccagctgatcactgacttaggtaacaacagcagcttccaacccccagggcccatgacctgctaccttagctcctggggatgtgggaggtatgtgtgtgtcagagagcaaggcaagaagactctagagaacattatccagtaagattcccttctcatcccacttcttatttatttattttatttattttattttttgagacagcatctttctctgtcacccaggctggagtacagtggcacagtcacagctcactgtggcctcgattacctgggctcaagcaattctcccacctcagcctccccaagtgctagaattatatgcatgagccatcgcacatgacttattttatttatttgataaatgcatatatacacacagtcatgaatcgtttaacaacaggggtacgttctgagaaacacattattaggcgattttgtcattgtataatcatcatagggtgtccttacacaaaactagatagcatagcctgctccatacttaggctacctggcacagcctattgctcctaggctacaagcctgcacagcatgttactgtgctgaatactgtaggtgttgtaacacaatggtatgtatttttgtatctgaacatatctaagcatagaaaagatacagtaaaaatatggtgttataatcttatgggaccaccattgtatatgactgaaatgtggctgtgcaatacatgacagtatatgcatatatatatatatcccttactttgtgcctggtactgttctaagtacctcataaatattaactcatttgagcctcacaataactttctgctttaggtcttgttgttatttcccattttaagatgtggacactaaagcccagagaggtgaagtaatttacccaagatcgacagagctactaagtggcagagcttggattcacacccagcaatgtagatttagcattcgttcacttgactcttctcctaactcttgtggtaaaccatgaataagtggtaagacttcttccatggggcctgaacagctttggtggataatatagcttctgcctcatccgtgttcatccagtgcctcctccccatcacctgcagctgacacctcagttgacccaagagcttgggcccaagcccttctcatcaaagtgaccagcccagctctcaagatctgggagagaaggaagaaaaatgccctggaaacacatttccagaaaacactaaactggaacaccatttcccaccaaattttctgactccgcacactgaaagtgagaaagtaaagccgagacactctatgaaaactgagttcaggtgtcacttttgcccttgatttgccattgacacttcttagaagtttcttagctcctgagaaaagagttaccaatattgaaagcaacaacctcaaatggtaaccgtttaagttttatggtggtgagagaataagtgactatatttttggcagtacaattttaaagtggaatagaaagcccatgacatcagatcagaaaataacattgccagtaattcacacacgatgaaaagcaacaaaaaatcagattctatttgaattctttcttctcagggcacacctctgcttactgggctggtgaacagtgacctagccacagggccggcttccaaagggagaaaggagatgcaattggcccacataatccaccctcaaaatgtagagctgaataattcatttcatggcatagaaatagcaatacagtgaagcaattctgtttaacttttccctcccttatattttgtgtcctctgtcatggaaatttgacacagtagtatttgctgcccctgctcttgaggataaaattggatgggagtttaagactgaaacgggcacctgtggccttgcagaattaggttacagtttgtgccttgtatttacaaagcgaaaggaattcctagtgccacctgcagaggcacttctaactttcaagctctgtttgccactgtcctggcacctccatcacacttttaggctggagccagagaggtttttgaaaaatcagtagctcccacatcaggaggaagtatctttccagtttgagttttggtagctgctctctttttgtctgagggttctctgggtcctagggctttctcatttctcttgaacaacacctctagttaatttcatgtacctggagtggtagttggaatatttcttcactttaagatttttttttttttttttgagatggagtctcactctgttgcccaggctaaagtgcaatggcatgatcttggctcacggcaacccccgcctcccaggttcaagtgattctcttgcctcagcctcccaagtagctgggattacacctaccaccacaaaatacaaaaatacacaaataatttttgtatttttggtagagacggggtttcaccatgttggccatgctagtctcgaactcctgacctcaggtgatctgcccgcctcgacctcccaaagtgctgggattacagacaggcatgagccactgcgcccggcccaccttaagatttatgtaagattggctcaaaagctcattcctgtggaaaggtccactgttttcctcccaagatttttgcagatatctgcgtgggtggttacttttgactcccatttcctgctgttgttgatagccctcattaaaaccatcacctggaggtgaatagacagtcgagacctatcattcccaaagaattgtcatggagcctaatagttctattggattcacccctttatgttaagccaccatttcagtgtttttcaaaatagatatatgttatctagtagggagtatcttacccccaaattagttgattgtttcaggagggcttttagtgggttccagagaaaatgagcaatcagacaagttgatttagtggaagacagtcactgaataggatgtgtatagggttgtttgggagcaagagtgaaattggtatggaacagagaggctcccaaggcaagcagacattttttttggaagaagcaagtgtttgagagactgtggcttatttttcctttgtgagaggggagttttaataccatttccaaaatatgtaacctggtattttgtccccagaagtactgttgagatttatggaagcaaaaaactctgtcacccaggctagaggagtgcagtggtgctatcaaagcttactgcagcctctaattcccaggctcaagagatgtttctgcctcagccacctgaatagctggcactataagtacatgccaccatgcctggctagttttttttgttgttgttttgttttgctttagagacggggtctcgctttgtgcccaggctggtcttgaactccttttaagtgattatctcttctcagcttcttaaagtcctgggattataggcatggcctatctatttttatgttttataatttcttgtactttttgatgttacttcaaatatctttttaagtatcctaaatatacttatttaaattttttttgagtaaatttatctataaattattgattttatgtcgatagacattgttctctatcattaataatgttaaaaataaataaaaaaacaaaaacaagtaaatcaattaatgcttaccacaggccagtatttgatccaacactaactcaaatattcatttctttaatcctcacaacaaacctatgaggtaggtaccattattgttcctgctttttgcaagaggaaactgagacacagggaagttaagtaatttgcctatggtaacacaggcagtgagtagttgagctgagattgaactcacgctgtccagaatccatactattagttataatagtgtactgccctatagctttctgtttcacagctacatggcattactttgtatggatgtatcattatttgttaaaccatttaacttatttccagtgtattgttcttataaacaatgaatacctgtgtacctctaattttgtgcacatgtatctttttgtagaatgaattcttaagaaattgagttgctaagtcaatgcttaagcccataattaattttcttacatattaccaactgtcctccaaaaaggttgtaccaatttagaattttaccagcagtaaattcagcagttaggacccattttcctaacactctcgcggacactgggtattaccagtattttttttaatacgtgccaatcaaatgggcaaaaagaatggtttctcactgaggtttaaattgcatttccctagttattcttgagatttttcctttcctttcttcaacaattacttattgagtgcttcatatttgtaagggacaattgcaggtactggaaatgtcacagtgaggaaaagtgacaaagcccctgctgtcatggagcttattctaatgggagatgtcaggtgctcagctgagctgggagagagagagctgagttgtcaggtgtcagaggagccaattatagcagcaaaacaaaaataaaatagttcagcttttaatctcttactacgacggtataatcaagaggctaaaatgggaggaagggcagactctgcctgttccatttccccacatagagtgagtataccagtcgagggtcaggtaatcagtgcagacttagggggtcgccttaccattgaagaagccccaaatgaaaggctctagcagttttatggacctgggggtggaggaatccaagggtggggagaattcatgaggaaaatgaggtgagagggctaggagtggaaaagtacaaagtactgagttagcgtggggaatagtgtctttagggctaggagtggaaaaaatactaggtactgagtcagagtggaaaacagtgtcttcaaggcagggagtggaaaagtgctaggtactgagtccgagtggagaaaagtgtcttctctatgatgaggaggcttcagcagaggtgcctgaagacctcaccccagagcctcagataaagagacctaagaatgagggtgcctgggctaagattgcaagtatgtgaaaaagcatgactggcgggaggctgagatcttgattgcagcccccttcagagactgccatgcactgactgtgcaccaagtctgctgtagaaagggcaacttcctcagcaaggcttgtcagattaagcctctttaattgcctgtggtcaggtctgaaaaatcacacatagatttttaatcagaacccagacatctcaggagagacagacaataaccaaacataccgtgtcatgtcatgtcatgataagtaccacaataaatataagtcagcatgagggacagaatgcccaggatgctatcttcaatagaatggttagagaaatctccctgggaggtagcatttaatgaaagacctacatgaagtgaaggagaagctatgagactgtctggaggaagaaccttctggacagagggaacaacatgagaagaggacttgagacagagtgtgtgatcttttggaggaatgtcaagggaggcagtgtggctggggagagtaagcaggggaaagaggcctgataggtactggggacccaattacatgaggtcttgtaaggccaggggaaggactttggatgtagttctcagtgtgaggggaagggatctggatatatttttcagtttggtggaaggcatcagaggcttctgaacaggaggattatgtgattggagctgtatttttaagggatcattttggcttgagaaactagacccggggacaaggacggagcaggcagatgagttaggagacaattacattagtctcctctacccttttcttaacatattggagttcagctctggctgtagtagttctagatctcctcagacacacttgtgtagagcctctgttgggtattttgggtacacaaatgattcatcttggttatacagatgatttagatgattgtagacagaagagggttgtctggtcattcccagacaggggagcattccttgagatagagtagaggaaggctgaaggggaggaagacagtacctgttgctatctagatagagacatccagcaggaagttgaatacaggtatctgaaactctagtgaaagttataggctggcaataagcacctgggagttattagcttttacttgacagttgaatccgtggggctagaggagaaaaaccaggaaagtatggagaataagaagaccaagaacatgcactcaaggttaccaaaattaaagagtgatttgagaaaattaacaaggaaatcagagattgggaaagaatagagcatttcaatgaggagagatgccaacacttgcatttgacacagcggtcaaatgagttgagatctgaaaagagctcaagccttggccatggtgtgaagtcaccaacaacctttgtcagggagtttcagtagagaggtgggggtgggaggctgggaataaaggcagcaattgctgcttactctttcagggagtttgactccaagggaaagagaaactaaaagcagtagcacaaggtttgtgtttgaagtaatggaggtgaaccaggtgaatagcctggaggccgagtgaagtgagacaggacactgcagatttggaatgtcaccagtccgcacaactgaataatttcctccagaactgctcaattgcccagttgtaagaacagatatgtagaccaaaagtagagtgtccccagggtaaattttatagagacaaaggggtgtgtttattgaagttgtggaaaggaataattacaaagacatactattgttgcattgtccaatataataaccactagccatatgtgactacttaaatttcaattaattaaaattaaataagattaaaaattcatcttctcagtcatactagctatgtatcaattgctcaatagccacaggggctggtggctatcatattgttcagcacagagacagagcatttccattatcactaagagttcttgtggaaaacactgcactacagggtctggataaagctgaggtcttgattaagttgaacaacagttgtagaaggagtaagcaagagcaaaacctggatgaataggaggttgtggacggagattagtatattgagattaagattctagggactgagctgctccaggtgaaaagtttcagggttatgtcataagaaggtggggggcagctgctgaaatagtctgcgggtgtagacctgtggagttgacaagatcaaagaaatttgaggcaaggttgttagactcattcatgaagaagtcacccaaattgttagcaagaccttgcatctaatgccaaaatcctcatttagcaaggtggtagtgacttagtagctacaagcaatgagaaagtcagacacctcaaaaggggaaggtgttgctcaaagtccccacaaagtgtgataaaacaaacagtagctggggctggagcaagtggcttcctttgggtgaagccagatttcactgaaataataacctcagggaaacagtcaatgaaggggttaaagatgtgggagagtttccttgtagtaagtaatggaatgaggctttcaaagggccaagtaaaactttggaggaagtttagtaaaagaaggaattttttttagtacagataagcataggaacataaagaagagataattcttaaacatataagatatgcatttggggatagcagccagggaacactgaagtcccagtggggtcagagacttcataaggctagcaaattacagtttttgagtggcattccaacagtagagtgtattgctcaggaagtccttaattatcctttgaaacaaattccttcagctgattacgaaggcatctagctggattcttgagcgacttgttcctgacatcatagcaacccattgtaactagacttcgaccattcctcttacccaagtgctggggaagggagagattctcaatgcttacccacctatggaatcccagtaagtccagttgctaggtggcttgaggtctggggtcataaaatggaaggcctgaagtcatttggtgatcacagaccttgagccaaactttccccatttagtcagagaaaggattagcagcatcccccatgcctggctctgtgtgagatcatggaagccagtggttggtgaggtgctatggagtataaattgcaaaatactttcagttccactcagaatggatttcaaagtgatttccaccccatggggaggagagggagtctgaggagggatggatggaaaaaaaattttcatgtcattttctgtgatccactctggagacagaggcagagattctctacaacagctgctcaaactatagctcttgttaaaatggaggttctgaatcagtaagtcttgggtggggccagagattccgtgtttcagaccagcccacatgtgacgtgaatctcattggtccatacatcacactttcagttgctaggtgaagaagggagcactcgatgagtggaagagaaagccgttgtaatctttgggagaaggggcctgggtcagcggagttagactggtctgtgagtggacagaatggatgggaaggaaagaagatactgtgaggctctacagaaaaaaaaaaaaaaaaatatatatatatatatatatatatatatgtaaatcaagaagacagaagcagctaaagacgaagtcatttccaggtccagaaggcacaactgacagctgagtaataacataacattgactgttaattggcagaatttttaactgtgtgtttggtttctccatcaggtcatctgtcctatattacatgacaatttagactaaaaccagtatttcctcagagacaatgctagaagcttttacagtagggggcactcttgcattacattaagagctcagcaaagaagatgcagaagcctcaggtttgccttgtaaggtgattcataaacacactaaatcttccttaggtctccctttcactgtcagggtacgcatatagattttccttcctccctccaataccggtacgcatcctctacaggtggtgcattttatacctcaagtacttcacagggtcctagtgagtgtagtgaaataggcagtgattcatatttgtgcaaactcccactgatgcctgctgtctgcttccctaagagttcaagaccaccaccaaccccttgattatgtgttctcactgggccactctgtacacagtttagtttgacaagtgcatgtcactgttatctgtccttctattccctctttcaagagaaaccacatcaatttaattactcccccacttagaactcttcaaatgaagctcctctcatctctctcatcaacccatctcctccctttcctcctcaatgtcaacatgccttcacataaatcctgaatgatgaaattttatttagaacttacactaacttcctctccaaggtggcatctaacttcatattaagtaagaaacagccttcccactctccacccccgcacttctcacccaccactgcttactttttttttttttttttttttttttttgccaagtctcaagtaattctgtaacctagaaaaggtcctacacaaaccccgtgatcattcacatttaagtagttgggtggcccacatccttcccacaaaccccaaagtgtcctcaaggactaaagcctttctctcaacccttccagcatgatgtctatggttgtaaaattgtccagggtcagtgcatactgggagcagcaagtttgtggtgcctggggtttccccaatactcccaaagcacatcctcacctgcccatctatgattcattttcagcatttcactcatgtgccttaaatggtcattgaccaccacaatccgaaaacagccatcaaatttgcccagttctctttctgatctctgaaagagcttagagaggtcactgaaaataaaggccttggttcactatcgaagtcatttctaaagcatttgacatccttggaagtgctggccatgggagcagcagtcataggggaagttctgtaaagggagctatttgaatttcaaagatgttactcaacgtgattccccaactaatgaagtataataaaggggggctataatttattaccattatcagcaatcttttcaccatagcagaccaaggaatatgtggatgggaggggaggggaaagcttttggtgatggtgtagaagttatggaacctgtaacagctacagtgatgaaaactaaaattaaggttataggaaggtaactggtgggtgaatgggttgtctaactctactggtttttccctgtcttgcaatttaaattcacagaaccacagtactagaaagacccttggaacatttagtcaaccacttcattaatcagatgaggaaactgaggctcataaagattgcagtttgtacaaggccacacatttagtcagcggtgaagcaaggacaaaggtcctaatctccagatgccaagcagatgtgcacagttccagagcttaatatcttattcttcagcatgattactgataagatagtatctgggtattgtataaagagaaatggaggttttttcccctttcctcttgtttctccctccctaatccttaaccttcttttttaggtgctgctcctctgaagattcaagcttatttcaatgagactgcagacctgccatgccaatttgcaaactctcaaaaccaaagcctgagtgagctagtagtattttggcaggaccaggaaaacttggttctgaatgaggtatacttaggcaaagagaaatttgacagtgttcattccaagtatatgggccgcacaagttttgattcggacagttggaccctgagacttcacaatcttcagatcaaggacaagggcttgtatcaatgtatcatccatcacaaaaagcccacaggaatgattcgcatccaccagatgaattctgaactgtcagtgcttggtatgtggtcaatggtgtgtgttcagattcttagccttctcagatgagactgcaaatgagttagaaaaacactggagggggacttgaggggcccaggggaaaaggggggtctatagagagaaggcagaggacagccacttctgggaagtgcatttgaagggagtgtagagtctgggagtagggaactgaaagtcttttgtactttttatagtctgcttctgaaggatcagtaaaaatctgctttggggaaaaaatagagctaattgaacaaagataatatggctaattacctatagtaaaaaccatggataatttggccatcacaaagtttatataaccataaaggcctcagatgtcttacattcattttttccttgggtccaagatttttcacctactaaatctttgcctggagctcctagcaaagcggacagctgacacatttgggttttcccttcagcctcctctaggttgcttatgagttgtttgctgccacaaccatgagcctggtagacagaagggaaaaaaacccaacaaacataacccacaaacttacaaaccagctcctctgcttcacgagaccttggaaggcctaaatgccactacagatttttttaaaactatcacacagtaaaattatttttttttgttttgatatactgttctactgattgtatagatcttgtatagatttaggtaaccgccacaggacatagagcatttctatcaccctaaaaatttccctcaggctgtcccttcatagagtcataccctgtctgcactcataacccttgttgggcatcctatagttttgtctttttgacagtgtcacataagtgaagccacacagtatgtaaccttttaagcctggcttctttcgtttagcgcgccttcgagattcacccaagttgttgcacatatcgagcttgtccctttttattgctgagtagcattttattgtttatccattcaactcagtaaaagacattgggttgtttctggtttggggctcttatgaataaggctgctgtaaacgttcatgtacaggtttttgtgtgaacataagttctcagttctctagaggaaatacccaggtgtggtattactggatccaggttaatttttgatgaaacttgaaaaggcagatcaacacctattctaaaaccatagagtaaaacagaagcaaaagtaaaaatagaatggagagctgctccctttgaaccctgtgtgatttaaactaggctgcagggctttaggaatagttaaccaagtgctaaatccgtgttttcaaaatgtggtcaggtaccattggaaatgttttaggtgggacacagataagcattttgaaaagccatgttgtatttgttttaatgtatattagaaaaactctaacttacgcaacatgtgatttcacagatcttgttaatgaagctaaacacggtctggcaattcaccttctacaggccacatagagtccaagaagagtgctcaaatagtacactgatatagcaaaacttataaagatgacatgcaaatgacagaccttttagtaagaatacactaaattataaattagtttgtagaacctgcaaactacctagtaactataaaagaacaagggattttttctgacagaaggcacatgacacaggtctagggactccatgccagtgatcctgaacagccagaaaagtgagaatggcaaaggcaagagaaacactgtgtttattaagatcatgtatttttccctaaaatagctggatttggccttcttcttagagtatgttatgaagacactttgatgctcatgccaaaaatcagtgttctgaatttcgaattccaaaatatccacccactcacttaccacaatcctgcttgggtttctgaaagatatgacgcagggcatctcagcaccatgaactctgtcagttcctggtgagactccagctcaattccttcctgctctcttagtctggggagctggaatgtgccccatgggacacctgggccctagagtcagaccacttctccttccaaagactctactccctggaaacagtggcttcattgtaaatctttggtgactcaattacagccctcctgtcacttagagagcacccctttgatttggataagcaggaagtaagcatggctgcaaactctattgttgaaaaataaacatgaagtcattatgtggcactcaccttgggctgagggtcacattttagacaccctgaggctcccaggtgtgccccaatgagccccagatcaagtacccagttatttgctattccctcctagatacatctaaacttagattgatttttttttatctctcttctgctttcagctaacttcagtcaacctgaaatagtaccaatttctaatataacagaaaatgtgtacataaatttgacctgctcatctatacacggttacccagaacctaagaagatgagtgttttgctaagaaccaagaattcaactatcgagtatgatggtattatgcagaaatctcaagataatgtcacagaactgtacgacgtttccatcagcttgtctgtttcattccctgatgttacgagcaatatgaccatcttctgtattctggaaactgacaagacgcggcttttatcttcacctttctctataggtaaagctgttttccaagactatttctttcagcaggtattatacacaaatgcttaaggcagatcatccaatgtccccgacttgctaggaaacctccaactgggccattttatgacgctgttaggaaggacccagatggaggtctcctgcttctcctgagtgatgcagggtccaggaggctacgagcctatgttgcacttgaagaaatatgcttttagccctgaaactgactcagtctcttggtttacctttggatggaggattctgaagttttgatttaaaaatacaggattcctccaggctagaattctttctttgattacaacacatacatgcgcttgcacacacacacacacacacacacacacacacacacacacaccatgcatacatgcagacatacaaatgatatttattgtgagtatagaaccatttgggacattattggtcacaggagtgaaaacaaaaagatatgacaccccctctgcccttgaggaccttccaatagaatcagaaccctgtaatgtgcacacatgaaaaactggatttttaaaaggttgaattggaatctaaattttattccatggaaatatctgactaaatttaaaataaaagtgactggtaatgagatttatgggcattcagaggtaggcaagatccctgagggtcagggaatggttcctaaaggaaggggtaccttgtaacatgtaaaataaattattggggttaataaatgtggtgaggaggggagggcattctggatgacaggttcccaaaactgtggtgacttccgtagctgaaaaaatttgagacagtatctgggctaagcaggtgagaggaccacagtggatcagctgtatctgacgtaagtgcaggaggtatgtcaaagaaagccttggaggcagaaatgcttgtgtgttcacaagtattcttcagggacaagttcagtggaggaaaggattgaaactaagcagtagccactaataggagcctgacattttaaagtcctggctttacccaggagggcatgtgtctatatttgactcctcttttaagaagctgtaactgcaagattccctcctggaataaaggtggtctgcatctaccctgtcccatcactgcctgtgctgaccttgacacccacatctgccttcttcttaccttgaccccttctccagcgatgatttcttggcttgccccctccagtgacatccatccaactccttgctccataccctggctttgtcacctcctttctcccagtgtcttgttgttcagatataacttggtctgtgaacagcccacggggccagtccccatgaaccaactttacaactgggccaatctcatctcctgctactgacttcttcctattcagacacttcagcctctgagaatccagtaaatggtggagccaactcgtcctgtcccagttgcttctcctgtatcctctcttggccagatagaagcctctccaagctatgcctgaagttcagtacctccttcaatgtgtaattagtttgattggtggccacaagatggccatatatgacatgccccagggccctctgttacggctcccatagtctacaaattaacaggggcttgccaccactataacctcatcatggctcaccttcctgctgcttctcaactactgttctgccaaacttcaacaggtacccccatcttcagaaatgtttcagctctagctgcctcaggaagatggggcttgcctctctgggtttcccattctatcgcttgatcagagataggttagaccctgagtcaaggggccttttttgcatgttaaaaggtagcagcctccacgttagtaagtataacccctaaccccctttactgggagtgccaaactggctcaagtggaatagactgggacagactcaaaagggattaaatatggcctgcaatgccaacaacttcttaacatcccagaaacagggcatgtgtctacaaattatagctaagctaatagatcagctggtcctaattttcctgaaatttgggattagctaccagaactgttcccaaaaatgtctttaaagtgggcgactccgttctaagttttccccacaaagcctgttttccaactccccagaaacttaggagttctcatgtaaggaagtagttcctgaaggcgtgaaggttcctcaaggcatgaagaaacatcaaaggtttttcagtagatgagatatgctgaaagccatgcagaggaaacctgctgtgacctcagtaggaaaaaactaaacaaacaagcaaatgaaaactagaggtaggggcctgtggaagctgttccatttgtccaagtgagaggtgtctggagattatagtggacagaagaatcatcacgagaggaacttcagggcttgggaactgactgcagaggggggcaggatagcaggcacggcacaaatgactgcacgtgcagagcctcagcacagacacctcacccagattccagaatcacgggccaggctgaccctcttcttcctgatcatggtcggtgttatccccacctccatgaaggcatggcagctcagtccaggcatttggccagaggcatgggctcgattcttaggtcgctgctgaggccctgagcctgggactttctatggcctcctattgtggatttcaggcttctctggccttagagccctggggagaggctggcaggtaaataaagagaagagcagctagcagaaaccttttgtaaatgactctcctggctgattgaaaatttgtggtcatttgtagagcttgaggaccctcagcctcccccagaccacattccttggattacagctgtacttccaacagttattatatgtgtgatggttttctgtctaattctatggaaatggaagaagaagaagcggcctcgcaactcttataaatgtggtgagtgagtccttgtcctccccacagactgtcactttgcacctacttcccaatcggctggctgccttccggagcttgttggctgagcctagactggcaaaaagtcaggaagttgttgggaaaaaaggttttcccttggagttttgagcctatacagactggcagtagcagataatgctgctcttggacttcaaagaaaggcgacatttctaacctctggtttacaaatgtacttctggtttccagggaaaactgattattacttgctttatctacctcacttcatgaggttactgtgacatatacataaagtaaaatggtgaaaccactcctaaatgttaaagattgtggacctggtggtgtttaagcagggatatttgctaaatgaccacaagaatcagcttctcgtctctaaaaaaatctaggtttcttatgaaataagttagatgaattattgcccattgacttataacaaacaatattaactttaactaatttctaagtaatacatatccattatcatatataccaaaaataaaatcatctataactccactaataagaaaaaatgattacacaaacatttttggtgcctatctttaagatttttctgtgtatcaatctatgttgttttccataattaggattatcataagggttatttttcacaatttggataatatatgtactgtgttctaattttgttatactaaatgtagcaagacaattttcaatgtcataaatatcattctacagcatcattttaaatggctgcaagatattcccttttgtggatacaccataatttatttatttaaccaacctcattttttggacacttgagttagtccaatagttttgttattataaacaccctccccactgacttctgttataaaaatgtttcatggggacaaagtggtccctaactttataataatgccatgcctttttgtagtttggtctggttctaagctaagattggactttatctcagtaattgcctccagtagtaattagtttgattggtgctaataattaaggtaaccttctaactcacttatggtagaaagcacaagatgagtattgcctctggccagcatcttgtttttcagtatactgattttaaaatctaactagaaaatagatggatgacattagcagtcattcaatgcatcctgctgtactttaaaaataagaaattggggagcaacgatcgaatttaaataaattaacacaaagcatgtggcagagccattcaaactgccaatgtatggagtgtgctgcgagatttctatgatataaaagtataaaattcctagcacagatgtaaagacatatcatgcttgtccaggctttgacttttcaaggtgagagttttgagcttcactttctttcaacctcattgccatttaaaattagtcaaatatgaagaagtgacttacatcttgggaataagctgtttgctagatttttcttcacattagaatgatcagcttacaaatgaaacaaagaagggttggagaaaaagattaaggatgtttcttcctccatgaggcaatcagaaaaaaatcaggagactagataggggagataaagaggatatgtgtgttcacatgagagaagttagaaggtggttaaataagctctgtaggtacagatgagatggtcagattgggctgagtggcacatacatgacccctaagaatgtaatgaagaatattggtaagaaaaagttatttattcagacagtcatccatgccactgagtttgatcaaagagagaagccttgctatcactgtagggagggaggtgcaacaggtataactatgccattatagatatgatatatttgtaaatttggattctgtaacttcagcaatatctgccattgctttgtgggtactcctggcattggctatgtgataggtaaaataatgccccccacaagacgtccacctcctatactccagaacctgtaatatgttatcttacatggcaaaaggaacttcacataggtgattaaggcaccaagcttgagatggtgagattaacctggattatccaggtgggcccaatgtaatcacatgagtcagagaacctttcctagctgggatggagaaatgaactggaagaaggagagatctgaaacttgagaagctcaacccagcatttctagctttgaagatggaaggaggaagccatgagccaaggaatgtaagtagcttctagaagctggaagtggctctcagttgacagccagccattaaggaaattaggatctcagttctgcaactataaggagctgaattctgccaagagaccaatgtggaaacagcagatccctccacagagacacaagcttactgataactggtaggaatttctccaaaagtggagcttcctcctactccagtgttaatccctttctcagaggagacggtcctcaaactaactaacttggcaccaaaagtcctatccagtgttttctcattatagtttttctatgcctcaactgtatatatttacccagtttaggctgtttaaatgaataaaaaggaaatgccatagttattctagccagtttccaatctctcttctctttttttgttttgtcaaatagggcagataaggcatgagaatttataactatgaattactgtcttttcccaaacagaaatcaccctatcagcttacccattgggagaaaaactaaaatagctccccctgaaattttacttcctcatttgggtcttgtgtgactgaaatctgtatacaatgccctagcaacaacggtttttacagcttgcctccctagaacaaacctaggagtctcagctgtttcaggaatgatttcttaaaggtaaagtgcctttttcaaaagaaattattattatttttttttaattttttttttgtgtgtgtgtgagacagagcctcactctgtcaccaggctggagtgcagtggcacgatctcagcacactgcaacctctgcctcccaggttcaagcgattctcctgcctcagcctcccaagtagctgggactacaggcacgtgccaccaagcccaggtaatttttgtattttcagtagagatgggttttcaccatgttggccaggatggtctcgatctcttgacctcgtgatccgtttttaaccaacatttaaacagaaatattcacaggcttaaagactgaaagttagtgatatcatcacatttccccttcaaaatgctgaatttataagcaaatttaaaagtttagaatctaccttttaattgtctgctttcatttttttgacagtggctttttttgatatggtgactattttgtcatgggtataaaaggataattcattttgtgttaatctgaagacatctgaaatactgtattcaactataagtacctttttttacatttataagattctttttcaaaatttttatttgaatagttttttgggaactactgaactaaactaggtggtttttggttacatggataagttatttagtggtgatttctgagactttggtgccacctgtcactcgagcagtgtacactgcaccagtgtgtagtcttttatctctcacccctcccactctttcctctgagtccccaaagtccattatattattcttatgtctttgcatcctcatagtttagctcccacttatcagtgaaaacatacaatatttgtttctccattcttgagttacttcacttagaataatggtctctggttccatcaaagttgctgcaaatgccattattttgtttctttttatggctgagtaatattccatgagggatatttaccacattttccttatccactcatgggttgatggacatttaggttggttccttatttttggaattgcaaattgtgctgctataaacatgcgtgtgcatgtgtctttttcatataatgaattattttcctttgggtatatacccagtagtaggattgctgaattaaatagtagagttctacttttagttctttaaggaatctccatactgttttccatagtgtttgtactagtttacattcccaccagcagtgtaaacatgttcccttttcaccacatccatgccaacatctattattttttgattttttaataatggccattcttgcaggagtaaggtggtatctcatggtggttttaatttgcatttccctgatagttagtgatattgaactttttttcatgtttgttggccatttgtatattttcttttcagaattgtctattcatgtccttataaacaccattatttttaagaagaaactttacaaaaatagaacataaccagatttataaagcatctgggaactcagtcaattaagaaatagctcaagtaactgatgatgcttcacctgaaagaaggcctggagagaacagagatactgtcttcaaatatctgaagagctaccatgggatgcaaagattgagcttgatggtatgactctgaagggcatctctatgaatgaaggttatgagagggtataaggaattaagagagacttttctaacaattaaaaggtcttttaggccaggggtggtggctcacacctgtaatcccagcacttttggaggctgaggcaggcagatcaccttagatcaggagttcgagacccgcctggccaacatggtgaaaccccatttctactaaacatacaaaaattagctgggtgtggtggcaggcacctgtaatcccagctacttgggaggctgagagaggagaatcgcttgaacctgggaggcagaggttgcagtgagccaagatcacaccactgcactccagcctgggtgacagaagatcaagattccgtcttaaaaaatataaataaataaataaataaataaatagtctttaaaattgtatagaagaagtagacttctgcttcctccaacaaaggattaactgctataggaattgccctctttccataaacaactagaaagcagacaaaatatatgaaacaactgttttcagagatcggatgacagacagcagaaaactgtagtccctgagtgaaggaaagaaaaaatgagataagccctatgattgctctagtttgctgcctggagccagtgtccaggcccctctgaaggcaggggagccctgatactgaactaggaaaagacattgcaagaaaagaaaactacaaacatctctcgtgaaatgcttaacaaaattagcaactaaaatctagcaatatgttaaaagtataatacatcatgatcaagtggggtttattcaagaaacacaggtaagctcaacattcaaaaatcaggcaataacctttactacataaataaactaaaaagaaaaaaacatatgatcatgtcaatggatacaggaaaaacttttgacaaaattaatacccattcatagttttaaatggaaagaaaagctctcataaaaataggaatacaagatgacttcctcaacctgacaaaggacatctaccaaaaattcttctgttagcataatatttcatgatagaagactgattgcttttaccttaagatggcgaatgtggggaggatgtctactctctctacttttgttccacattgtactggaggtcatagccagagaaacaagactagaaaaagaaataaaagacatacagattggaaaggaagtaaaactgtcttttttcacagataatgatcatgcttgtagaaaatcctgaggaatctatcaaaaacctattaaaactgataagtgagtgtagcaaagacacaggatacaaagtcaatacacaaaatcaattatttctatatactaacaaaagcaattgtacattgaaaaaaattaatagcatttataatagcatcaaataatattaaaaacttggaaataaatttaacaaaacaagtacaaggtctatatactgaaaactatacaatattactactggagaaattaaagtaaaccaaaataaatggagacataggccatgtttatgaatcagaagactagatgttaagataaccattctctccaagttgatctatggattaaatgtaatcacaatcaaaatcctggtaagctctctaatagatactaaaaatcttactcgaaaagttatagggaaatgcaaagaatctacaattgccaaaacaattctgaaaaataagaacaaaggttaaaaatacaaaattagccaggcatggtggcgcatgcctgtaatcccagctactctggaggctgaggcaggagaattgcttgaacccgggaggcagaggttgctgtgagctgagatcgtgccattgcactccagcctgggcaacaagagtgaaactccctctcaaaaaaaaaaaaaaaaaaaaaaaaaaagaacaaaggtggacttaacctacctaatttcaatatttactatatatagtaattaatacagtgtgatattggtaaaaggacagacatatcagtcaatggaacaaaatagagagtcaaaaatagattcacactgttgacaaagctaccaaggtaattccatgcagaaaggatagtattttcaacaaatagtgttgggacaattagatatccacatggaaaaagtatgaacctagacacacacaaagtaacttatatattaagaattaaaatgaaaggacttccaaaagaaaacagaggagaaaatctttgtaaccttaagttaggcaagtcttcttagataggacacagaaagcaaaaaccatatcataaaaagataaaatggatgtcatcaatatggaaaacttttgttctttgactttgtttaaaaaacgaaaagtcaaaccacagacagggagaaaacgtttgcaaaatatatatctgataaaggacttgtatccagtatataattacatattgctactcattagtaagaagacaatccatttaataaaaggcaagaagaagagacttgaacagatacataacagaagaagatatacagatggccgatgagcacagtcacaacatcattagtcatcagggaagtacaaattaaaacgataatgagataccactgcacaccctctagaatggctaaaattaaaaggtctgataaacatcaagtgttggagaggatatgaagcaactgaaactctcatatactgctatacaacccagaaatcctagacatttaccaaacagaaattttaaaaaatttaaaaatatataaagactcatacacaaatgttcatagcagcttgcttcataataccaaacctggcattctaaattttcatcagttggcggtggtatatttatacaatgaaatactgcaaagctatagaaaggaatggactactaataatacacaagaacatagataaatttcaaaagcattatgctaagtgaaacaatccaggcacaagaagaatacacattatacaatttcatgtatatgaaatttgagaaaaagcaaaactattttaagtagattcatggttatccatgggatgggggaaaggaatcagctgaaaagcgaactattttggcttataaaaatgttctcgatcttgattgtggtggtggttacgtgactatatatattcgttaaaatcaccaaactctaaactgaaaatgattgggttttattatttattaattatacctccataaagctgattgtttttatcttttatttttattttatttcaatagtttttggggaacagatggttttcggttacatggatgagttctttagtggtgatttctgagattttgatgcacctgtcacccgagcaatgtccactgtacccaatgtgtagtcttttatccttcatccacctctctctcactcttccccccaagtacccaagtccattatatcattcttatgactttgtggcctcataaaagctgattgtttttaaatacacacatacacacataaaagagaacttccagtgacaggaagtgttcaagaatgctctatttagtaaagacagaatcacaaaaccatcagaggtattgttgagtggattcttgtggtctataaatacctccatggacacccaggttagcaacctgttggagtttacgtgggacaatagcatcatcacaacagtcagcctagagaaatttacatcccaagttgtgtcagtagcaagtccctatcaatagcaactcaggctttgtgaggtctagctggctagaaatttcccacttggccttgcccatgcaacattgtgtaatattcttagcaccatctggctagccgatttaggcatcaacatcttcaagacttcttctcctcctccttataaaccttgctttcagaaaaggattagaaactcttccaatcacaaaatgattgctaaaactaaatatattacccctcccaatggtattttttggttagccaggatagagatataagtgaaaaatctatttccagtgttagaatttaaggcacagtgagaaagggaaggcatatactttttgaatgcaagaaacttcttcccaatccccctgaaattgcatcatttgagtaactatctcttccatatataaagtcacaacaatttctctctcagtcccagaactttgaagccttttcaaactttccttcttttggtatctaggaggaatacatttttgaagattgttcttggtgtctttcaggaaccaacacaatggagagggaagagagtgaacagaccaagaaaaggtaaatcctgaccctgagacattgatgagagaggtataatccccagagtgcctgttacttgaataggcttatgcctaacatatgttgagacctcagcaaacctgaactaatggagagggagaggaaaataaaactagttaagaactggaagaaaataacctgataatggatgacagggtatccaatgcacaatgcccagaaagcatgacaagctctgtcatggtcaagtaaaagtcaataccaaagacttcagaggtggtgaacatgggcttcatcttatctgccacagtaaccccagtacctggcacagtgcctagattagtgggcatcctacatgtgtggaatgaataaatgaagaagtggggaatgataacatgtttgcttcagcctgagcatcttagtatttgctatggccctgtttagatgttcttctgccacttctttacctcattcttcagatcttgcctcaagcagcactttcttaaaaaccctttcccaaactagaaaatgtcaacttgttacagtgtcatgtggatcccttggctttttcttaataacaccagattatgcttacatatttgtgtaattatcttattaaactctataaactagacttaactaaatcctatgaagagcagagaccataccagttaagctcatcattgtgctgctagcacttagcatggtgcctggcatatagcaggttctcaataaatgttgaaagaatgattgatgcatgatgaatacataaaagttcgtggtgatcagtcctttcacaacgtgaagctatcagatagtctgtacctctatccctcctgagaaattaagctctcaggaatatcaaggctctgactgcatacccataggatcaaagcaaccctcagtcacaagcctggtttcagagatagggtcataacccccagggtgcagagacaaccgagagtacccagcactaatccagatataccagccactgtgattctagcaacaaaactaataattccgggcacccttggacaatgagaaagggtgctgaaatcctgcctaccctgtcacactcagtttcagaaatggtctggaagagcctgcagagggcaggcagcagagaaccggcagagggcatgggaagggccaggcagaaataaagggtagctcttgaagcatagatgacagtgtagaccgtggttcttttctcttgctttctccacctttctcttcaatagtttgtttctcctcattgctgttccaatggcaacctctattctgccctatcattgaaatctagaaaaagaaagtagctcaaatgtgaaatatcacctaatcttttcttctatttctccagagaaaaaatccatatacctgaaagatctgatgaagcccagcgtgtttttaaaagttcgaagacatcttcatgcgacaaaagtgatacatgtttttaattaaagagtaaagcccatacaagtattcattttttctaccctttcctttgtaagttcctgggcaacctttttgatttcttccagaaggcaaaaagacattaccatgagtaataagggggctccaggactccctctaagtggaatagcctccctgtaactccagctctgctccgtatgccaagaggagactttaattctcttactgcttcttttcacttcagagcacacttatgggccaagcccagcttaatggctcatgacctggaaataaaatttaggaccaatacctcctccagatcagattcttctcttaatttcatagattgtgttttttttttaaatagacctctcaatttctggaaaactgccttttatctgcccagaattctaagctggtgccccactgaattttgtgtacctgtgactaaacaactacctcctcagtctgggtgggacttatgtatttatgaccttatagtgttaatatcttgaaacatagagatctatgtactgtaatagtgtgattactatgctctagagaaaagtctacccctgctaaggagttctcatccctctgtcagggtcagtaaggaaaacggtggcctagggtacaggcaacaatgagcagaccaacctaaatttggggaaattaggagaggcagagatagaacctggagccacttctatctgggctgttgctaatattgaggaggcttgccccacccaacaagccatagtggagagaactgaataaacaggaaaatgccagagcttgtgaaccctgtttctcttgaagaactgactagtgagatggcctggggaagctgtgaaagaaccaaaagagatcacaatactcaaaagagagagagagagaaaaaagagagatcttgatccacagaaatacatgaaatgtctggtctgtccaccccatcaacaagtcttgaaacaagcaacagatggatagtctgtccaaatggacataagacagacagcagtttccctggtggtcagggaggggttttggtgatacccaagttattgggatgtcatcttcctggaagcagagctggggagggagagccatcaccttgataatgggatgaatggaaggaggcttaggactttccactcctggctgagagaggaagagctgcaacggaattaggaagaccaagacacagatcacccggggcttacttagcctacagatgtcctacgggaacgtgggctggcccagcatagggctagcaaatttgagttggatgattgtttttgctcaaggcaaccagaggaaacttgcatacagagacagatatactgggagaaatgactttgaaaacctggctctaaggtgggatcactaagggatggggcagtctctgcccaaacataaagagaactctggggagcctgagccacaaaaatgttcctttattttatgtaaaccctcaagggttatagactgccatgctagacaagcttgtccatgtaatattcccatgtttttaccctgcccctgccttgattagactcctagcacctggctagtttctaacatgttttgtgcagcacagtttttaataaatgcttgttacattcatttaaaagtctacattttctgctttggcttcaagagtactactcaacccttgtggtctgatgttccctgctctgtcctctgaatgtacttcctttctctttacatctctatggctagaagcctctcacgcatcctgtatcttctcctcctcccttttccctaccattatttgagaaaggaggcttgtatacttctatatgtttatctcagtaataagtcataaaaaatcaagtaagaatggttgtttttgaggacaactaagaaatctggaataaggaagggaagcttacttttgagtttgtaacctgtagtgtgtaattttttaattatgtacttacatgtacattaaacaaaagcttaatgtaaaaatattccttgaaaacaccatgattataaaataaatgcatatatacatacagcatgtgagaggagccaggaaaactctggaaaaaagaaaattacctagactctgtgagggcaggaatgtgtttaatttctctccaatggatcctcagacaactaagatagttgtctattctattgtccatctttttgtcttttgttgtatttcttaaagattccctcaactttatcttctaacttctgttgtatttttatttctgctatcatgtattcttttcagaattcttttttgttctctcaaaacatatctgtttaaagattgaatgaaatattaacatgccctttggtgagaacatccctcctttgtatattaaattctctgaactgctgtattctaagactaggggaaagaaaaagaaggttgaaagaggtcattaggcagaatagtactagctaacattatttcacatttaccatatacccgtcactcatctaaacctttaaactcattatcctatttaatcctcacaatgaccctgtgacgtaggtaatggaatattatgcccattatgctgatgagaaaatataaacacagagataagtcagagtaatttacccaacattgttaactttgtaagtggcagagctttgtaacaggcagaggttggaacagtttggagggctcagaagaagacaggaagatgtaggaaagtttggaacttcccagagccttgttgaatggctttgaccaaaatgctgatagtaatatggacaatgaaatacaggctgaggtggtctcagatagagaagaggaacttgttgggaactggaataaaggtgactcttgctatgttttagcaaagacactggtggcattttgcccctgccctagagatttgtgggactttgaacttgagagagatgatttagggtatctggtggaagaaatttctaagcagcaaagcattcaagatgtaactttcgtgctgttaaaagcattcagttttatgtattcccaaaaatatggtttggaattggaacttatgtttaaaagtttggaaaatttgcagcctgacaatgtgatagaaaagaaaacccattttctgaggagaaattcaagccagctgcagaaatttgcataagtaacaaggagccaaatgttaattgccaagataatgggaaaatgtctccaggccatgtcagaactctttacagcagcccttctcatcacaggccaagaggcctaggagggaaaaacggtttcctggccaggcccgaggccttgctgctttgtgcagttttgggacttggtgccctgcatcccagccatggctaaaagaggccaagatacagttcaggtcatggcttcagagggtgcaagccccaaggcttggcagcttcagcacagtgaacctgcaggtgcacacaagtcaagaattgaggtttgggaacatccccgtagatttcagaggatgtatgggaacacctggatgtccaggcagaagtttgctgcaggggtagagctctcatggagaacctctgcaagggcagtgcagcagggaaatgtggggttggagcccccacacagagtccccactggggcactgcctagtggagctatgagaagagggccaccatcatccagaccccagaattgtaggtccaccaaccatgcgcctggaaaagtcaccgacactcaatgccaacccatgaaggaagtcaggagggggctgtaccctgcaaagccaaagaggccaagctgcccaaggccatgggagcccacctcttgcatcagcatgacctggatgtgagagatggagacaaaagagatcattttggagctttaagatttcactgccccactggattttggacttgcatggggcctgtagcccctttgttttggcaaatttctcccatttggaatgggtatatttacccaatgcctgtacccccattgtatctaggaagttactaactttcttttgattttacaggctcataggcggaaggtgcttgccttgtctcagatgagactttggacttgggacttttgggttaatgctggaatgagttaagactttgggggactgttggaaaggcatgattgtattttgaaatgtaaggacatgagatttgggaggagccaggggtgaaattatatggtttggctgtgtccccatccaaatctcatcttgaattgtagttcccataatctccacgtgttgtgggagggacccagtgggaggtaattgaatcatgtgggcagttacccccatgctgctgttctcatgatagtgagtgagttctcatgagatgtgatggttttataagaggcttttctgccttttgcttggcatttctccttcctatcatcctgtgaaagaggatatgtttgcttccccttccaccatgatttaagtttcctgaggcctcatcagccctgctgaactgtgagtcaattaaacctccttcctttataaattaaccagtcttgggtgtgtctttattagcagtgtgagaaggaacaaatacattaacccaggcttgaaagcaaagagtcatctctgatgactgcattcaacctttccctcagcacccactgctcaccccttcgctcctgcctcattctgttatcagtcatcactaggccaggaaagcattcctcccactttcacacccacctcttattttctcattcaggaccttttttattcataccaaaaacatgtcagtcacctcccaactgatcccagtctcctatctctcttacccttcattctgtccaacacaccaagagaaacaagaaggtaaatagtgaaaaggtctccctcacattccctttccctagccacacaactctgatctccagcttcctgggtatccattcgtagtcacagtatgcctatttttaagtgtgtgtacacacacatacacatattccccttactcaggcagatttggttttactttacactacagtctaaagaaatcagaatactcttgctaggatgattgacatcagtcttcagtgtaatccttcatattaaaaacatacatctgtatgtataagttttcattctcaccaatattctagcatcattgtggatcttataataaaagtgagattccattggattttattatgtctacctgttcacttcagaagaaaagatacttacagatatagaatccttcactgtccttagtcacaaagtttaaaacctgctccaatctgaacaagttacaccctaggtctggtgagcaacagttaccctgaagggatctcccaattcctatgtccatatagttgtctttcttgatttaccccctcactttggtggtgcatatccttcagtagcttgatccagcagctttctgagaaaggatctgtgggaaatatatttaatgaaattttatgtatctgaaaatgtctttatcttactttcctgcttaactattaataattttgcttggtataaaaatttgggttggaaattattttcattgtccatagtttccagtgttgctcttgagaaatctacaaatattctgactccttatctttttacatgaaagcttttagaatctgctcagtgttctaagattttgtcatgaaatgcctgtttgtccattgtgattaacactcagatggacttttcttctggaaactcatgtcctttcctccagggaaattttcctgaattatttcattgattatttttcccctctatttcactagtctctcattttagaatgtcagattcctgaatgttgaatctcctagactgatcctccaattttgttattttctctcctgttgcccatattttgttttttgttccatttcctagagattttctcaagtttatcttccagcctttctgttgtactttttacttctgctatcatgttttattttcagagctcctttttgttttctgaatgtttctttttgcaaggagcctgttcctaatggttgaaatattatctcttaactctcttaggatattaacgattaggttgtttgtttttaaagttttatattccaagttatttcttcctgtttgtttgctttgatctatatcatccatgttaaaggattcccagctgtctgatgatacttgactgtctgttcacaattaagagtgaaaaactaaaagtttggaggatctgagtttatggatgggtttgtcaactttagcttcatggtagagggatctggagcaagacatttttaggaaatcatttttagatcttcttttttgagctggtaatttttcagtatcttgcttggaaggtagaggtatagctgctagtattttgggagccaagtgagagaagaggggtgggtgtgagtagtgatggaacctctgcattccttattcagtatgcataaatgtacttactccatgtgtttttagtacgatagccctatcgtacttgtagcatgtggcaaagtggtttctcttcccgtgacctgattataacattgattcagattaaacattgtgaactcagtttcctaaatataccaagtacaaagtaaaagtcactaaattgtcctaacagtttactagaaatggaagaaattcagaaagcaatgaggagaaccttcccattgtatgtggtacatgagggcagagaagggagtaattcacccaacaccaaaaagagccatgaccagaactcaggttcctgatttttcagtccagggttcttcccaccccactgtgcccctctaaacttcttgttaactggaagagctggaaaatgggtgtcaacagagcataatgaaggaagatcatggactttaggtcagatagacctgacaccactacacttgactgtgtgaccttgggctaattacttaatctctgattttcagttttcttatttgtaaaatagggataataatatctacctaccttacaggatcaagggcaatccaaaagataaggattatactgtttaaaaaaggaaaggaaagaaaaataaaagagccacaacaaacaagcaattgggtagcttgtttcaacagggtgggcttgaggatggtgagtgagaattagtagtgggaggatggcaacttcatgtgaggctgatgtaggaggagttgtaggttgggctgtacatggattaacaggcgtgggcttggattctttcatataacactcagcccagaagtcttccaaacaccctgctgaaagccagaaatgctcctacaactcctcctgcatcagcctcacatgaagtcccactctcaggatctcaacttagggactgagatgattcatgctctcaccttatgcacgtggaacttttccaactttaccttctgagaccaaagccaagttcctgggacctttatctttcctttgtcaagattatttccagacaatcaataatatctacttctttgtgaagataacaggaagctcattccttactaaatataacatgaaattctaagcagttaagctgagaataaaaaggaccaaaggctcccagttaatatttcggaaagcccttgtcttgaggagcagccatgtagaggatggtttgtatcagggagggccgtgcaaattggaggcaggtataccaattaggaaacagacatagttagcctcaacaagtttggcatttctaaggagctgaactagcagaagcctcctgaaatttctagattagatcctggtgcccaggcttatcagaccaggagcagggcaaagtagactccataacaaaagtaaactcaaatcagagggaaatggaaactaacaggagctgctttattggagatggaccacaggagctttctgcactcaaatgatatggggaaaaagaaatcctaaaatataatgttggaaaagttggatagcccaggcatagctagcagattggaaatagtattaggaatcacagttttttacttagtcaccatgttgaaaagatccttttctttagcatagacccagcacaggggtgaggtaggggctaatttctggcatgagagaccagaggcacagagtatggagcaagaagcaggagctgattgctttcagatcactaactgccaaataattaaaacattttcttaaattcatattttgcaacccagaacatatacctgaagcttattattagaacatattagggtatagttacaatgctaactggtgacacaaactagttacatgctgtttccaccagtctatctgccactttttaactacacacatcaagtatttgcccccaggtttcaggtctcaacctctgtaagaacagttgagctgtgtccacttgacggaaaaacaagtctattacactttttgtttcaaaaagtcaacccatccaatcaaataagttcctttacacatattttaaaaaacacatttactagctttcctccaattttcaatgtgtttattgaactctcttggagttacagtctgggagtatttttgagactcctgttatcaatttaaaaagaaaagaaaaggaaggaatgcttttttaaaaaacaataaatcttgttcctgtgtctaaaccagccatgcatattaacgtgtgtgacttctcagagtttaaagtgttttagctgggaaaaaatatattgtagaagacttaaagaaacaagatggcggccgggcgcagtggctcacgcctgtaatcccagcactttgggaggccgaggcgggcggatcacgaggtcaggagatcgagaccatcccagctaaaacggtgaaaccccgtctctactaaaaatacaaaaaattagccgggcatagtggtgggcgcctgtagtcccagctacttgggaggctgaggcaggagaatggcgtgaacccgggaggcggagcttgcagtgagccgagatcccgccactgcactccagcctgggcgacagagcgagactccgtctcaaaaaaaaaaaaaaaagaaagaaacaagatggcatagcaatgagaattttaagagttttcattctccctgagaaattacttatatggagaacttattaggagtggtttatttgcagcaggaaatacagttatgatataagaaaactcttgatcatcagggtcttaggcattagaaacactcagatgctatgatcctatatctagaaaaccccatagtctcttccaaaaggctctggatctgataaacaacttcagcaaagtttcaggactcagaatcaatgtatccagggtacaaagtaacatttttatataccagtaacatcgtacataagtgccaactcaagaatgcaatcccattcacaattgccacaaaaaaaataaaatacagctaaaccagggaagtgaacaatctctacaatgagaattacaaaatactgctgaaagaaatcagagaagatacaaacaaatggaaatatatcacatgctcatagataggaagaatcagtattgttaaaatggccatgctgcccaaagcaatttacagattcaatgctattcttatcaaacaaccaatgacatttttcacagaattagaaatatctattctaaaattcagatggaattcatgcaaggcagatgagcctcaaattggggcttatcctgggagagtccttggctttgctcagtaaagaattcaaaagtgagttggtggctcatgcctgtaatcccagcactttgggagtccgaggcgggcagatcacgaggtcaggagatagaaaccatcctggctatggtgaaacccggtctctactaaaaatacaaaaaattagccaggtgtggtggctggtgcctgtagtcccagctacttgggaggctgaggcaggagaatggcgtgaacctgggaggcagagcttgcagtgagctgagatcacgccactgcactccagcctgggtgacagagctagactccgtctcaaaaaaaaaaaaaaaaagtgagttggtggtggaagaaaacagctttactgaggtggcagtgttacagctctgtgactgctcctgcagagcagggctaccccatgtgcagtgtgctgagagcagtagctcaaaggcagtgctgcagtcatatctacttttaattacatgcaaattaaggggtggattatgcagaaatttctagaaagagtggtaacttctgggttgtcaggtcactgccatgaaaaggggcagtaacttgcaggtgttgccatggaaattgtaagctgacacagcacactggtgggtatgtcttatggaaagctgcttgtgccccatccctagggcatgtctcaattgagctagtcctcaatttggcctgatgtctgagcccagagtccagtcctgcctcccacttcagaatcaaaaaggagccgaaatagccaaagtgatcctaagcaaaaagaacaaagccagaggcatcacattacctgacttcaaactatcctacaaggctatcataacccaaacagcatggtactgttacaaaaacagatagaccaatggaacaggttagagaacccagaaataaagccacacacctacaaccatctgatatttgacaaaatcaacattaacaaacaatgggaaatgattctgtattcaataaatggtgctgggatagctggctagccaatatgcagaagattgaaactggactcctacgtttcaccatatacaaaaatcaactcaagatggattaaagacttaaatgtaaaacctaaaactataaaaccctagaagaaaacctaggaaatactgttctggacattggccctggcaaagacttcatgatgaagactccaaaagcaattacgacaaaaacaaaaactggtaagtgggtcctaattaaactaaaaagcttctgcacagcaaaagaaactatcaacacagaaaagagacaatctacagaatgggagaaaatatttgcaaaccatgcatctgacaaaggtctaatattcagaatataaaaggaacttaaatcaataggcaaaaaccaaacaaccccatttaaaagtgggcaaaggacattaac

SEQ ID NO: 548 - DNA, 2063 bp, Homo sapiens
ggaaggcttgcacagggtgaaagctttgcttctctgctgctgtaacagggactagcacagacacacggatgagtggggtcatttccagatattaggtcacagcagaagcagccaaaatggatccccagtgcactatgggactgagtaacattctctttgtgatggccttcctgctctctggtgctgctcctctgaagattcaagcttatttcaatgagactgcagacctgccatgccaatttgcaaactctcaaaaccaaagcctgagtgagctagtagtattttggcaggaccaggaaaacttggttctgaatgaggtatacttaggcaaagagaaatttgacagtgttcattccaagtatatgggccgcacaagttttgattcggacagttggaccctgagacttcacaatcttcagatcaaggacaagggcttgtatcaatgtatcatccatcacaaaaagcccacaggaatgattcgcatccaccagatgaattctgaactgtcagtgcttgctaacttcagtcaacctgaaatagtaccaatttctaatataacagaaaatgtgtacataaatttgacctgctcatctatacacggttacccagaacctaagaagatgagtgttttgctaagaaccaagaattcaactatcgagtatgatggtattatgcagaaatctcaagataatgtcacagaactgtacgacgtttccatcagcttgtctgtttcattccctgatgttacgagcaatatgaccatcttctgtattctggaaactgacaagacgcggcttttatcttcacctttctctatagagcttgaggaccctcagcctcccccagaccacattccttggattacagctgtacttccaacagttattatatgtgtgatggttttctgtctaattctatggaaatggaagaagaagaagcggcctcgcaactcttataaatgtggaaccaacacaatggagagggaagagagtgaacagaccaagaaaagagaaaaaatccatatacctgaaagatctgatgaagcccagcgtgtttttaaaagttcgaagacatcttcatgcgacaaaagtgatacatgtttttaattaaagagtaaagcccatacaagtattcattttttctaccctttcctttgtaagttcctgggcaacctttttgatttcttccagaaggcaaaaagacattaccatgagtaataagggggctccaggactccctctaagtggaatagcctccctgtaactccagctctgctccgtatgccaagaggagactttaattctcttactgcttcttttcacttcagagcacacttatgggccaagcccagcttaatggctcatgacctggaaataaaatttaggaccaatacctcctccagatcagattcttctcttaatttcatagattgtgttttttttttaaatagacctctcaatttctggaaaactgccttttatctgcccagaattctaagctggtgccccactgaattttgtgtacctgtgactaaacaactacctcctcagtctgggtgggacttatgtatttatgaccttatagtgttaatatcttgaaacatagagatctatgtactgtaatagtgtgattactatgctctagagaaaagtctacccctgctaaggagttctcatccctctgtcagggtcagtaaggaaaacggtggcctagggtacaggcaacaatgagcagaccaacctaaatttggggaaattaggagaggcagagatagaacctggagccacttctatctgggctgttgctaatattgaggaggcttgccccacccaacaagccatagtggagagaactgaataaacaggaaaatgccagagcttgtgaaccctgtttctcttgaagaactgactagtgagatggcctggggaagctgtgaaagaaccaaaagagatcacaatactcaaaagagagagagagagaaaaaagagagatcttgatccacagaaatacatgaaatgtctggtctgtccaccccatcaacaagtcttgaaacaagcaacaga

SEQ ID NO: 549 - protein, 325 aa, Homo sapiens
MDPQCTMGLSNILFVMAFLLSGAAPLKIQAYFNETADLPCQFANSQNQSLSELVVFWQDQENLVLNEVYLGKEKFDSVHSKYMGRTSFDSDSWTLRLHNLQIKDKGQCIIHHKKPTGMIRIHQMNSELSVLANFSQPEIVPISNITENVYINLTCSSIHGYPEPKKMSVLLRTKNSTIEYDGIMQKSQDNVTELYDVSISLSVSFPDVTSNMTIFCITDKTRLLSSPFSIELEDPQPPPDHIPWITAVLPTVIICVMVFCLILWKWKKKKRPRNSYKCGTNTMEREESEQTKKREKIHIPERSDEAQRVFKSSKTSSCDKSDTCF

SEQ ID NO: 550 - DNA, 2076 bp, Homo sapiens
aggagccttaggaggtacggggagctcgcaaatactccttttggtttattcttaccaccttgcttctgtgttccttgggaatgctgctgtgcttatgcatctggtctctttttggagctacagtggacaggcatttgtgacagcactatgggactgagtaacattctctttgtgatggccttcctgctctctggtgctgctcctctgaagattcaagcttatttcaatgagactgcagacctgccatgccaatttgcaaactctcaaaaccaaagcctgagtgagctagtagtattttggcaggaccaggaaaacttggttctgaatgaggtatacttaggcaaagagaaatttgacagtgttcattccaagtatatgggccgcacaagttttgattcggacagttggaccctgagacttcacaatcttcagatcaaggacaagggcttgtatcaatgtatcatccatcacaaaaagcccacaggaatgattcgcatccaccagatgaattctgaactgtcagtgcttgctaacttcagtcaacctgaaatagtaccaatttctaatataacagaaaatgtgtacataaatttgacctgctcatctatacacggttacccagaacctaagaagatgagtgttttgctaagaaccaagaattcaactatcgagtatgatggtattatgcagaaatctcaagataatgtcacagaactgtacgacgtttccatcagcttgtctgtttcattccctgatgttacgagcaatatgaccatcttctgtattctggaaactgacaagacgcggcttttatcttcacctttctctatagagcttgaggaccctcagcctcccccagaccacattccttggattacagctgtacttccaacagttattatatgtgtgatggttttctgtctaattctatggaaatggaagaagaagaagcggcctcgcaactcttataaatgtggaaccaacacaatggagagggaagagagtgaacagaccaagaaaagagaaaaaatccatatacctgaaagatctgatgaagcccagcgtgtttttaaaagttcgaagacatcttcatgcgacaaaagtgatacatgtttttaattaaagagtaaagcccatacaagtattcattttttctaccctttcctttgtaagttcctgggcaacctttttgatttcttccagaaggcaaaaagacattaccatgagtaataagggggctccaggactccctctaagtggaatagcctccctgtaactccagctctgctccgtatgccaagaggagactttaattctcttactgcttcttttcacttcagagcacacttatgggccaagcccagcttaatggctcatgacctggaaataaaatttaggaccaatacctcctccagatcagattcttctcttaatttcatagattgtgttttttttttaaatagacctctcaatttctggaaaactgccttttatctgcccagaattctaagctggtgccccactgaattttgtgtacctgtgactaaacaactacctcctcagtctgggtgggacttatgtatttatgaccttatagtgttaatatcttgaaacatagagatctatgtactgtaatagtgtgattactatgctctagagaaaagtctacccctgctaaggagttctcatccctctgtcagggtcagtaaggaaaacggtggcctagggtacaggcaacaatgagcagaccaacctaaatttggggaaattaggagaggcagagatagaacctggagccacttctatctgggctgttgctaatattgaggaggcttgccccacccaacaagccatagtggagagaactgaataaacaggaaaatgccagagcttgtgaaccctgtttctcttgaagaactgactagtgagatggcctggggaagctgtgaaagaaccaaaagagatcacaatactcaaaagagagagagagagaaaaaagagagatcttgatccacagaaatacatgaaatgtctggtctgtccaccccatcaacaagtcttgaaacaagcaacaga

SEQ ID NO: 551 - protein, 319 aa, Homo sapiens
MGLSNILFVMAFLLSGAAPLKIQAYFNETADLPCQFANSQNQSLSELVVFWQDQENLVLNEVYLGKEKFDSVHSKYMGRTSFDSDSWTLRLHNLQIKDKGQCIIHHKKPTGMIRIHQMNSELSVLANFSQPEIVPISNITENVYINLTCSSIHGYPEPKKMSVLLRTKNSTIEYDGIMQKSQDNVTELYDVSISLSVSFPDVTSNMTIFCITDKTRLLSSPFSIELEDPQPPPDHIPWITAVLPTVIICVMVFCLILWKWKKKKRPRNSYKCGTNTMEREESEQTKKREKIHIPERSDEAQRVFKSSKTSSCDKSDTCF

SEQ ID NO: 552 - DNA, 310122 bp, Mus musculus
  misc_feature (1)...(310122): n = A,T,C or G
cctgtagtaagaaagtgactaaagccttgtaggcggggccctgacctagcagggctagtgcctttgtgagaagagatgccctcacacactccggtggcctctcctctttttttttttccttgtggtgctgggggttgaactcatggtttttcacactctggatctgcccaaccagtaggcagtctgtccctcccctcctgtcctttgtcccatgcaactcaaaggaaagatcacaaagaggaccataccagaaggtagcaggcagccattggcaagtcctgttggcacctcaatctcagaggtgaaagtttcaacttctgttgtttaagccgggcactgtgtggcgtcttgtgatgccagccggagctggcaaatatgcctgccaggccaccaggatcatgcttactcaccatggtcaatcgtctggaaagctacacattctacaagatgcaatgcgattacaaaccggcggctctttggaagttgaaaactccttcagtggaaggaaggtgcctttgacgtatttggtatctgaagattagcgcccctcctctcccgccttagacaccccaaagcgcgtgcattagcctgtggctgagcaaaatcgtgcaacacaacctattttatagcaaagggcagaatttcttacataggtagtgagtacttccttctaagtggaaaagtaaaccatttgtacattttcacagtattgtaaagtaagcgcgtgtgcacgcacacacacgacttttatgataagtcatatgcttttattatttaaaagacaatgaggattgccttttaaccctatcatctaagaaggtgtgtgaatctattctaagaccggtattagttaccaagagcagattcactagatgtggctctctagaaaaagatattgagcctggaaagcggttggaaaagttacacccaatagttggacttcggcttttgaatccctcagtgggaaagcatttactgctattcaagtggaagatttggcgacgctgggtttaccctcctgaacttatcacacttcaaaagcatgagggagtttcatttgtcctgtgaataaaaaataaaattaggtcaggtgatgtttgaaggcttggcttccttcacaagtgcatttagtcaccgagcagtcactcagaggggaggtatggccccgtgagtgacctgggagacatttttcttttctttttcttcttcttctggaaataccctgaggtgccatctggattctgaccattttccttcttccacatggtgttggctggtctcttcctcagctctccttgcaaagttagcccatccatagactccaggactctggccaagacactggtaattgtggctgttcttagatctacctgtgcctgctgcccatccaggtccaagttttcctctcaggtggagcacagatgctccatgtgcaacgagcccaacgcttccctccatccttcatcattctgttcaccggtcatcttgtgacagagttttagcatgtagccttgacgggcctggaattccctacatagaggatggcctcacacttacagtaatcctcctgcctcagtctcctgagcagctgggattgcaggtgtacaccaccatgccagggcttgctttctcttcatgaaaggcttccatttggtccagtggcttcagccattttctacaatcacggtagactatctgaagacaatttggacaatgcaaaggatagatagacagacagtctcgactataattgccaccattgggtcctacttttctatcactgtaataaaacactattaccaaggcaacttataggaagaaaggatttatttggacttatggtcccagagggataatgttccatgatggtggaacagaaacttagtggtaagagcaggaagctgagggttcctatctcgaactaaatcaaggagagagagagagagagagagagagagagagagagagagagagagagagagagaacctgaaacgctgcttcaaagcctgcccaagtgacatatgccctctatcaagaccacatcatccaaacagtgccaccgtcagggtctcaaatgcccgaagctacagaggacatccccttcaaaccaccacatacagcaaacatagtaaaagcccagcttcctttttatgtgctgtgtgcttatagatgcaatttagttaacagacctgcctgggatcagatcaaggaattcacgtttcacttgtgtatgctacaggtgtctgcttgcagatggtgtgctatccttggataatacacttactgaaagtgctgaccccaatagcaagtggctacgctatggattgcagtgtgtgtctgcatgatctaattgtcaaggtctttgacgaacgccgaagaaaacctgtctgggtttgggatttctgtgccccatgagcaggacaggatggatccacaggatgagccgactcgtgtggatgaacccgaactctgaagaggttcttttagggaggtctgaggtgcttatgaagataactctgatctgcccttcccatcccagactcccacatttactctggctactctttgaggatttgaaatgagagtcagggagatggctcagtaaagtgctcacctttgcaaacacaagggcctgagttccacatccaggacccacataaaacaaatgacaaaacccagcacttgcaattctagaactggagagatggagactggtctgagactcattagcccaggctgtttagacagttccaggccagtgagagaccctcaaaaaagaagatgctcagtgcctggggggtgccatgaaaggttgtcctctgttccccccccccagatgccctccacctgtacatagcacatttataagcatgcacacaaacatacagacatgcaaacagaattggagacttatgcgaacttcctcataaacaatggggttcaaacgtgattacattgttcaatgacataaaatatagtagttcccatgaagctcaagaggaaggaagaccaaagagtggatgcttcagtcctacttagaagggggaacaagataatcaagggaagtagagggagggagggacttgggaggaagagtgaagggagaggggaaaaagaggggcagaatcaggtataggaggagatggtggagatgtacagagggccaggaaattgaacagaggtgtgtagcaatggggaatggggaactgggggtagctaccagaaagtcccagatgcctggaaagcaagagcctcccaggaccccatggggatggcattagctgaaataccccataaagaggagggaaaacctgttgagaccacatctagaggttaggcatggccccctggttgacagatggggccacccaccaatctgcaaaattttaactcagaattgctcctgattaaaggaaatacagggacaaagagtagaacagagactgaagggaagaccatccagagactgccccccccccccccgggatccatcccacatgcagacaccaaacccagacactattgctgatgccaagaagtgcttgctgacaggagcttgatatagctgtctcctcagaggctctgccagatcctgaccaatacaaatgtgaatgctcgcagccaaccattggaccgagtccaaggaccccaatggaggagttaggggaaggactgaaagagctgaaggggccttacctggcatcaatgggagggaaggcccttggtcctgtgaaggcttgatggcctagtgtagaggaatgctagggtgatgaggaaggagtgggtaggtgggtgggtgagcaccctcatagaagcaggatggggggttgggatagggggttttcagaggggaaaatgggaaaggggataacatttgaaatgtaaacaagtaaaatatccaattaaaaagaagaaaaaaaattagtggtttccttttttggtatttttagcttagtaaatatccagatatctagagttctttcttcctacaaaacacctcaaattgttgaattaaatataaaactgagcaagagatagcttggctggtaagaagataatattcagaggctaaaaataatgaaaatttctcacacaggggacaaatgagtgacagagtcagccccagccatgggcgtgtctggatctacctcacacttgcctgggaatgcagagtctgggagaccatcggactaagggccccagatcaagaccaactccttaggaagtgaactgggatagcctgctccattgaaagaacatccaaagctgttctggtttgttttctattgctgtgataaacaccatgactaagtctttcctgtttgggttgtgactcgtggtagaatgtaagttaaaaaaaaaaggaaaggcagccttcaggtgcacaaaccagtctctgttgtgtgatatctacctatcgtctatctacatatcatctatatctattctctgtcatctatctatctatctatctatctatctatctatctatcatctatatctattctgtcatctatccatttgtcacttatatctgcctacctaatcatggggtcattctcatctacctacttatcatctatatctatgtatctatcatttatcatctatctgttatctatctacccatcatctatatctgttatctgtaatctatctatcattatatatgtctactatctatcatctatctagcattatatctgtctactacctatcatctatcactatatctgtctactatcaatctctcaatcaatcacctatcatctatatctgtttatccatctatccgtcatctatctatcatctatatctgttatctgtcttctatctatcactatatatgtctactgtctattatctatctctctatcatctatgtctgtgtactatctatcatctatatctatttatcatctatctatctatctatcactatactatctactagctcatctacctccttacctattcatccacctacctattatctatcatctatctacctatgatcatctatcacttatctgtcatctacctatcagtccctatataaaccagacattaggccacagcacaggtagatcagaagtgcccaggccagtcccagaaaaaagcacaatttgtctatggaaaaatatattccaaacaaagataaaattccaaggaacatgaatttgcaaccaaagcttacaaaacttatggaaataagctacacggagagagagcaaacaggggctgcaacgtccacatacctatgtgatcaaagccatattaaccacaaacctaaaggaagcaaccagagtgtggtgaggagctggacatggcggccaaatgtgaagtcacagcgtccggggcggggcagaaggagtcgtgagagttcagggtcatctgggttatgtagcaaggctttgtcagtactagtaaagacagagacgataacaagattgaatgggatgcggctcacagatgaatatgtgcttaggtgtgcaaagatcctggattaatcccaacacagaaacacaaggaccacacacagctcttcagttaacagtgaacaggctggcagctcccaccccacgcgcacacacacacacacacacacacacacacacacacacacggctcttccctctcaaatttgtatgcttctctataaagccactaagttcactatatgctcctcctctgtgtatagggacaactgctagagcctgggcatcctatccagggtcaccagtctgaagaaaatgaactccctcctccagtggccagctgctgccaatagctcctcagctaggggtggagattgtaagcccctcctccatcagctaggnnnnnnnnnnnnnnnnnnnnnnnnnnnnnnnnnnnnnnnnnnnnnnnnnnnnnnnnnnnnnnnnnnnnnnnnnnnnnnnnnnnnnnnnnnnnnnnnnnnnnnnnnnnnnnnnnntggggaataggtattccatttagggctgagcaccgcacagtctcttgttctctgagctctgacttgtgagtctctattaaccaccatctattgcaaaaggaagcttttaagatgagaacggccttaatctatgggtgcaaagggagaggaacactgagttgtcttcttggacaaaaggtgcagtttctaaaaaggcatagcgccaagaagtcaatctgtctcccatgtgggaaggtttgaaaagaatgcttcccctgtgtttctcatctacatcctcaactggatgggtctcattggagtcaccaaggagacctaccgatagacatgtctgcgtccagggaggtttggctggggtgaatgtggccagtaccatcctataggctgggattcaagagtaataaactaaaagggggaaaggaaagccagctgagaggtgttatagcccatccctgctgtgtgtcccagctgtgtgcttctgaggacgcaagccatgcccaccctcctacctccctcccctgctgtgatgggctttgcactcagaaccgagagtgacagtcaatgcttctccctctgagagtcacagacgcaccatcacaccatcgctgtcgttagacagaaaagcttgttccgacaggcaggaaaccgagctcactgctggctgctgctgtccgataacacgaataactaatcaccatcctaccttacaatttctaaaatgctgccaacagttcatcggtgtgtttcaaaggcttgccagtttgttagcatcatcttcgcgctgacttacgacaggacaactggtcagacctggaaagtaactccatgtgttttatctcagagtctatggctttcctgccataatgtcacatgaccagaaccacaatacagattgggggtctctttcccaggggcagggcttcgtaatctcctgatgcttaacaaacgattgctgggccttaccccttagtgaacccaacccagctcactgcttgtgaatttatagttttatttattttacttttaggtagttccctggaactggagttaccaatggttatgggacactgtgggtttggaattgaacctgggtccccgacaagagcaccacacactcttagtggttgagccagtgtctctagacccaaatctgtttttttaatccctggattctgatgtatggccatgtttagaaacccctgaaatgaaaggccaatacaacagtttgtgtgtgtgtgtgttttttaaaccagtataactttgatgtttagtttaaagactgtaattggtgtgttttagaccaacagacctgaaactcttttaaagattcacttatttttattttaagtgtatcattgtttgcctgcatatgtgtatgggcacagcatgcatctagtgcctgggaaggccagaagaggacataggatcttctggggctgaagtcacagatggttgtgaaccaatatgtaggcgctgagagtcgaactcaggtcctctgcaagagtggcaaaggctttaacctctgagcatggtctccagctcccagttcctaaccttttaaagtctaccttacctcttaagaattcactaaaaatctatagctctttcactgaggannnnnnnnnnnnnnnnnnnncacacacacacacacacacacacacactttaacatataacttaaggtaccatattaataagcattaagatcagttttatacaacataaaatcacctgggggggggaatctcaactaattgtcttcatcagatttgtctgtgggcatggttgttagctggtgaatgagggctccgactgtgagtgacaccagttcctgagcaggtgacctatgccatatataaagctagccgtgcatggcgggggggggggggggtgaggagcaagccagcgtgaagagcatagttctttcatgatttctccctcagctctggcatggcttcctgccccatctctctcccgtgagactaacctgtgagctgggatacttcctttcctgccccgtctctctcccgtgagactaacctgtaatggcttcctgccccgtctctctcctgtgagactaacctgtgagctgggatacttcctttcctgccccaagttgctctggatcagagtgttgctttacagcccaggaagtaaactaagacaggtggatatagcacttatgctgtgtagttttgtatcaacatggcacaaactaaggtcatttgagaggagggagcattgcttgtgaaaatgcttccctccacaagatcttaattggtgattgatgagggagggcccagcccagtgtgggttgtgccattcctaactgtgatagtcctgggttctacaagaaagcaggctgagcaaaccatggggaacaagccagtaagcagcacccctccatggcccctgcaccagctcctgcctccagattcctgccctgttttgagttcctgtcctgactcccttccatgatgaacagtacaagctgaatcaaccccttcctctgaaacttgcttttggacatggtgtttcattgcagcaatactgaccacaagtaagacagcagtagtgcatccgagctatgcaaattacctgactgcagtggtttaagacagcaacattgatcatctaacaatgctggacaggtcatgggtctcgctggcctgcgttcctggaaggggtagaggagaagacatttctctgtccccagtttttgaagctgcctggcttctttacctcatggacccttccctccagctcccaagctagcggtgatctggcttcctttgtcacagcccttctgatgacagctggaagaggctcttcacctgtaaagatccccgtgtttagactgctggcgagtggataactctggaatgtgcaccccccccccaccccaccttgcctaccctaggctttgactgttgttgtaaggataagcctgattagaaagaaaaagataaaggcgtcgtgtgtgtttagtatgaatgagactttggaagtggagagggtgggaagggatggggagggggttgtgattttaccagagtaaagagttagttcaacaataacattaaacttggaatagtcaacttcatagagtcagggataaatgaaacttgccgggggctggactggnnnnnnnnnnnnnnnnnnnnnnnnnnnnnnnnnnnnnnnnnnnnnnnnnnnnnnnnnnnnnnnnnnnnnnnnnnnnnnnnnnnnnnnnnnnnnnnnnnnnnnnnnnnnnnnnnnnnnnnnnnnnnnnnnnnnnnnnnnnnnnnnnnnnnnnnnnnnnnnnnnnnnnnnnnnnnnnnnnnnnnnnnnnnnnnnnnnnnnnnnnnnnnnnnnnnnnnnnnnnnnnnnnnnnnnnnnnnnnnnnnnnnnnnnnnnnnnnnnnnnnnnnnnnnnnnnnnnnnnnnnnnnnnnnnnnnnnnnnnaagttggaaagcgctggccaggtcagggagtatggaagaacgctctgctctcttccacatgactaattcttacagcaactgactggcggtcttgagcggttgcctctgaagaagagcttccagatgggcagggccagaatatttacccatccttggctcgggtagctttgggtctttgtgtgtgagagagagactttcagtgtaagacaaaaggagagagacccagccagcttggacacagcagagcctaggacattgagaggatgcagttcaccgaggtccagaacctggacccgggggtgcgcctgagaccgcgtccagcagggggcgctgcggacccgtcccgcccgggccgcccgggccgcccaccccgcgggcgcgcctctccgcagtccagtgccgcccgggcccgggacccgctccttccgagagcgcagacctctcggcgggcatcgagaggacgcggggcgctggcggccgtaccctggccttgctccggctctcgctgtagcccatcgccgcgtcccgggcttagactcggagcgtacgnnnnnnnnnnnnnnnnnnnnnnnnnnnnnnnnnnnnnnnnnnnnnnnnnnnnnnnnnncgcggaccggcgccggagggctccgcgcgctgctgctggcgctggtggccgcgggggtcccggccggcgcctacaacctggacgcgcagcgcccggtacgcttccagggcccctcaggctccttcttcggctacgcggtgctggagcacttccacgacaacacgcgctggtaagtgtctcccgcggatcctcgaccctggcgtgggcaccccgtggtcccccaagttggccgccgcctttccggcctcttccactccacctcccgcggggccgatttaaatgtccgggcggccacgctgacatcctggcctgctctccgaggcccggggcgtccctggggtccctgtcctccctgggcagtcagacgcagcttcgctctcgccaaagcaaagttacttggctgtctgccttccaggggccaccgcgggctggccatctgccccagatccccggggggcccctaggaggccaggctgctcttggggaccacttcatgtaactctagggcagcagcatgcaggaagcagagaaacaaggggtgtggtgggagtgggtcctggtggcttaggaatctccagaagaggtacccaggggccccacaaagttctgagaggatctgggatgcagagaggacccccaaggagcagactgtgtggctggtgggcagcctggagctctcccacgtgtctagagacaagatttaggaagctgaagtttttaatcaaggggtacagttttgaaccagcgagatgggtgggcctgcagaaaagaataagtctctccctcattaagcatcaatagtgaagttaactgaccccacagcaggagcgcttagagaaggcggatagaccacttccttggaatgaacgagccacaccatgcaccacgcccacctattcaaggcagctagagttcagtagctccccagcctcattttagatgatgttactgtggacccaggagatggctggttcacgttgagggtgctatcccgtgagcgagcatctttagaagcagcaggccgggagatggagactggcagtgtgtgtgcttggacatgtaacttactgggagtctctgctcggaattggacaggggccgaggcaatcgggggcttgtggatgcgggtctttcagaaccctggagaaagagaactttgtgactggctttattaacactttcgtgtatttaggagagcggcctccaagagaaccagctttcaaagtccttgtgtgtagctctcctctgcatcccttcctgacattgattctagtcacagttaccagccaaggctgcttcctgcagttgccaaacccttccttttcagacagcagggcagaacactttcctatgttccaaaggctccaggtctgccatgggctctgggcttggtacagatagattatggctgaatagaaagagtttgtagagctgggtgtggtggcgcacgcctttaatcccaacacttgggaggcagaggcaggtggatttctgagttcgaagccagcctggtctacagagtgagttccaggacagccaggctacacagagaaaccctgtctcaaaaaaccaaaaaaaaaaaaaaaaaaaaaaaaaaaaaagagtttgtagaatacacccagaaccccacacagtgtgatcccggcacaaagcacatgggaggaactttcagaaattgaatggctgttctgggtggggggctactaatgaaagggcaggcagctgtgggagccagtgggaactgctggctatggctggcctctgtgccctgcaacaatctggttccagggacaggagccaggcttctgtcacctgggtttggatgaaccccaggtcacagcctctctgtctgttgttaactatataggagcagagacgaggtgctcagcttgctttgttatgcacgaggttgtgaacagattttgcagtgacaaagggtttgacctgatgctcaggcacccaggaccgcactgtaagggtggccattctgggacttgaccttgtcaggagagggtcaggcatttctgtggtgacaagcagctggcctcagaagtacctctcctgcccaccaaccactccctgcactggagtgctgctggtccctcagatttttagcagccctctgggggaaaaaaaaaaaaaatatatatatatgtatatgtatatgtatatatatatatatatatatgtatatatataaagcgtgtgtatgtgttttacatatattataataaaccatatacatatattacacgtaatatataatataactatatgaatatattatatatattatatatatatattctctttgaagcagattgtattctcactacagtgctgcagtctcttgttgaattctcttgctgcttaagaaaacctgtcctccataccctttcttccttcctttcccctacatttccctcttggctcctaaataaacctcttctgatgtgactcccagtgggggcttgtggagtttaaagcaggagaaactcccatttcttctcttctccttttccctggagtgtgaggtcaatggagccccgactgaagccccgggcttactcttatttctgtacgttgagaataatcttagaggtagccgctggcctagttttgtgaaatatgcatctaccctaaatctttgcctttacttacaactctggggttggttgattgacttaatgactgaatgaaagtctctcagtattaggtagtcccggagcccattgtcctctaaacttaccgggtcatttccagttgtttataattgtaacaacatatgtaagcattctcacagtgaaacactgtggacgttcttaattatttccttccaatcaattcctggaatcagaattccccagtcagctaggatgacagttttacagtattctgtattgtattacaaaggttcccgtgaaatgggaaacatgggggggattcaggacttggggtttggtagctgcttagccagaggctggtgtggtgcgggggaagagcagaaaaaattcgtggagaaacttggaaagtttagagtccaaaggtggggaatgaaaggggtttctataggagaaaggacactgaaacctgggcaggaaaggatgaccgatgttaagtaacattgcatcgtctgtccctcggccagatgagatggtctttagcttctcagttgtgatgtgacttgggaccttcgtttcatgttaactggctcctggttgtgttgtgcacagggcagagaatctgctggaaagaacagggagaacccagacaccaggtggcagagctgaggagtccgggtttgttaccggtttctgtcactggaacaaatacccctagtaaactgacaaagagaggaggttcgttttggctcacagtgtggattctgactggagtccgtggttgttggccctggtgcttcttagctctgtcaggattggggacacatcgtggtggaagttctcgaagggcaaaaatgagaaagagacaggggtcgggctgtcctttttaagagtaagacttcccacagacctaaccccataaaggtttaccaccacccagcagtgacaagctgggtctgagcctggtctacagggttttctataagacccacaggtgcatgtgtgtcacagagcacacaaagtgtctctgcagtgaagctgtcagctcttgggtctgtaactaagttcttcatggtctcaaattattccttcttgagggaagtcaatgcctgcatgagaacacgagtgaccttgcctctcagaacccccgtgttaagtctggctcctgaaaccgtatccccactcatgacacaaccaggcccagctttgttcaaagtactattgatcagactcttgtcaccataccctggacagcaagaattgtccccgtggataaaccgtaataacccggtggcatcggtaacagttttgatgcagacatgaaagtgactgagctgctgctgctgctgctgcttcttcttcttcttcttcttcttcttcttcttcttcttcttcttcttcttcttcttcttcttcttcttcttcttcttctcttcttcttccccttccctcccctcctcctcctcctcctccccttcctccctcctgacacccatagagtgtctgcacactcagaactctcctgtccccaccctctccaaccctgattcttctggcatcctttgaacaacagaagtagatgccagagaacatagacaaagccaatttctgtccccgtctctagcagtttctcagctgcagaaccaacaactgtaacactctgagttataaataaatggagcctggctgccccggcaccccccccccccccatgctctagagtccaaagtggttgggtgcgcttgcttcctctctggcgacgtgcttcctgcttctcctgggacagcaaaactgctgtgctcaggcacggagggagctcgcggaagcggcaggctggcagagcatcattgagcgaggaatcggagcagctccaacatgcggttcgcatttagagctgagaatccaaagtgccgatgtgctgcctgccaggtgatgttgacacctgccagagtattgtgatttacataaaaatggactgaaactagacaaaatcaagaattcagtctcccagtcacgtatgagtagtcacatggctatgtctgggagagcccgaatagggaaatgtttatcaggcccagaaggctctaatgactaaagtcttaaagacctaggaaagacttgaaggaaactcaaaagcaacaacaaaaaggttaatccttagcatatttaactattaaagcctcaggaagatgtgtttatcaaaaacttgtggagcatggatggggacaagctgtcttttcaactgtgaaattttgaagcgcctgtcgtgtaccgagagctaatggaaacatcatccgctgctttctggggttctcacctgcgcctcaggcaaaatatcagctgtatcataggctccaactgaggggaggcaggcgtggggtgtttattctgagggaagagggagattcctaagatgaaggatttagaaggggaccttgggatttggggctccgttctccaatcccacctggccttgtcaatctctgcgaggaacaccggaactggtggtgttaatcctgccggtctcataaactctccgaccaatgtaggctcattgcgcatgctcgaagagctcatctactcacctcggagcttgcaggggaaggcatgcaatcacttccccagaggctctcctgggcacttgtgctcaaactgagccccccttgctccactttctcaaccaggggtccctgttcaaagggaaccccaaaagtagcttcagaagtatttccccgaagatcccgaggaacaggcaagggtgctgtttccccggctagtgctgaatcaccttattacccaagggagaacctgccagggcggaagtctcctcagccgtcaggaacagctgtgagtgtgagagagcaaagggctgtccccagcccgctcctgttccctgtgatatgcggctgtccagaagcgagcgccttctgataatgtgtgtgacctgtctttggaaaaccgttctcgtgtttatttaaagcagacaaagtgttcttcggaaccgtttacctctaatggagttgagtgtaactttaaaaggcaaactgagttctatcagagtgttgctgggtaaggccaacaggtcagccgcatctataggcataattgaattttgttaaatgtgtgtgtgtgttgcgtgtgcacatgtgtcagcacatactagaggccagaggacaacctgagttgtccctcctcagacactgcccactttgctttacctgtcagggtctctcactggcctggagctggccaagcaggctagactggctgaccagcaagctctaggaatcccagagccatgattataagtataatgtcactacacctggctttttaatgtgggttttgggggccgaactcagggcctcagagttgtaaggcaaacacttggccaactgagtcggctccccaggccattagctgagtgttatgccctgctccttccagacagccctggagatgtaagaattgatgattggcttttgggagtgactcagcagagcctgcattatccttgccaccagttggctcttgagggtctctgttcctgatacgaggggcctcgggagaggggctttggaggcccagcaggcttcctgactttatatcactgaggtctatgaactgtaaatctttttaagcaagtggatttggctgaccaccaaggcagaataaatcgttttatcccacctttctctgtgccagaggaagtcttagagagcgagagcaaggactaagcctggaagtagagagtgtgagactgaaacaaagggctcactgtgttgtgggttgaaattagcaacaatcgctacaccaacagggaggagaaggacccctgggtggcctggaaggcatcagaggaggcaacagtcaccttcacgcaggtgtcaccagtctcaggagcactgtgtgctattcagacaggagggagcttcctcgttccatggagggagctgggagacccaggatggatgtggatgggcaaacaaggtaggaagcgagggcaacatcctggagtatcccatcttttcaagaacacttaactgaatgccagaaagacttgatgtgacagtagggaccttgaattagagacctatgggattgggggtcctagatattggagtgtcctccctattcatggtcttgcatggctgggagcaggtagttcctacagccacaggaattgtggctcctgccccgggctctgcacaagtatagaaagtaagctgtcactagtcagtttttaaaaatcacccctgtgaccaaatacctgacagaaaccacgtgagggaggagacatttcctttggtaatgtccacacctcctttgtccagtgcacatgggtagagtgttgtggtgatggaggggtgtggctcaggcacctttttaaaaaaagatatcatgtaggggatctacttccctggatagctgggtagctcaacaatggctttctgtattcaggagaggcggagaggttggtagctgcttagtctgtgaagtgccatgccttatcaggcccaggcccaagctggtgatctggaagattctcagagaggcggacacatgtcttcatttggctatgcaaggctgtaggagctggtttctgatatcagcagaggttagtgccagcagcagtgggtacagcaggacagaacctactgcaggacagacattcaccaacaggaatgaaagcggggcaggcaagcagctcaggggagcttactgcacctcacagtgacagggagcatactgggagacaaaaggggccgagcaaaatgtgtcttccaaagacacgtctggtctccaaccaggccctgcctcctgccttccccccagtggtgccatagagagtctgaaaggatggagccatccattaggtcagagctctcagtgtccagccatctctgtaaatgttatcagcgacaccccagacggagttttactaatttatacattggcatttaagctaacagttgagagtaacctctgtggatggcaagtatgctgctggccacataggcacagggacctgggttccacaaaaagcaggacatggtgccatgtcatttgtcatggctgccactgagaagccagagacaagcagatccctggggcctgagtgagttccaggccagtgagaacaaacatctcacacaaagatgcacagtgcctgagaaatgagtgaatctaagtgtgtcctctggcctttacacacctgtgtatatgtgcacacacacaggcactaacaatcacagctgtctggcctttacacacctgcgaatatgtgcgcacacacacaagcactaaccatcacagctgtctggcctttacacacctgtgtatacacacacacacacacacacacacacagaggcactaaccatcacagctgtctggcctttacacacctgtgtatatgtgcacacacacaagcactaaccatcactgctgcttggcctttacacacctgtgtatatgtgcacacacacaggcactaaccatcacagctgcttggcctttacacacctgtgtatatgtgcacacacacaagcactaaccatcacagctgtctgcctttacacacctgtgtatatgtacacacacacacacacagaggcactaaccatcacagctgtctggcctttacacacctgtgtatatgtgcacacacacaagcactaaccatcactgctgcttggcctttacacacctgtgtatatgtgcacacacacaggcactaaccatcacagctgcttggcctttacacacctgtgtatatgtgcacacacacaagcactaaccatcacagctgtctgcctttacacacctgtgtatatgtacacacacacacacacagaggcactaaccatcacagctgtctggcctttacacacctgtgtatatgtgcacacacacaagcactaaccattacagctgcttggcctttacacacctgcttacatgtacacacacacacacacacacacacacacacacacgcatgcacgcactaaacaccacactgcctgcagccccgaggggctgtagagatgttgaggattgtatagttttaccatgtgtagctgttagaatgtgaaagcctttctctgctttccttggagaaagaaaggatcggaaacaacaggaggatatgtctgcccccactttgatctccaggggtctaagcttgctgtatgggacctgacatgggaccacagcctgtgtcccaagccaggctcagtcacccatcctccattagccaattaaaactgccaaactagtagtgaaaagcagaaagatgtttgttcaatgtgaacagactggggagggtggcagacgatccaggaacgctccctctgcccaagtctgtcttcaggtcttgaagtgaggttactgtttaaatggagggccgagctatgcatgtcaaggaggtcctggctaaggtatgttcctgcctatcattcccccccccccccaggaagatgggtccccaggatgtcaccacaggatgtcaccactgaaatctctttctgagagacaagttcttcccctggctgagccataccttagcctttttttttttcatgtcaatttgacatatacttgtatctctttatgtccacgtgaaaacgatagccaggtaataataatgcctaacatgatacagttctcctctgtacaactgcaaatccataagtcgccatttaataccatttaatatacttacttgatcacaacatttagcttcattcatcttcctggtggggcttttttctttgaaccttacattttatatatttcctttcttgaaattcctaggggaattccagtttctggtgtgtgtgtgtgtgtgtgtgtgtgtgtgtgtgtgtgtgtgtgcactgtgttagttcaatagccaacttctgggatacaaatgtcactcagcatatcttcaaccctgccaggttcctttggaacttgacagtctcagccgtctgagaacacagtccttggctgtgactcctcctttatctgaccccctgagcacatctgttaagagcagtggcctctgaggtccctccatccttgcatgacccacctcactccatgccttcttcccgtcagctggactcagaactctatcagcttcactgactgatggctctgcttcccttcgtttaccccaagccatttttaccacctttgatggatgcttttgtgtgctggaggcctactactgtggctgaggcacagagacaccaagccacctgtccaagattacacagcaagtacatgtgtggcgttcctacttgaacccaagctgccctactgctttgtagatcaccatacctcctactctcccttcaccccaaccaagcccttatttaaggaggtatgctcccaagcaggaaagagatggtacaatacctctaacgggaacaattttgtgagtctttacaaaagaggctctaattcacccactttgtggtgtggggtcgccaaacactttgacatctgctgtttccctttgtggctcatcatattgctatgctagggagacaccatgaaatctctctattctagaggtaaagaaaagaaaggccagggaacccatcaaggtcacacggctggagaaaccagtcagtttctgggacagagcagtagttatttttcttgtggttgcaactgagcacctgacaagaagcaattaaggaaggaagtgtaaaataatatgaattacgtgtatctacgtctagcttcaaaggattgagactcaaactatgattcatttactagactctgcaattactgtgggatgacccctagtctaattctctaacgctagactggctacttccccaactgtgctctctggatacttgctgtttgagtcttcctgggttattattgctccagcagtctggggttctggggaggcatttcacacaggcacgtgctgctggtccatcatgactaacggagacctcctgctctctccatttccccctcctccatgctcccctccctccccctctcttcctctctcctttctccttcttctgtgtgtgacccttacctgtgacccccaaccccgaaactcaaaactccacctctctctcttctctccagtaattagttgtaggcatttttatttaaccaatggttttaaattggggagtaaggtttacaaaacatagactggtgtacatgtgaatttgttcatcgtggggcaaccagatcttggggtgcagaatttatcatatgagtacaagcaacaccagaccaaccccaagaaggaagcatttgattttgctcatatttcaaggatgtacagtccaccatggtgggaaaggcacggtagtcacactgtatccacagcctggaagtggttggtcacactgtatccacagcctggaagtggctggtcacactgtatccacagcctggaagtggctggtcacactgtatccacagcctggaagtggctgcctcacactgtatccacagcctggaagtggctggtcacactgtaaccacagcctggaagtggctggtcacactgtatccacagcctggaagtggctggtcacactgtatccacagcctggaagtggctggtcacactgtaaccacagcctggaagtggctggtcacactgtagcccagcctggaagcagggagatggatgctggtacacagttcacctttaacttcagtctttagtcttagggatggtcctgctcacatgtgggataggtcttccctcctcagttaattctttctggaaacatcttcatggtcatacccagaagtgtgtctccatggtgaacctaaacctagccaagttgacagtcaagactaaccggcaaatgaagggatttcccagcacctacatttctcccagccctcagtaatggatctgtggtcctggctggggatgagagtcctttggaggaaggaaaggacagcaggaagcaagagggacagaaatctttctcagcagccgaccacgatgaccagattagactcaggggcaaatgatgagggatagggttactgaagctcagagcccttaaaaaataaaccattgtttccaatgaccctgaaacccaatggctgtcagcagttaccatcctgaggctcaggattccatggctgtcaggttaggctgggatcagcaagtattctgttctgagcctggctccctcatgtctctcatgttggctggttggccagttggtgcaggatagacttcagctgggtggcccttctctgctctccatgactctcatcatccagcaggctaacctgagctggacacaaggtggctgggcagggtgccaggagagtcagtagaaacacacccaggcccaggagtcagcccttcatctcccctcacatcttagtggctaatgcaagtgtcaggaagaaggaagcagacatcacctttcagtgggaggagctgtagggttctgtggaacaggacaagggtacaggaagggtggagggcagtggctgcttccctaatgtgaatggtggtgaaatcactcgaatcgtccctggatttctgggatgtcagcggaaagtctgaagtgatgctgcccagtgagcagaaaatggagctgaggtctaagggcctgcaaattcttaggggtgcagccaaggacagcttagaactagcacaagggaggtgtctaagtgcttgccctggtactgcctggtatctaagcccttcactgagtccctgctctgtcccaggcaccacactctataacattctcttgaccaaacctcacaagagtcccattgcgtctattttcatcccccctttccatagcagaggaaaactgaggctcagagtgatcaagaaacacattggaggccacaaagcttgtcagtggtagggggagaatttggtcagtgcatcttaaacattatcgagagtaactgggccacaaagcgtagaatacagggagaaggctagggatacagttgatatggtaggatgcccctgtcatttcagcactgcctataccaggtatggtgctcctctactgtaatctcaccattcaggaggtagaggcatgcagatcaggagttcaaggtcatccttggctagataggaagctcaagaaccaggctaatgtacaaaagactctatctccaaaaatggagagagcggggaagatgattcaatccatgaaatgcttgctgtgcaatcatgagaacctgagtttgattcctaacacttaaaagaagtaacatagtatggcataggcctgcaatcccagggctgagaagccacacataagggatactgggactcactggccagccagtctaataaatcagtgatctccagattcagcgagagaccttgtctcaaaaacaagattgaggaagacaccggcattgacctctgatgtatacatgcatactcacagtgtgtgtgctgcctacacatagacacacacaaatgatcacacatgtatgtacacttacctccatacacagacacactatcatgtacacacatatgtgcatgcttctctgaacacacagatgaacaccaaaatgaacacatacatatgcatgcttacctgtacacacagacaccccccacatgtgcatgcttacctgcacacacagacacacacatgtgcatgcttacctgcacacacagacaccccacacacacatgtgcatgcttacctgtacacagagacacactcccacacatgtgcatgcttacctgcacacacagacaccccatactcacatgtgcatgcttacctgcacacacagacacactcccacacatgtgcatgcttacctgcacacatagacaccccatactcacatgtgcatacttacctgtacacacagacacacacacatgtgcatgcttacctgcacacacagacatatctccacacatgtggatgcttacctgcacacacagacacacacacatgtgcatgcttacctgcacacacagacaccccatactcacatgtgcatgcttacctgcacacacagacacactcccacacatgtgcatgcttacctgcacacatagacaccccatactcacatgtgcatacttacctgtacacacagacacacacacatgtgcatgcttacctgcacacacagacatatctccacacatgtggatgcttacctgcacacacagacacacacacatgtgcatgcttacctgcacacacagacaccccacacacacatgtgcatgcttacctgcacacacagacacactcccacatatgtacatgcttatctgcacacacagatacacaccatgtacacacaaccacaaacagcccgggtggagctgttagtttgaagtgcccagcaagcccactgctaaaccacctgcaaccttggtttcctgagacttaaagaggaacttcctgaggcatttctggtccacggctcctggtggtgagcacttgccttctccctctgagacgaagcctgcagtatggttgcaagggtccagcacggttctccactctgcttagctgtcttgtgtccagtgagaggcaggcagtggttcctgggggttctctgcagtacatacacactgactaagctgcgttcctgtaactggaacatagatccctgggggagcattggtttggaatcagatgcatgaaaacaaacttaacggggttggaagtttgtaatccccactcattgttctcgaactggctgtaattttgccctgtggtatggccgctgtggcgtctgtggggagggagggagcctcaaggcactgctgctcccaggcattctctaggaaggcagctctgcctcagcctagcccctgatacctgctctccaaggaactgacctgtgagaggagagtcaaccttggtctgcacaggcacgcacgctccggtccacatacacaaacctcagcctattttaagtaagtttacgcttttgtattgggtctcattcatagctaggctgggaagcacgtctctggctattaggaaacagctgcagggataggagaaagagtgcttccggacgtgggttctgggctcggaagcctctactactgggtacagcaccttaacccagcctccccgagtggaatacgcacaagaagctgcctgggtggatttgccttagtctggagccaggctcccatgatccttgatgttgccagtggctaagcagacaggcatgtgtttccaaagaggttttggaaaccagggaggcagacctttggttagcaccatgctgccaatgtcagtgtctatgaaacccaaggccaggactggagttcacctcctccgttctgtgagcccgagggaggagaaaaagtcactctccatgcaccagaccccagtctttaagctacagactcaaggccaagttccaacctcggagcccacggagcatccctgggcttccctggcatggtcatacactagcatagcagaagggtactgaataccagctggcttccttttcctccctcctactgagcagaagcagggttggtacccgatgctatggggcacgtgctgcatccaggcagttagggtctagggcaagtttcaggagcagccttgactgcctgcatcttcatctgtgaaatggggataatgttagcagttcctataggtgctctcacaggaccacagttgaaggaacaagcaggggtgggaacaccttgatgtttatttgatgggagctggggacatataggtcctttgatagggtacatggtcttctctggggtaccacaaggatgtttcaactacttggaatatggcttttgtaacccagaggacaaagaatgaaaacgaaggtggcatcttttcagtagcgcaccctgaactctgagctgtcgcggtctccgtctctcagggtccagttggccagcagccagctgaatggacttcagaggagccgcactccaaggctggcctgctgctggagttgtcttgctggactgtggcctaggtaaagcgccagcaccgggctgccaaggaagccacaatgttctgtaaacacggaggcaagcacactctccagtatgccattctgtgtgtgtcaggcacgtgcacagacacgcgtgtctctttagctcacatcacaggatctgagaaaacctttcctgtggggatgctggttagagggatgaacaggggatgctagcagggtttgaatcacagctgttgttagaactatttagaactttgggcttggaagagcattggagtctaccgggtcccttctctgctttagattctgacagacattttacccccaagtcttggttctgcgttggaagaagcagatctgagaattctgctgtccaggctcctcccagcctggcacgctaggactgtgtctgagctggaaggagtggaaccacggacggttccagggttgtggtgttaatgctggggacatggtggacccacagcctgcttcttcctgtagctgcttcccgactcctgtgggccatgggcttctctctcttctttacttattgtgactttaaagttattctttctgggagaattcttctctacaacctgtttggtcatatccacccctcacttctcctggatcccttctccccatttccctcctccttcccatctccccctcctttcccattcccctctccctcaacttcattttcttttcttaaaaaaaaaaccttttaattaaatttacttatatttattttgagacaggttctttacatagctgatggtcctggaagtaaaccagactggcttcaaacttacagagatccccctgcctctgtttcctctgtgctgagattaaatgtgtgtgccacagtgtctaactcctttttgtcttaaaaaaaaaaaattacccgctgagtcgggtgcttcccatatgttcagcgagggtgtaggtctatccactggatcatgggcaaccaaccaagggtcagctctttgaaggaaaatgattctctgcctccactcctcggtagccatccttggccaaccgctcctcatggagaagtgtggccttgtgagcccctcccccaccgaggcaggcaggctgactggcttgttcctgtgcactgtgcaggcagtgacaggtgctctgagttcatgggcgtaaggtttccctcgttttcagaatattctttttcccagcagccccctgaccgcctcttacactctttccagcctgcttccttgatgtcccctgggccttggggagtgggggtgtgataaagacatccatttctgactgagcacctcagtcactccctctctgcactctgaccagacgtgcgtctctgtatctgtcaccaccgcagacacttctttggtgagacctaacttatctatgggtggaaggataggtgtgcagaaggcagctggacacaacggtagcttctctattttatctttggcgtgtggggctggagatgctaccctgggcctcgggcaggagctctgccactgagtgacaccccagcccctagtgtaaaatgacttacaaatggttgtttactggggctgatgggagacttgagtctgtgggaggcttgggacgcagcacaaggattttacatttatactcctcgccctcagggctggacatggcaggctgtagatgctttagccgttttaagttgtcaatctgataattcttttcacctgtgaaaacaacgggttctctgagggaggctctttgactcgctccagtggctcaaactcagccccagaggaaagggggtggggaattatcccttagtgtggctttcctctcgggtttgattcccagtgccattatggatttgagttagagcatccacaggctggccaaacctccttgtgtggctgagccaggtggtgaatgtggcctgcttgggaaaggacttctgtagttcccatggacatagcctgctcggggacgcttcatttgaggcatatcatggaggggctgaaggagtgtgaactgccctagcagaggtcctgcagggacacatggtaaggctgctggatggtgggggtggagatgtgggtggggagctggctcattgtaagctcttctcatacgccagcaagaagcaactctctataggagctaacatatactttccagggttaatgtgggaagagagatttctttgcaaggatggtgtgtgtgtgtgtgtgtgtgtgtgtgtgtgtgtgtgtgtgtgtctggggtcctcagggctcccccaggttctggggtaggaattaagacagaacctacccatggggcctgacaccaggtctctggtgtttaattagtgacagtgtccatgagcctttgttgaagtctgctgaggatttcagacatcagttgtaacatccgtcagccctctttgccaatctctctgcctcactaaagcattggcagggaaggtgccagacaccatgacacccgagtagcggggagctgactggatgaatgagaccccaagaagaaggtggcccctggaacagagcaaggggatctggggccagctttctctaccccagggaggctcctaactctactccgcagagaagcctaacagtggtgtcttatatcccaaggcctgctgtatttaatatcctggggtggtcagatttgtcctgcttcctgggtgctagaaacaaaggccagcccaagtccccactgcgcaggcactaggaatccacagctcttggagcggcagggtggaatttgtcctaagtgtcctgccctcgagcagtgccttttcctagtggctcactgctcagcacacattgtgcccagttgttatttagtcttctgcactgtagatcttttgtgatggacccccgcagtggggaggtggagacaggctcccttgggtctcattggatttgtgagggccaggccaggaagagaccctgttttgaaacaaaagatggatagaacccaaagaatgacaaccagaggtgacctctgctcacatatacacatgaatgcacacacatgggggcacatgcgtgtatacatacacatgtacacttacaactcacgaatgaatgcacacacttaaagtttagggcagatttatttctgtaactcaaagtgaacttaatgttgcttccctctttgtgtttggcacccaccaggcccagactgatccgactcctccctagcctatcctccctcccctcccccccttacttatccctctggtaaccggtaactagtaaaagtgagagcctgttcagttacctaccgatggccttagtcagggtgatgacaggctatgaccacaggcaacctattgagggaagggtttgtttggcttgtatttcacatcattgtccattattgatgcaagtcggcaggaattcagaaagggcaggaatctggaggcaggagctgatgcagaggccatggaggggtgctgcttactagctcacttctcatcctttgttctgattgctttcttataaaacccaggaccaccagctcaggggcggccctgcccacagtgggctggacctacccccatcaatcactaattaataaattagcctgtaggcttgcctacaccccactcttacagaagcattttcttaattggggctccttccccctctgatgactctggctgtgtcaagtttacaaaggtttgcgtttcttttagttggttgttttacttaagctgtgtgtgtgtgtgtgtctgtgtgtgtgtgtgtgtgtgtgtgtgtgtgtttcctgatgcctattcagattgctcactcttgcctagacaaagatgtaaccccctgccttttcttctccagcactggtttgtgaccacacgctctttctttttgatgtgcagggtcctcgtgggtgcaccgaaggcagattctaaatatagcacttcagtaaagtctcctggagctgtgtttaagtgtcgtgtccataccaaccctgaccggagatgcaccgagctggacatggctcgaggtgggtggacatgcttgtcagggtagaaatgggagcaacaccttcatgctttgttctttttctacttaggacagcctcatcacttgccggcctaccctctctccctcttttcctccctccatcttacagatgtgtattgagatgctataagctattaggcactgaacaaagcaaagaaggagcctgtcaccccgggcctggaaaaccagtagtcagaatagacattaaaataaacaatagactaagagaaatccagagggaaggtgtgcgccggggaagctctatattggaggttggaaacggcttccttggggatcttgctgtgtatggaaggtagctagctgggaagtccaggaagtgcagtctccagcaaggacagtgttgtcacaggagaggtgagcaggggagggagaaagttggaaaggacaactgccaggtaggagggactacaccacacagggcctcactggacaggttaaatgacagatttcactctctgtgtgctgccagaggccattcagatcagcttttatgtcttgcatggtgaagggcatgattggatggactgtggtactcacttttttctagtagataatgtagatctactggatcagtctccatggatcggctctggtccagctgtagacactggggattgcttgcactggattgctctgagaagactgagataggagaggcaagcacagaaagacacgggcagaagagccaggtgacttgctagatgcttccaggccttgctcccctaaagccctttatcacccaggcctctgccaccacttctggcatgtctggggagacaactcagggggtgttggttatgaaagagcaaggatctgagcccattccttagaatccacagaaagagctgcgtgagcctgcatgagcttgtagtcccagggttgagaaggtggagatgagacgactcctgtgggatctctggtcagactatgtagctaatcctgtgagctccaagttcagcaagagactctgtctcaaagcataaagcagagagcaacagaggaagacccctgacgtcagcctctgcacttgtcatgcatggagatatatatgaatgcacacccttccaacatgtggcacacacacacatgtttgcatacctccaatatgtgtacacacatgcaaacatgtaaacatacccacacatggatgcacccttcaacatgtgcatatgcacacatgcaaacttgtaaacacacacacacacacatatacacacccttcaaagccaaaaagagtctcgattttatttatcagaagagacttgggtgtgtgggatcttctctgtgaggtgtttgttacagtggcttcccagaacaacatcaatgggaacaccttttccttcacgagaatgttgttgtggaaaaagaaggagctgaattaaacagcaacattttgttacaagtttccatggagttgacattgtgttataggtacaaaactttgagtgcccaggaccaccctttgaaaagcagccagctgcaccattcctcaatccaaagctgacctcttttctccctccagggaggactcgtggtgcgccctgtgggaagacctgcaggggagaccgggatgacgagtggatgggggtgagcctggcccggcagcccagagcagatggccgtgttttggtaagacctctggggagagggtgacttgggacagagcaccctaagcatgaaggactgaccccataggaaaggtggctagcacagaagccagaacacagcgttaaggctatctgttgtgcattgctgctctgagatctgtcccacctgcactttcaggccacatgtatctgcatgaagcagggacagctaagaggttcaacacaaaactgtaaagtcacttaaaacattgtgagataacttttgtgggatttaaaaatacctcaattgtgtggttctgagtgtgacccttgtaggtgacagtattgggttgccatgtcaaagtctgacatgcctagaacctgttctttgtattacctttagacatattgggctgaggatgtaactcagtggtagggagctttcttttgtttgttttcgagacagggcttctctgtgtagccctggctgtcctggaactcactctgtagaccaggctaacctcaaannnnnnnnnnnnnnnnnnnnnnnnnnnnnnnnnnnnnnnnnnnnnnnnnnnnnnnnnnnnnnnnnnnnnnnnnnnnnnnnnnnnnnnnnnnnnnnnnnnnnnnnnnnnnnnnnnnnnnnnnnnnnnnnnnnnnnnnnnctgcccagccctggtagcatgccttcttaacatgcatgagaccataattaatcccaggaagcagagagagagagagagagagagagagagagagagagagagagagagagagagaggagagagacatgagacagagacagagagagacagagaaagaccgagactgaatgagacagagagacagagtaaggcagagagacagaaacagagagtgagacagacaaacacaaagacaagagagagagagagagagagagagagagagacagacagacagacagacagaatatgagaatataggtagaaagaagtttgtaagcctggcgtggtggcgcacacctttaatcccagcactcgggaggcacaggcaggcggatttcagagttcgaggccagcctggtttttcatctactcaaccccccacatcccagaggcaactgctgtcttgcaaacattgctgttggtttttctagaactttacatgaatgtaattcaagtgttcaattcctgggccaggcacagtgaaaggagagaagtgactcccatgagtcaccctctgaagtgtgcacacacacacagacacacacatacacatgcagacatatacatacacatataacatatacacacatatatatacatgcacacatatatacatgcacacacatacacacatacatatacacacacacatatatatacatgcatacacacatatacacatacacacatgcatatacacaaacacatatacatgcatacacatgcacacatacacatacatgtatgcacacaaacatacacatgcacacacattcatgtgcacacactgacacacacacactaagtacatgttaaacagacaaacaagcctctaactgtgacagagacttgattattaaccattttctcttttttcacatgtccttttctgttgcgtactcaggcatgcatacctcacagtctgctgatgttttcacacacatacatccaggcatcccatggtcagcaccctgcagactccttctgccctttcccaggcagctggtgccctgtagggtggtcctcttcagacttcctatgaagtctgccgtcggctttcctcgaaggctgtaggatgatttgtgtttgaaaagttcaaggtcaagaagggaaagtgagtccagctgctgtatctcaggggtttcctttgggccacaagctgtcaaagctgggggctttatggatgtttgttcccaggggaaatgggctttcctcaaggatacaggccagacgtttctagtccctctgaggaactctgttctgtgttgatctcctcaacccgacctcagcacacttaagagacccccacattgttgggtccttgggagagagagcggctggatgctgtcaccagaattataaggcctccctgctggacaccactgtaggtctcattgccccctcccccatttctgctggccttggattctagtcctttaatccctgtttcagcaggccatggatgatggccaagccaccacattcttctaggcatggtggcctgaccccacagggtgactcagccccaaagagccatatctcttgtctcccattcttgggaaaaagatgggagaaaccaagcatgtatattccccagaggggacgcaaagctgtggttcagaaccaatatggaaggggagaaggaggaggaagaggaggaggaggaggaagctggggacagcaaggcatgagatgcccctccaggcactgaatctagagatagcctgttctgccaagatatactaacttagggatgtgagactttagtgtggttgagagtttgcttgcaaaagtgcaagaccaagaccaagctgtgccagttggtacgagactctattcagtttaggggcttaaagcaacagtgaggagcatgggagacatttgccccaaagccaaggaggcagggttcaaaatttgtgggatgtggcgctgcagataatcctagctaagtaattgggctagatttctgttttacacaatgcttgaaccattcatttgatcagtcactccctaagggtgctggggaaggaggggtaggcacgagggggtatctgaggtctctattcctgttgtcgtcacgcatataacatgtgaagcagcaccccagccttgaagagtattacgtgctctgaggaaacgtgtgctttctttgggcacgcatgtttctgataaatgaaaagctcacttctctgctaaaatcaggagacaacatcagaagtgcgtgagaaaacattgttgtacaacagcatctctagaactctccatctcacagatgccaaatcttgtatctctcaaacacaactcccttcctcctgccccctgcttcctggtaatcatcattctaattttgaagtactcaacatgtcagatcccctgcagataggagcgggctggattcgtcatcttgggttggcttctgccatttaacgtagtgtcttcactgctcagctctgtcgtaacatatatgacagcattcttttcttttcttttcttttcttttcttttcttttcttttcttttcttttcttttcttttcttctcttctcttctcttctcttctcttctcttctcttctcttctcttctcttttcttttcttttctttcttttctcaagaccaagtgatactttatcacacgtgcacagtgctttctctgtttgttcatggatgcatgtttaggtggcttctagctccttgccattatgaataaagttgctacaaacactagcaaagatttattagacatgctgggtgtggtggtgcacgcctttaatcccagcactcgggaggcagaggcaggcagatttctgagttcgaggccagcctggtctacaaagtgagttccaggacagccagggctacacagagaaagccctgtcttgaaaaaccagaaaaaaaatttattagacaccccactttcccttccttttgggtacgtatgtggaagtgcgactatcagatcatgtggtaattttgctttccattgttgggaataccttggcactctgttcctctaaagttcacaaaccattttgtgtttggccagcatgcagaaagttccagagacaactaattgttcaactgcttgctattggcatcttgtgtactgaagatagaatccacagcctcaggcatgctaagcacttgttctgttactgagccacacccccagcacattctatttccctttaaatagtagccaccctaaagagtgtgaggtgatatttcatgatggtttgtgtgtgtgcatctatgttagtgttatttaaatccatttcttttttttttaatgtctcatttttgtctgtgaaatatttctgggaatcaaaaaaattttttttaaattgaaggtagagaaggcattttgatccctcaggaaaactttgtggcacaggataaaacctgtctccctagggatacagccttgatttcaaggatagggtggtggaggggacagctgtgacttcgagagagtaaatcatctcaatgacaaatggtctcagcgggatcaatgctgccaagacccagaatgtcaagctggccaaccaggctaaccttggcccagtggctgcctatcttgggtctgtggataaggtggttccttctagtttccaccagggacaaatgatccctactaccaatgctaccatggtactgaaagcaagttcccttcccacactgttcccgcacccctggagtgcagagatggtgttgtcaggaatagggaagaaggcttagtcagccatgctgcataagcataaaaactggagtccagatctccagtaccatgcaaaagctgggcacagccactcatgactgcgctcgtagccctggccagccagccagactgatgagagccagcttcagtgggagattctatttcaaaaaatatataaagatagaaagtaagggcggaaggtactttatattattaacctctgggcgcacgcacgcacgcacacacacacacacacacacacacacacacacacacacacacacacacacctcgaacattcagaaccacaatctttcctcatcagagctgccaagcctcagataaggaattatctaaacggctcaatatttttttctgggtggaagcagcgctttccggctctaactccgctgtttcctttctgaatgtcagggctctctctggccctctcatctgcttacttcccttgtgtcttcttcaaagccacccagtatgttcctgtggctattcctgtcgctgcttcctggtttgctgcgtgcgtacgtgtgaatgagtgctctgccaaaatataacatgtgaagaaaagtgcacaggtcacgagaacatactctgatgagtttgctgtaggtaaacatctgccaaacaacattcccagcgctaaccaccccagagcctcttcccctgtgccccccccagttacccccacccccaccccggcccagggaggcacagtgtctttgggagaattccgtgacagctcagccttgctttaatcctgtgcccactgcgtctcgatggccggggtgtgaccgagctgtgcattgcagacctggaagcatggcaaagcttgttcatctgtggacaacaagtgcaggtgtgtgagggtgggagggacagacaggcatttgtcaccaagccaccctccaggaagaacatgctgtattcacacaacaaagaaggcctttgaagggaattggagaattttcttcctcttcttattgcttgggaggataatcagtccttctaacttgagatgtgtgagggccaagatttggggtgatggtagggtccttagtcttttcctagggtgctttagaagatgaatttaaacagggtattgcctcctgaatctcctcctcgtctccacctccctccttcccctcacctttccccctccatctctgttctccctctccccttccttatcctcttccttcctttcctcctcctcttcctctgtctcttccttctccatgttgttttctctttcccccttctctccttcctcattttcttccctcatcttacatcttgttcactccccttagagcacacagtacctctgggttacccccatagcccaagaacataggctctggccacttccagagcaatctcttcttccttatccttcaccactccctgcccttccttacaactcactccccaaatcgaccgagtcacgatgctttgcagttcctcggaatcttgctctttttgtacaggatgcaggtcagacgggctcacgtgcgtgaggatgatctggctaagcacagtgttttcttcttataatttatattcagagttcctttctattttctggagtggggtctgtctttgacctttgatctctgtcctcccagaatattgtaaattagatgagtgtaaaatgtagtatttgggtctcctagggattcttcaaggtcacccttaaacagtttatgggatggaaagcagacaatataataaacatcggtgatgctgtccatgtgtgcagctggcttccagacacaccacgataaacttcggcctctctaactcagcatgctataggtaacgagagctctcaagctgtgggccaagcccttcaactagaataaagcctatttgctcagaaactgggtgatctaagagactcagatttacaaactgtaagaactaagtcagaatccaaaaatgaaaaaatctgctagtcagccctttctattcacgggttctgtgtctgtggattccatgggctatgggtttgatagctccagattcgaccaattgtgatcaaaactgatttttaaatctgcatatgctctacgaatgggcagacctttcccttgtattcattctccaaatggcgtgatgtaacaatttctgtgttgactgcactgttataagtatagagatgattttaagcatgtagggactggggagatggctcagtgagcaagagcacctcattctgcaagtgtcgggatctaagttctaatccccagcgcccatgtaaaaaccatgtatagtcacacatgccagtagcccgagcatggcgctggggagcagagaagctgactctaggttccgtgagagactctgccacaaggcagtaagataccacacacacataccacacaggagggatatctctatgtagaagtatgggacaactattgaccttgtgatctttcctgtttctcactaagtgctgtctccatctgctgagaaatgtctctttttttccctcacaatgcaagaatcaagtggggagggaagataatatagtgaagtaggagagacagctgatctgtcattggctatctcaaacatggcacagagtgtggccaagctcaggtctccagtgccctactgaggtcccctttgggcagagtggcttatcagggccccccagtggcagcgtcactggagggaaaaagagcagagagcttagatgacaatgatcttatcattcaacaagtgaggaagagcccatacagaggccttgggtgtcccattccagctaggtgccagggcctcatgggacgggttataagaatagccactgtccctgcttctcaatcaggaatccagaatctgatgatagaaaggccttatagaaagatgaagcacaggagcagctagatccagtcctggtctcagcattgactgtgttacccagccactccctgctacttagcaatcccatgaagaacatagaagtcctgggcccatgagatgactcaatgggtaaaagtgtttgttgtacaaacccggtgacctgagttcaattcctgggaccacataaaggagagaaccggctacacaaagttgacctccaacctctacatgggtgctgtggccgagcactgccttgccatcattctcttaataataacatagttgtaaagatttaggaaactgactcagtcactgttctattgctgtgaagagacaccatgaccgaggcaactcttaaaaaagaaagcatttaatcagggcttgcttgaagtttttggaggtttagtcccttatcatcatgacaggggacatgatggtgtgcatggtactggatcagtagctgaaagctgtatcctgatccacaggcagagagaaacactctcacttggcctgggcttttgaaacctcaaagccttcccccagtgatatacttcctcccacaaggccacagctctgatccttctaatctgttcaaatagtgccatcccctaatgattaagcattcaaatatatgagtctatttgggccattcttatccaaaccaccacaaaaaaatagaaagtgagaggcctagctgaggcctggctgcctctctgacatcttcttacttcagagtctctccactcattgtctttctttccctgtgacttccaaacctaatgctctgctcacgtcctttgcaccaaatgcttctctttccggaagcgtctcccttcttttgctcagtgtggagggtgttgtccactctctaggctttccctgccctctgcctagaagccacgtctcactccaagactcagtagcccactgtcttctgtcgttctgtctctgtgctcaggtccagctattgatcactctctcctccagtgactctcaggagctggttcttctccatttcatttttctgatgccttgatgtgaacttcaatctccctccctccctctctgtccctttaggcctgtgcccatcgttggaagaacatctactacgaagcagaccacatcctgccccatggattctgctacctcatcccttccaacctccaggccaaaggcaaggtgctgattccctgctacgaaggtaagtgtggattggttctctctcagcgcggtgacctccttgctgggtgacttcagcaatccccagccctctccctcacaccactgcctcagcttctctcaggctttccacacactggtgtgagagcagggttatctgtccccagatcgactctggcatcaatgtcatgtccatggaagaggcaactgcaagggggacagtggtctaggccctgcccagccctgctcctgccacagagactactgtgttcattaccagttccagggataagatttagtcaaacaattcagctgttctcttagctttctggaattaccacatgctatagggccttgggaaacttattatccttttctgaacctgagagtccttatcagaaaggcaaggaacgggttcaggtgatcaatacagcactgccataaagccaggatcgtcattggacttctagaaaagtcctggatgttctaggctgtgggaagagaagatccagtctctataaagccataacatggcagaagttgaccaaccagccccctcattcagttcttatggcatacacttctgaccatcctcgggtgtctgtcagaactagtcagagagcattccttgggtctagacaacacttggtatcagtctactgtcactgtgtaacaatacatctctaagtcaaacaataataaacatgattttttttttaaatttatacaactccacacaggcttagtgcgctctgattgtggatttgagtcgggtccattctacatgttgtcttctgagaccatgagctctgtggggtgtgtttgtgagcacagggtcactcggggtcttctgcgatgccctgcttagagctgcacattcttgggcaaaactgagccaacctagttctggtgagctgctgagccaggtccctctctaagtgcaaaaggctgtttgatttttcattgcttcccacttacacctttggaaagaggtctaagtggcctgggtccgcactgccttgtgcttccctgggcttccttaggttttgttctcgtggtcatcaagaggggttctgacactaaggatattgtaaatcatttttgtctcatggggggcagggggaccccatggcactatgtggaactcagaagcccccagcaggacattctgtgaacggttctctacagaaaggtcagcagggacttaagtggaggcacagcccctcttcttgtgtgagggtgggctgttttcataccttcattctttctctgcttgaggctgggccagatggggagactgaaatctggccctgttcatctctatattgtcctagtgggacaaaaactcttcatcctaaacacccatgatatagccacaggtgtagctcagttggtagaatgactgcccagcatatgtgaagttctgggatttttatcttcctggccagcttgggaacatgaatgagcccctgtcacaaatgaatgaatgaatgaatgaatgagtgaatgagtgttatcagtcaagtagcagagaacatacatgagtaccagccaggacatttggttttcacccacccgtctcagcactttccacatcctatacagctcactcactggtccccaaacacaaacacatgggacaggccagcccacccaggtcagctgagccctagctcttgcgtagctgtatgatcgagaaatcagcatcgttatcatttgccatgagggattaaaattgttacgcagaggtagctgacagatgcagggctccgcttgggagctcagagtcctcctgcagcagtggcctaggtttctttgctttgtatatttctttactccatgatggtcaaatggagccagagaagatttaaccagagaacatattagcaagatgtttgctcccacctgacttttcttccttaaggacacgcatacatattcaaatttgtacgttgggaaaaacaacaacaacaacaaacccaaaacaaaaacccaaccacagtaaggagaggggccagtatagggagtactgggaccaagagcagctgctgaggaaatctgaggaccggacaatggttctgtgtacttggatctgtaaaatgggaggggtggtgatgctcagatttctcaggaagactggggtagtggggtgagggggtgggggtagggattagatgagaggcaggcccgcagtgagaaggccctgtcctgtcctgttggttttggagatctctacttccttgttttgtggttgaaacgaaaccagctttggctcctaaaacaaccattattttctcttaatgtggaaaacctcggtgatgcaagctccctgttgcaggtgggggtcacattatggttaaggacaatgggagcatttagagtctgataggacctttcagatgtcatctagaccggcttgcagggtatcaaggtccagagagataagcatggcttgcaagtctgagttttcactatgtggagggtgagttgcacagtggttagaacaaaacccaggactccaaatgccagaacctgagtcctgcctctctacagctccctctcattaacaccaagtgccaatgaggatgtaaattctgtgcccagcttaagtgatcaatacttttgggttcttacagcagtgtctggtgtgtattccctatgctgaacatattgcatacattaatatgcttgttataggctaatgagccaggtactaagcgaagtttatgagtcattacaaggtgactgacttgtgtttaaggagtagagatcatttagttgtgttaagtggctcacgagcatcacaaaagccaacacacacagtcccagaagagagagcagtggggcattgtagatagaatgaagaagagaggggagtatgtgaggagagaaggggaaccagtgggaatggggagggacacaggagggccatagtgaaggaagggataccagaaaagtgtgtactaatatatacacgagagatggggagatggctcagtggttaaaggaccagagtctagatccccatatacatggcacgcgaatgtggcacacccctggaaggcagagacagaggggcccccacggaagactggctagtgagaccaagctattttggtgagctctgggtttgattgagaaggcctaaatcaggggaaagggcagaagaggacttgaggatgatttctgatactaatcttgggcctttatctgcatgtacacacacacacacacacacagacacacgaatacatcaatacacatatgcacatgcacaccatacatatgaaaaatatacatgcttgaaaacatcataattaaacttattttttataataattagaacatggattaaaaatacaactcttccagttgcatcccagtcaaggagacacggaggcaggcttatttcattgtatgattgaggaattggaaacctgtttaaagcttacagtctgctgaagtcagggaagtgagggacagaggcactgcactgtgagtcatggcagcaggcagggcaaggtttggagagactcctccttccaggtttacttcctgtgcagtgggggcagatgcatgagggccaagacaggtttgctgggggctgctgtgccacaccacatctcttggtgcagttagaggtcttgccagtgcaatggatgctggcatgcctccactcctctttgggctgttctagggagatcatgagaaattccagaggactgtgctcagagagcctgcctgttgctctgtagtgatgcctccttgttgggcttcgggagggtcagctgtacagactcccaaagattggaaggtcggtttggtagactaaactttctgggccacctttctaaaatgtcttgagcttttttgtttttaaaaaggttaattcttaagtgtctttgtgtgtgtgtgtgtgtgtgtgtgtgtgtgtttgttgtggtatgtgtagtgagtatgtatgtagtgtgtgtatgtatgtgtggtatatggtgtggtgtgtgaatggtgtatgtnnnnnnnnnnnnnnnnnnnnnnnnnnnnnnnnnnnnnnnnnnnnnnnnnnnnnnnnnnnnnnnnnnnnnnnnnnnnnnnnnnnnnnnnnnnnnnnnnnnnnnnnnnnnnnnnnnnnnnnnnnnnnnnnnnnnnnnnnnnnnnnnnnnnnnnnnnnnnnnnnnnnnnnnnnnnnnnnnnnnnnnnnnnnnnnnnnnnnnnnnnnnnnnnnnnnnnnnnnnnnnnnnnnnnnnnnnnnnnnnnnnnnnnnnnnnnnnnnnnnnnnnnnnnnnnnnnnnnnnnnnnnnnnnnnnnnnnnnnnnnnnnnnnnnnnnnnnnnnnnnnnnnnnnnnnnnnnnnnnnnnnnnnnnnnnnnnnnnnnnnnnnnnnnnnnnnnnnnnnnnnnnnnnnnnnnnnnnnnnnnnnnnnnnnnnnnnnnnnnnnnnnnnnnnnnnnnnnnnnnnnnnnnnnnnnnnnnnnnnnnnnnnnnnnnnnnnnnnnnnnnnnnnnnnnnnnnnnnnnnnnnnnnnnnnnnnnnnnnnnnnnnnnnnnnnnnnnnnnnnnnnnnnnnnnnnnnnnnnnnnnnnnnnnnnnnnnnnnnnnnnncccactcccactttttggtcctggcattcccctgtatggaggcatataaagtttgcatgaccaatgggcctctctttccactgatggccgactaggccatcttttgatacatatgcagctagagacaagagctccggggtactggttagttcatattgttgttccacctatagggttgcagatccctttagctccttgggtactttctctagcttctccattggggaccctgtgatccatccaatagctgactatgagcatccacttctgtgtttgctaggccccagcatagtctcacaagagacagctatatcagggtcctttcagcaaaatattgctagtgtatgcaatggtgtcagcgtttggaggctgattatgggatggatccctggatatggcagtctctagatggtctatctttttcttcaaaaacactggtctcgtttggcatgggacattttctcatggcttctcagctgcttcctgctggatgggagaggctatcagagcatcctgttggaaccaggaaatacagaaggaattgaaaatcaaaaaggactaggacataaaatcagataaactcacagtgcatccctacagcaacacatcgcgtttacacctgtctcgaccgcagacagtatcattatggccaaatgttgtctttgtcagaatgtgggagaagataagaacttaacatcatgatttggggagattaccagaaaaacagagtgagcactatcaaacattagttacttaaacaaaccaggatgcttttagaagagttatcttattttaaattgtgtgtgtgtgtgtgtgtgtgtgtgtgggcaggtacatgtgagtgcaatgcctttggaggctggcggtcagatcgcttaagctatgtctccagtcaccacaccaggatatttaaagcctctccaaacttaagtcagttcatgtgataaaatcaagtacagatacttcttttgtccgttatccttgaatccaccaaggcaagaagccagaactcagcatgagactgtaagcaactcatggtttttattgtgatggggaaaaaaatatctcatgagtctggggtgacttgagagcagcctagaagaattccaaaaagtgttctccggctgagagaggagccgtgagaggaccagctggtaaaggcacttgctgctaagcaccaggccccacgtggtaggagagaattgatttccataagctgccctttgacctgcacatgtgtgcactagcatgtgcacatgcccttgccctgcaaacaaacacacaaatgataaataaatgtagattttgtttgttagtagcaatgacaataccattatatttcaggatgtggtggcaccaaacattcacataattgacagtttttgttcctccattctgataaggtgacgttgcacaagcttggaaggtctcagtgtcctctcctgtaaagtggggtgatcagtacctcctgacaaggaatttggggtgttttaagtgtccaataccttccaaactcaataaatgagaattttccggttgactttcaaatcccgtaatattcttcagctgtctcaaggggtgtccactggatgcttctttagtcaactgataactaaggacagagagctgggttgcattaaaatcatctgaagagctggaaaggttcgtaattgcttgtttgtggagtcaggtgtcactatgaagctgagactaactggtcttatatcctcctctctcggcctcccagctgctgaagtcacaggcacgcaccaccatgcctgggttacattttcttaaatagctttgaggatcttatctgtgtaatccagttgttaagcctttggttccggttaaatagaaaggatctgaggttgcgtgccaatgttcttaaatctgaatgttaaggttctgggttgatcaatttttcttgtgctttaaaattgatttcaattctcagggcagctgagcatttatttcccatgtgcatttcttaaggctgtggtcattcccactggaagaaccagaccaaggcattcaattgtgaagacattttttcctctcttcttaatgctgaagggcaggaccccacaggggataaaaatcaattatgatccatttacaaatcaaaagcagtcgaggtttgggtgtgcatttcttttgtttttagaaggaattgtaaaaggctatgcaatccacttaagaattcaagccccttccatttttattaaataatgagccctgcttttacagaggcctttctgttttctaaagagcatttgcaaacattacctcacttaaataaatatggtgaattaaacagtaagatgctactcaatattttatacagttaagagagggtcctggggctggagagatggccctgttggtaaagtgcttgctgcataggcatgaagaccccactcaatctccagagcccatgtttttttaaatgccactttcaaaatgcactctggactgcagctctgaagaggttcagataggcggatcactggacctcactgcttggtggccagacagcctagataaactggagggctacaggttcagtgagagacctgtctcaggataacgtgaggagtgactgaggaagatctagtgttaccatctcacctccacatgcatgagtgcacatacatatacatccacacagatacacactcacacactcatgcacacacactgacactcagtctcatatacatactcacacactcacacacactcacaaacgcacacacacttatgcacacatacactcaatttcatatatatacacattcatgcacacacagttacagtctctctctcatgcacacacacactcacactcagtctcatatacacactcttacactcatgcacacactcacacacacacacttatgcacacacacactcagtctcatatacacactcacacactcataaacacacagtcacagtctctctctctctctcactcacacacacacacacaaatggagactggctccacaggacagtcatggctgaaaggagaagctcagaggtctatgaaaatgatgctgggattcatgagagtctaagtttcttattggagccaagacctttagacaaaaatggatcctatacctcaaaaaaaaaaaaaaaactttccacacattgagcaggattgctgtttaaattgtatcttctaacattacagatgcccacagtttctaagtctcttttaaaagtgcacgtgtgtggcttagcatcttgaggattgttgtctgagaagcacccagatcagaatccacttgacaataaataccttttaggagctagaaggtaggacggccacttgaacctgtaattatacttgtgaacacaacattgggggggggtcagcattttcttgttgttttgtgagacagagtcctgctgtgtagctctgactgccttggacctcgctgtggaggccggtctggctttggacccgtggtgatctcctggctttgccttctgggtgctacagttactggcttgtgtccctctgcctgatcaatgttcatgttcctgttgtagagatgagaaaactggggtgcagagaaagctgatgaaggtcttactgaaggtgtattaagcacagggagggttgttggcccttaaagtgcagcgtaggtttccctagatggcctgtttctgttggcacattgattcctttgtgatcaatgagggcacaaggaaagatatccagttactacgttatgatctgatggcttttcaggacattgtagacttctagtgtcacacttcagtttgtttgtttggttggttggttggttggctttgttttcttagatgtaacctagaggtgagccctgcagtcactgagagcagacagcattagcctggtgaaactcagccagaggcaggcaggtttgctctgcagcccgggtctctctcagtcccccacattcagctttcatagcttagctgctcatgtcctatcactggttatgacaggagcgattcacccgtcagttctcagctggagctagctctcactgcaatgtgactgtctcatgcccaggaggaaatgtaacccagtgtggaccaagctgaatagatgctcgctgttacgcagcttgcaggctgacgcttctgaagtgggaggaggcaaaatcttgctttctaatcctgagtggaagcaaccattaatgggctaaaaatgtttattttacttttagttatgtgtgtgtatgtgtgtgtgtgtgtgtgcatgtgtgcgcatacacatgtgtgtaggtaggtatgtgcatatgagtccagtgcctgtgacagccagaagggggtgtcggattccctggacctagaagtctaactatatcaagagcagtcagtaactgctcttaacagttgagccatctctccagacgcttttccttgtaatatttaattgcccaacatatgcataacaatgaacattgtaaccatttttgaagtgtgcctcattcttgtctacactgggcagctgccacctctctccagaagtcttgcgtggttcctatcatcggaaaccatccctggtcaacagcagttttccatctctttcgtctccagctcctggcaagaacctccccactttctgcatgagagctcactctgggtacaagcagaaccttccactgtgtgacttgccaacttcatttagccctgtctcctcagggcatgctccatgtcctagaatgcatcagcacgcctttccatttcaaggcagcataatattcctttgtagccatacagtagcattttaaacaacccgttttcccgtgatggtaaaccttcctctggaaagacagcatgagaggcggcagaaatgggtgagatagatatcatcagccccgccctttgctgctgactgaggctaacgcagcagccctgctgtgttagctgaactgctggctgtgaacaaagtcgccctgacctacaaaatggatgtaaaaggtcaaaagtattaaatattccctgtaatgcttttcttctcgtcaaatgcccttcttgcttaattgcttgatgcagttggctttcaggacttgccacagtctactcgggaactgcttcaagacctttttccttcttcctctctaacctcgctattaatagcataactcttatttcccacgtagacggaagtccatcagaacggaaggtagtttatctcttccctttgggggaggtaaatgcccgttttattactaacgacctgtccgctaataagcacagacccctaaatttttgctttatcttcagttactgagagatttatcgctccttggtgatctttggaaataatttaaggctagaaagctattttcccagatactttattttctagctgagctggacaactggaaaatgactttgggatcagtgtgttaagaccagttttgagcaggagattaatgtgcctactgtgtgagcatgagctgacttcagaccctcagtacccacataaagacctgggtcttcatgtctgattcctgggctgggctgggagactcaccagccatgctagccacatccgggagttcggggttcagtaagagatcttgtcaaaaaatagaaagtgattgtggaagacacctaaggtaaactttgatctccctgcgcgcatacatgggcaagggcatctgcatacgctggctttgccaaaagctaaacatagagctatcatatgagtactctactgtcctatttctgtctgtatacatatatgaaggactctacactcacagggacatctgcatatccatgctcactgtggtgccagccaaagggctaaggtataagacagactagatgccattcaaaaggatgcacgcagaaagttgtatatgcatatgcacacacaagcatatgtgtgtatgaattgactcattaaaaagtgaaattctgttgtttaatacaaattagataaagcctgagaccatcatttgagtgaaataagtcagacttataaagacaaattgtaggcgtttgtgttttttgtgggttgtcataattagtttctgccagcttagcacaaacctagacataaatcggaagacagaatctcagagaggaattgcatctctcagaatggcctgtgatcaagtctgtttcttggttgctgatggctgtggctccagcctagtgtgagcagggcccccaggagcaggtgtcctgggctggataagagtgaccctgagcaagccatgggggaagcaagccagtggacggcacctctctgttctccgcttctgttcctgccttttctccctgtctcagcttccataggtgatgggttgtgagctgtaaagtgaaataaagcatgtttctcctcgagctgttttaggccagtgtttcatcacagccacaacctaggtcctagaagtttttatagacacacaagagcacgtgtgtacctgtgtcattgaggtagatgcatgttctatcctgtaacagcgggagggagcctagtactttgctgttctctctgtgtggctatgtctgtggggacaactcgagactgagtgagcaagcccagggtcacctggactcactgcctttgtgtttgtgcagaaaggtcttcctgggaacacagggggctggaggtcatctccagctcctcctggcttcctccaccctgtgtttcctggactgctcaatggagacaagggtgtgactcatgttcttgggctcagctctactggggccagccccttgcccctggctctacccagacctcttccatagctttgtgcttagggcattcctccaactcaagtctagataagcagaacaaagtgtttacgttttttatttgaaagaacattttaagtatttgactagattagcccaactctctgggtactagacccttagcgtctgtaagatattgtctctgagtttgtttggtttagacacagtgtctcatgctgcccttaatgatcttgaactcttgatcctcctgcctccaccacctgaatgctagggttttagacatgtgccaccatgcccaattcatagggaacccaggcctttggcatgcacacaagcattctaccagaagaactatgtgcccagtcccatgatgttgtgtctagtttcctgttactgaaaaggattggggtgtctgggcttagcaatggggggggggttacgccgccatggcttgccattgctgcgcctagagacagagaggggctaagggtccttggtaaagctgtccactctgttcagaaggcttcactctgctcagtggccatgagtacaggcacggtgacgtcccattgctgtagcatttgggaatgggatgtctcatgtgtgctatgtgactgctctcaggtcttcagagataatcagggatggtcatagcaagagtgccgtggactgaagagatggatgctctgtcctgcttctctgacagtctacagagaacacagagctgctcagggtagagtcagtgtgggaagcccagaaggatctgtgctgaggatctccccatcatcgcacccttgtatgtccttagatcttggggttagtggtagcattggctctggaatccacgattctcagcacttggggtgtagagccttttcaaattgtgctgaatagcactaagggagcatgactggtggaaggtgggaagggtaaacgagaaggccatggggtacagagagattcagagttcaggaccttggtggcaggagagccaccatgcatggtccttgtgcacatctacttgggtctctagtccagtgcaagtgtgtgaccaggtgacagagcacagtcaagtacagtggggtaaatgataccagcctggcattcaggacatttaggcaaataaactcatcatttttgtgatgggaagtctatcatttgtgtgtcgttacatgtacctgtaaggtcacctgggcagagaagctgagggggcatctggaaggttgtagattcctagggcatctagaagagagtaacctagaagagagtaaccaggccaccattgtccccgaatgtgtgtggtcagggtgggacaggaggccaaaggaaaatacacagtcctgcttcacattgagagagctcgtgacaaagtcatagaggtttcggggaggctgggatgtgacctgtcctctagaacgaatttctgggtagtagggtccaggtggagccccacaattgccctccctctggagcttccagacctagtaaccagaaatgactaagctcctgctggcctgccccatacaccctaaccctggaataggacaatgccagcttggagaaatggtggctggtctccaaacagtgtcccctgctacctgaggctggagtgctagtgacaatatccccctgtaggacattagcctgggccaggatggggctgtcttagaaaccttggctctcagcacagggaacactctcccaatttggaaggcattgatagaggcgtggtgatgtgtctttgtgaactgtctttagagtctccgctataaagagactccaagggctttgaaaagaataccatttgcacataattgctattgtgtaaaatttataaggctgaacagtgtcaggcaagatgttctcattgggctcttaatgtccgagtctccttgatcgtcttgtggtcaagagttacagccacagggctagggggaagctcagactgtaaagtgcttagcctgcaagcatgagaacccaagttccaccccctgagggatgcggtggtttgggcttgtcatctcagagtcactggtggaccagcctagcgtagccagtgatcttgaggttcacctcaaaaaccaaaggtggatggctctggaagactagtgcccaaggctgtccacctcccttcatacacgatctcactagtacacctgagtgttaacctgcatccaaacactggatccaaaaaggaacacacacacacacacacacacacacacacacacacacacacacacgcaagaattacagtggcttgtttagctttagagtctgtaaggtgaaaaaacccatttacccgacattccgagctttatacctaactgcttaagatgaacatttcaatcgttttttgctgttgttctatttttaaaaagacttgttttatttgtgtgtgtgtgcgcgtgcgcacatgcacgcgtgcacgtgttcgtacatgcatggctgtcttagttagggttttactgctgtgaagagacaccatgaccaaggcaactcttataaggacaacatttaattggtgctggcttacaggttcagaggttcagtccattatcatcaaggtgggagcatggcagcctccaggcagtcatggtgcaggaggagctgagaggtctacctcttgttctgaaggcagctagcagaatactggcttccaggcagctaggatgagggtcttaaaacccacatccatagtgacacacctactctaacagggccacaccttctaatagtgctgctccttgggccaagcatatacaaaccatcacagtgtgtgtgtgtactcacatatgtgcaggtgccagaggaaggtgtccaataccctgggaggcagttgtgagtggctgagcacgggtgctggggattaaactcagatcttcaggaagagcagcaggcgtccttcactgctgagccatctctctagctagtcccacattgtgctgtttgaggcaagatttattttccctttgtaccatctccatgccctgcaattgacatagggtttatttctttgcccatatcttctaccctcagcccccagtgtaagattctgggctgcgtctggcagccgggagtcttctgcatagtgaccggacgggacaaggcgggaagaactgagttagcctcacagaagagcggtctaactcagttaactttctgttgtaatttagccgggattaatggtcacttactggaaaaacgttcccggctctgtggtgtgttgctggaaactgaatttctccctctatttccccagagtctttttttcccttctgcctggagctcacacttggagcttcaggaagcagagtcctgttgcaatcatgacttccttgttccttcatattatttatttagtgtctttcaaaacgtaattccattacctttaatggtactagagactcactaagagcctggggacagtgcagggggtcactgggttatttactgggctgccccaccctgttagtctccagctatattattgccacaccatcggaaaagctcgaggggcctctcatgtctttacctccttgtctttacccccgagatgacttcagtcagtcagtcaacctcttgatcttgcaaaatcactcactttgaaaaacccccattaggccacagagataaaagaccatgggttaagtagctgtgtgacccttggtgacttgctttacctctctgagaattggcactcttagctcttgaagaacggagagatatgtttcgagggacaggaagcccacagaaatgatgggagggagggaagaaggcaaagcctgggacctgacaaatgaccctcaggtggcctccctgctcctgcatgacttagagcaaaacagcaacagaaatgtcccttatgttgaatggtgtgcctgtggctgcatgatcaattatgtttatgtgtgttagcgtgtgcgcatgtgtgcaatcctgcacgtggaaggcagaagtcagcctcatatgccacctaccttgatttttgagacaggtccctcactggctttgagtctcaccacacagacatcaggggttctcctgtgtctggctctctagcactgggattacaagtgtgcacgagctctgcctttttggaaacactgtttctggggactgaacatggcccacatgcttccaccattcagctaattccccaggcctggctcagtctccttctggcccctggggctctctgtgcttcttacacacaaggcagatgaggctgagtacacacactaggtctgcacatctctagagtgtgactatgtgttgggacccgtcttctcttcctcagcccacaggtggatggctggcttctggttgctcaggagaagacagactgccagagactgccctgctctgggggtgggaggagctggcttccttccaggggactccacatgggaatgtccacagacttccatttctaaatcctgtttttaactccctgggccctctagggaccttagtcctctctgaagtcaatggcgtaattgtcaccagcctcctggctaatgactgtgactgtcactcccctttctcctcatgaatggaggtaaatcctctgggacacttggcagcctggctacctgatggcttcagagcctggatttttgagtcttggagcactaactaagactttctttctgtgcctcagcctggattgtatccctgggccaagccataagaggcatgggggaaagtggccagatgggcacatggctgacacatcctgacatggctgtggtctgcttttctctctcctttcctccagagtataagaagaagtatggggaagaacatggctcctgccaggccggaatagcaggcttcttcacagaggtgggtgtgaaccatgtggcttttatttctcttcccttcttggtgtttggtccttttcattttgtggttgggatagccccgggagatgggatatctgttatcctgggtagtgtagattctgatgtgactctgcacagtgtttacccagagcccacacggaacccccacagtgtcctgagtgagtagactctgctgtttctagcaggggaagttatctaaacctgagaagggcacccagctgggatggctgggtggagggctgggctggctcgtgggtgaatctctacagaagctggctccatctgagatctgtggaagaagctgatagcagtttgaagatgtgtcagtcacctgggtgtctcctcacaccatatccacgtccttagcagagagactcaattttacacacatcgagctctccagtgcttgaattccaaaagcctctactctggtatgtccccaggtgacagggatagaattattgtttacagctaggacattttttaggcactgttttctctatcagaaatacacttccttattttgtgcatgtgcatatgtgtatgggtaagcctattgtggctcgtgtatggaggtcaaagggcaacttgcacaagttggttctcttcttccaccatgtgtatatgtgtgtgtgtgtgtgtgtgtgcaagtgagtgcagtgtccacaaaggccagaagagggcatcagatcccctggttggttgtgagctgcctgatgtgggtgcttcgaactgaaagcaggtcctctggaagggcagcaagcattcttaactgctgggtcgtctatctttccaggccctgttgtttgtttctttgtttgtttgtttttattgctatcaaatatgcataatgtacattctcccatttaaccatttcaaagccagtggcttttaatgaattcactactctggaggttttttcccctccagcctgggttcttccttgagtggcaccatatgtttctgcccagcagcctgagggatttagcaaagtgaaacctgaccttctgaccccatggcctcctattacctggaagacagaagctcacattctttgtcactgcccagggcctgactcttgggggccctgtgtcttttcctcctggaggaacatgcaccacattgagggggcaggaaagggagagctctctgaccccagggctttctttctgaagaacggctccacagtatcaggagtaaaactgtttaccttttcagagaggctctcagagtcaaagagaaggcagatggtgatacagtgtctagcccagaggcaacaaagaaaccacagacagtttcaccagctgcactctcaaactagtggacaccaggtgctttgcttccaaccctgccttcagtagcttgccacacccattcacaccagtgtcttttcccattctctctaccagcatgtgccccagcatctccatgggttgagcccaacacaaaataaaaatgcatttaaaacattataaatttacttttgcaaatgtatcacatttgcacagttcttaagcaggcatgccaagttctgttctgttacaatgtcaaaaggatggacctgcctggtctacacagagttccatactgggttctgggattggcaccaccatttgtcatagctcttgaagttaagaggagaatctccccctacctccctctcctagcccacaagcctacagttcaccagtgagacacgttttctctctgcatccttcctccccaccccagagcccttgtcatctttgcccaggctggcctcccaacaggcagcgaaggcatcatggttgtccagtgtcttcccatctgcttttgatgaaacctaaactctgtccttccctcagcctcctacctttctggcactctagagtagcatctgagggtgttcaacagttgagttttggtatatcctgttttcagcatgagtatgaggtactgggctactcagagctgcttcaagaacatttttgggcacagaggctcgccttgggcagagttactcagctccgggtgatgtggagatatttcccttgaggatagaggagagggtttattcatggccgaaatcagaactcactaagctcttgaccagaactaaaggacaaggattcatgttggggagatatcttttgccctgtctggtaagttggagaggttgggacattagagattgttagaagggagattgcatagggtggtaaggttgggacattagagatttttagaagggagattgcaaagggtggggaggcagggatgtataggagcagcctgggcagcagtgtaaggtaagagctaccagaagaagggaacagggacttggagcctgagaaaatctcagcaccttgtcatgggactcctgggctctgcagagaaacaggaacagagcgttgggagcacaggagaggatggtaactctgagtgggaggacccctccctctaccacatagttctccagtcctagccattgtctcccagcttgcctgggtctcagccttagctttgcttcccaggccttggcccctgcaaacggcagttctttgaactctctgcctccctcatttctgaaacttcagctgtcggcaactgaacaggaaatgcagttgaaagggtcaggcaggctggttcccctcctctgccctccggctgacctccacactaggctaccatgagctgtagcttgctggacgtggccacgatgggtcagagcattcccacccaagatgtctgtttgacctgtggtcagtgtccctgaggacatcaatcctctgcaagttaaatgcctcacgtccttgaggataaaggactgctttaaccactttgtagaccagaatggcagaggtgatattctccaggcttttagagaagacatgggctgacccaccatggagatgtcagggggacatttcttggttcagatttaatagtatatggtggcaggcagacaaaggctggtggctcctttcagtcacatctaggtgacactgtaccataaaggaaactggagaaaggcccacagtgtttattgagggactggatttaagcagccacgacttttgcttgtgtgcatttgtgtgcaacaccagcattgactgcttcttacatggagaagagtttagaattgatcacactttcctgacatttgagaatggaaccaaaaaggaccctgccaccagccaccagccaccagccaccagccaccagccaccagccaccagccaccagccaccagccaccagccaccagccaccagccaccagccactgtgaatagaaaaatccaaaccccagggcttccaggaaggcagtatctatctctcttgagtacagtgggggcgtcacagctttggctgagcttgccggcttggacagagatgagacaatgtgacagcttagacagagatgagacaatgtgacagcttagacagagatgagacaatgtgacagctaaaagaagagggggaagagcaggagctttgtcttcgtgttccaatttttaaattttattgtttttattcatgtgtatatacatgtgcatatgtatgcataatatacagtacatgcatctatagaggccaaaagtcagcttcatgtgccgtcactgtttcttgggagccgttcaccttatttttttgagtcagggtctctcaatgaaagacctgaaatttgtcaattaggctgactgactagtgaaccccggcctttctaatcgtccccagtgctggtgttataggaacatgcctccacgcctggtgttggggactgtcaagtccccatgcttccaggcaagtgcttaggagctggctctccagccccgctttaaggaatgagactactttgtttagaagattactttgtttatgtactttgtaacacttaagagatgtcaggagatattaggtatctacttagctttccttctagatgaaggcaaatcccaggaaaacatcccttccctcacccagggccctgcagagtctttgcaggctcctgctgctctcaaagatttggtcaagaacaagtcgcagatgaaaagaattgtgtttacaactggtcctaaggccatcactcatgctcctctgtgccctcagtgcttgggcattgattacaattcctttttaagctccaggccagaaaaatagtctctctcctctaaggaactcatggtttatctttcaaacaccctttgagaaccagcagtgttcttataccagtgggaggggaggaagtggatgggtatcttaattaggggttttgtttgtttgtttgttttgtttttttgttttgtttttttgtttttgtttttgttgttgtttttttttcaagacagggtttctatgtatagccctggctgtcctggaactcactctgtagaccaggctggcctcgaactcagaaatccacctgcctctgcctcccaagtgctgggattaagggtgtgtgccaccacgccggccttaattagagttttaatgctgtgaacagacaccatgaccaaggcaactctcataaggactacatttaattagggctggtttacaggttcagaggttcagtctattatcaccaaggcaggagcatggcagcatccaggcagccatggtgtaggagatgctgagagttctccatcttcatctgaaggctactaggagaagactgacttccaggcagctagcatgaggatcttaaagcccatacccacagtgacacacctactccaacaaggccacacctccaaatagtgccactccctggaccaagcaaattcaaaccaggacaatgtttgagcgattgtgcactgtgccaccttttcccggagagcacggaaacgatctgttctcatgaaggaagaaaggagagaggatgagatagaagagaaaatggcttcccataggtctatggcccagtgaggaaggggccataaacacgtggagactcagcctcctggtctgtgtctgtgtattcatctagatatgtcactcaaaatttaataatctcgataaaaactcatgtaccccgagacagtctctccgcaccttatgtcttctgttagagtttttgttttgctttatatagttattttcttttttaaaacttgcttgagtgtctgcatatgtgtatctgcaccatgtgtgttcatgctgtattttttgtttgtttgtttaattattaacttacaaaagcattaggtttcgttgctatttttttgatgaaatttgtttttgttgttcctttaacatattttccatatttaaaatcttactactttatcattgtgtgtgcatatggacacacttgatgtttgtatgcatgtatgcaggtgagcctgccacaggacatactgcgtgattgaggacaacttcaggagtcagttctctccttccaccttggagtttgggggtggaacttgggtggtcaggcttttgcgaaacttcttttaccaacggagtcattttcccggccaataccggttagctctgaactcgctaagtagccaaggctggacctgaacccctgctgggatcacaggagtgcaccaccacgctaggcttgatagtgctgtattctcaagcactgttcgctggagtcacgaggtttaggaacagcatctcttgctcaccgttctgaattttatcttagggtgaagctgggggtggggacatgcagctgcttcagtggccaaaacagggacttggtctgtctctcattctctctccttgcttagtaatttcatatttatgcctggaaatcctagcaacatgatagactccagattgcccagggcctggtaccatatgtgttgccataacgaggcatttcgaatttctttgctgtgactatggctctcgatgtgtcacctaatcctctctgactccctttggatttgtctctctaggaactggtggtcatgggtgccccaggctcgttttattgggctgggacactcaaggtgctgaacctcacggacaacacatattttaagttgaacgatgaagcgattatgaacagacggtatacttatctgggtgagtagctggggagtccgtctatcgggaataaggtgaaccatgagggttctccattaccaagagctcatggagtatcactctattaatagagagaagcagtagttggcctttacacccatcagtctcattagtcacacttttattagcgttccttagcatctagttgcacacatgggtagtagagaggggaacaaaagaggaaggcggtccaaactgggtggttttctcaaaatctgatgggtgagcttccagggaacaagtgtttcctcgccttggtttggcagtcagtcacgtacagatggtcagatatgcaatatgcaataagcctgactgaaccctgactttccctggacatcattttaagtgatgcgtctgcttcctggtcatgagtagagacagtagaactgggaacttccatggcagcgagcaacctggtgctgagccttactcaaaggctctgagacttttctctctcttttttagttttttttttttaactatctagaaagaaggtcagcatggtttaacttagcagccaccaggcctgagtggtcctgggctgggtgcagtggcgtgtctccacattcttgctactccagagcacactgtctctgcaggaagtgtatgcaatcaaggacatttgagtcattctgcaccgcatagtgagatgccatgttggaaaaaaaggggggagagaaggaagaaaggcagaaggaagaaaggaaaaaaaagaaggaagaggagggaggaaaaaaaggagcaagggagaaagggaggaagggaaataggagaggaaaggttcggagagaagccatgttcctttaagaagtatggatcacggggatggcagcccatccctgtgattctagcattctggaggtagaagcaggaggatcacgaatttgaggtcaatttgggctacttagcaagaccttgtctccgaaaacaaaaataagacaaaacagagatgagctgcctttgtttgtgtgacagtaccaagtctctgttcttcagtccaggcctcaagtggaccgaaaaggaaacttaagttagaaaggttaatactgataaaataatgtgtctttcatggctgctgtatatgaatgaagccaagagaacatcctgaccccctttttgcatagagaattttccagaaagaccgtgttaggcaggtgtaaggagctggggacttgccattcccagcatgcctgtttggcggagttgcacagacccaacagcaatttataagctttgaggtgttccctcatccagttccttcatccaccacttgccaagcatttgctcagcgctgtgctggtgtgtgattccttctaatttccaaaacagccttacaagacagctatcaccactgccgtgtgcggttcatagaggaagaagtgtggaggcattatgcaacttggtggtgaatccagttacaaacccatggtttaagtgctgaaaccccaaccccagggtgtgctcttgcctctagtactgaatctccaatgaagctaggaacaccacgagggtgggggcttcacctcacattccagggtgatgtatatttgatgtatagatgggactcagcagtaagtcagggatgtcagggaaggcacaaggaagctgcagctggttggtggctttaggtttggggacaggtcctgagaactctgggacctgcggtttctctccgagacccttatctgctgcagggattagcatggagcagttgaggagggccatcactcatggcagtcttgggtaaagtgagcagtcgggagaggtcaaccatgtggaaaacaggagatagccatgctaaagtgatcgcagctgacacgtgtcacaacagtcagggtataatcggagcagtggggttggaggtcatgagaaagcttgaatgatagacaacaggcacagtttggactggcggaggtgtgagtttggccttccagatggttttcagaaagcaagagacatttaaatcaagctcccacagccattttccattgtttctgggttcctttcagacccagactcactggctccctctctgctcacctgtccatacatctgtccatcattggttcttactcttctcttaaaaaggacatgacatagcttctaacgttagcttctctggagtcagacacattgggtttgaattttgcttcataatcttgggaatgtttgtttaaccatgtattatctatgatacaacaaaaaatctatgtctatatctatagcaataaaagagaatattaaaatattttgtagtattaggaatcgaacacagagccttgtagataccaagtaagccctagtctaccactgagctgaccccaagccctctgctcattttcttgacttggacgggttttgcactgtaggaatatgtgtggtcactcatggagttgtaccctttagcatgtggactgtgtcgttagaatgacatttctccaaattaaaaaacacatggagtatctagcaccctactttttccatggagcacagtctgaaggcatgatcctcccggtatccctgtgaacgtgcctttctgtgagataagatatttaatacgaaaacattggcggttgccatttgtcttctagaaggtccatgtcccaagaataacaagaacgtactgtctacacagatacctaggaaacactttcttctgctgattattttttccttatctgacctcctttcccaagtgtgtctttgctttctatctatcctgttcaggctatgcagtgacggctggccacttctctcatccatccatcactgatgtggtagggggtgccccacaggatgaaggcattggaaaggtaaggagagaagcagagggggggggtgcatgcatccctggaggggatttctagtttactttgccccagcactctccagataggctgatgtgtaagtgaccggctgacagggagccctgtcttcctctgcccacactgagttcaccttgaaagcttagagtgtacatgttattctttgccaattctcttcttggcaactgactttgctgacatcatgggcccccccatccccacccaagagggagatctgcatccggttctatacaagttcaaataccgccatcttcccaagcctctgcctcgcttccgacccgatggaatccgatctcatctgcaacgtctttggagctctgtgatagcaggtttttgcttgtttccccaatgtttcagggaaaaaaaaaacccactgtgttctcatgaccagtgtaactaaggttatactgggaatgtatagacttggctttctctaacgtatctccaagaaggtagaggacactgtgggactattgcctctaagggctcgctatggggagctgtggctgttgatattgtcagtcctgctcaggagtccacttttatcttgctggctgtactcatcactcttcttaatgctatgacggaatgcctgtcaggaagcaatttagggaaaggcgactttgtcatggcttagagtctgaggagatacactccatcatgatgcagaagatgtggcagcagacaggaagctgtctggtcgcattgtatccacgctccagaagcagaaagctaacctcaaggtcttcagcaacgctccacctcccaagcctccagatcagtgacatcagctgagagccaggtgttcttgcacatgagcctctggagaatatttaatgttcaaaccacagtgttggccaaacctgaacagtggtgtagactttgggcccgtagtccgatgggtagactggggatctgtctgaccattctcctggttcggagaagtggaatcctgagttctggaccaacaccatggttaatgagaaccttcagccaagaggtcagagaactcagaagcatcagctaacccgcttgcctgagatgcgctcgtgatgtcctctctacatattgtcttgggcaggaggcagcagtcgctgctcgtgcttcaggagtagggtgctgtggagagaggtcctttgaaaatgaaaccaaatgtcagggcgctgaagcagaggctgtggaggattgcatagttgaactctgataacttctgtccagaaccggctcatgtctgagtcacatgaattcctgtacatcatggaagaaaatgccccaatggtcatgacgcctcctggggaggaagtagggtcactggacttctccatggtgacctttaggatttgggtcatcttcattcctggcgtgagaacaccaaggccttcataccaacgtgctggtccttagccaaggaaagggccttctgctctgcttcttatctgctcatctttgcatcagatgtaagcagaggggctggagccatggctcagtgattaagagtgcttgctgccctcgtagatggctagggtttagttcccagaacccacgcaagcagctcacagtcccctgtcactccagctccaggagatccgatgctcttttccggcctcttcacacaccacgcacatgtggtatacattcaaacgcacacacaaacatagagagacagagacagacagacagacagacagacagacagacacacacacagagagagagacagagagagagagagtgcaagagagagtgagtgagcactggttgctcttgcagagaaccagagtaaggttcccagcacccacatggtggctcataaccatctgtaactccagttccagggtgtgggcagcaggcatgcatgtaatgtatacatacacatgcaggcagaattcatagtgctaagggctctggaaaaaaaatccacaataaagggatttatttaatgtttacttgtttattttcccaaactaagctcgtacagattccataattctaaatcctaagtggaatcagtttggggaggttatctccagtgccaacattcacccatttcatttgtcttaggttgggccatctgttaaagcttaactcctgggactgacagggttaatttaaagagaaggcttgtctatctcccaagggttgaatcacttggttctaactggggagacttctgggcctttttgtgcatggtttctataagctgtgtggttcaggagctgtggagatcctttctgccccaggattgcgggacgatttcttagcaagttgctgagagttctgttcacacctttgtcatcgttaatccgtgtgcacacagccgtgggagacaacaggaagacactgatgaataccttaatcagagcttcttccatcctgactagcatttgttttttaattccgcaggtttatatatttagagctgaccgaagatcagggaccttaataaagatctttcaggcatcaggaaaaaaggtgagttcttgatgtggtttatgtgagagccggctcccatcaaggacgtgcataacacagggcttctgcttgtctgaggagatggagcagatgagtttctacatggctaagctactggtgtgctttaaaaggtgttgtggcccaggcgctggcatgcaaatgaggcatgctctctctctgcccctcccttcacctttgtctccctctggctgtctcatgaatgcacatctccaacccacaaagatcagtactgtcaagggcaggcacagaagtgatcgatcactttcaagggacgcaggtggacggatgtttctcattgttcctgcctcatctgcctgatactgtcttctcctagaatcattgtcataccagggggacagctgtcacataaagaaaatacaaataaaaatcaccttagttttacgtacagggatgttcaatctacagcctctaggctgtgtgcaccacaggctagccatgaatgcagtacagcacaaattacaaagttccttagatactgtgaggtgggttttacactttatttgtttgtttgcttgcttgcttgattgtttgattttgtaactatattccaccatcctcagatgtaaactttttgggtagactttgtcttctcaggacattgagtataaaatgagcacaaagtcatttccaaagcctgtcttgaagaagagttctctacctgggacaccctaccattcccatctctctccctgcttcctgaaagtttccgttgtaacccatgagattaaatcagtaatcggttccgtgattcattcacttccttttcctgggcttcccatcctgcctgtgcttttgtagcatagaccagcaggaaggtgttgctgagcttaggggcttattgggataaggttgaggccaggaggattgcgggattgtatggaggctgttggaggatttagttgtctctgggacaaagcttgggatgtggaaaggagatgccaggacactttgcccacagtttctctgtcacaaggggaaacaatgattgtctcttcctggcccccttcccctggttctcactcattcctgcttggagttgttcttgctacacaacagcctggaaacatttcatggtgtcccaaccgtgaatggtattcggagttccaaacccctcacttacatatagatgttattctttcttatggttgcaattttagcagctttagtatgtacactcagtatatagtgatcataagctttgcatgaaaaaaaaatgtacccacaaactcgactttgcttttagctctgggaagtatgctagcatgtgttattttaacatttctcaaaccccaaaatattagcatcagaaagtaaccatgaaaaatttgcaaaataaattttctaagcaaccctaaagttggaaaagaaatagctaaatactattggtgataaattcaaaagagccctccaaacccaagtaggggtgactatcctataataagtggttggtggggtccactgtggataatgtgcctacacttggcagtgtgagcatcccttcagagtggctacagaccgggaatggtctccatgccggatgctgagtgttctattatctatcaggttaggtctggagcatggcttcctcggtcagttgtgtctcagtgagtcagctttgggcaatgatgtgtaagtggatgctgtagtctttgagaacccttgtctcagctgtctgaggagccaatgcactgggctctagggcagacacaggtctgtttgaatggcctcgttatggtaggatgagtcaggttgtttcatgcagagaatgaccggccaaggtactttatcccagctctgtagccatcttcctcctaagtctcctctccccctcccccttcccactcctcctctctccctccctctcccccttgccactctccctccttctgtgtgtgtgcgtgtgcgtgtgtgtgtgtgtggtcatgtggatatgtgcatgcatgcatgcatgctggtgtacatgtatgcatatgcatgcatatgtcttcctcattcactctctaccttatttttgagagaggccctcagttgggctggctggcctgtgagctccaggattatagatgctcagactcaggtcttcatgcttgcatggcaggtcaggtttactgcctgagctatctcttgggttccagcctttccctttctatagggttctgctctcagatcccttgccctgctctggagttacccctcatcataagcgtttccattctgtagatgccttctgcttattgctgcaagagattctcagctctctggctccccattatctcataggaagaggacatgacccctggggcctccaaagcgtgcctctagctttgcccttctgttcagagctacatagacaacaggaggttccagctcagaaagtcactcatacttctgcttttgtttggcaccacttcagttcaaattgtctggtgtcctgcctcccttccgggaagaatgaaaactaacaacaacaacaacaacagaaacaaacaaacaaacaaacaaaacagaaaagaggtctatttattgagttgacaccttataaaacaataaacacaagagccactactaagtctgtggctccgatgtgaagacagtcacgctccaagctgctggggagttaagtaactctggctccagaacatgtccttgacacgctgaagtgtcattggcttacatcagtgggtaaaattatctgcattttaaaaactgaaggatttgtgattggacacccatgaagacaccaagctaagtagcccactgggatttatctcctggggctcagcccaagggaacagctgttagatctgctcttcttgccttccctgggcttctaagcagctttcccaagtcctccagggccagtgttaactgcaggaaggaggttgcttctcttgcctctctcaaactccctgaggtcagctgccaacaagtctcacaaacagaagattccaggtctttctatttgaaagcatttatttaaaaacaacagtacattctcttttctttttgttagaagaggtttcaaaccagcagccctttagcgtgggcccagctgcacgcgtctgtttggcatgcacaggattcctttatacacttatcacaggtctgtatattagctgaggatctctcctttgccaggcaaagctctcatacactgtgctataatagccttagctcttttgtaaccattgctttaaacatttatttttataattttacactctgtgtacacgtgtgtgggtgtgggcacatgagtgctgctacacttttgagccggaggtagaggtgaaggtagaggggcttgtgagctgttcagtgtgggtgcaaggaacagaactcgggacctctgcaagagatagatgtatgctcttagccaccaagccgtctctccagcccccattttacttttgagggaggatcttgctaagcccttgtacttccggttcttctacctcaaccttctcagtagatgggatcacagccctggaccaccagtcctgtagcaattggtcttaaaaaaaaaaaaaaaaaagaatacattccagtcaacatttagatcttctcttgggaatggagaagcagatgggctgggagccagctctcctgctgatggtagtgagccacagctgtgtggggctacctcagccagtccctgggctccaggttgctgtggtctccggcactctgtgtcatgagttagacacatgatttacactcagacactgcttagctcatgtaagcacacttgagctgctagtcctcattttatttgttgcatccaggtaaaagcctggatctttggtctttgtgtttgagcctttagatataaaataacagatactggggccagggagctggcttgattggtagagtcttgttgcacgtggataaggaggagagtgcaatccttggatcacacagaatgcacatggtaaagccacaagtgatgtcatgctcctgtaacctcagtgctggggaggtggagacgggtatatgtacctgcacatgtatgtatgtgtgtacctgcacatgtatgtatgtacctgcacatgtatgtgtgtacctgcacatgtatgtgtgtgaacagacacacacatgtgcacacacacacacacacacacaatcaaataaagtagctggggctgattatttacattctgattcaagaagatgcagtacaaatgggccctgtgcccctatctgtcaaacagccttgagctacttgattctctgtcatgtcagcttgtgccccatctcttactccgtggaaggctagagaggctgtgtgccccatgtcatgttttcctgcctttttgtgttatgagatttcatgttcctacttgtgttgccttgtcaaatgtctggttttggagcacatatacaaacatgacatctcattctctgggagctagcctatttaccgttcccttacagggctctaggaaaggggcctgcagctggctagctttgagtgggaggtcctcaggagctggttatgtgctcattgctcggctgacacagcttctgaggggctgggaacatgtgcttcctaatctagtgggctgatgaagccagggccttggtgtataaagacagaccctgaacatgttgtcatgacgacttggttacagatgggctcttacttcggctcctccttgtgtgcagtcgacctgaacatggacggcctctctgacttgctcgtgggggctcccatgttttctgagatcagagatgaggggcaggtcaccgtctacctcaaccaaggacatgtgagtacaaagtgggcaatgaggaggtaggggttggggagtgacatcggtgtagtcatgtgacatgaacccactggaccccacctgagggaaggcgtgcactgggccatgttacccagaggagatgaaggcctgggtcctgcctggaaaagcttaatgatccattagtggatgattgtatacagtgtgacacttcagtgtgggacccagggagagtctcaatgactattggttatttccgattttcctgctttctctaagtgatgtcactgtgatatacacatggttgtaagggtctccgttttttcagatgagataaaccaaggctcggaaaggttagctcccttgtctctaaccttacagctaaaaagtaatgaggctgagattggagcctcagcaggctggcttcatcttctccaggctgtaccacctctctgagagttcctatgcctctttccggagagcgtagaggtgctaggctatctctgaggaatcccgaggaagcagtaggaattgagtagaaaggtgaagtggactgggcctgagcttccaacaggaagatgcgcatgtgggttgagcgtcgaggtagtaggacctttacctagttcagcaaggagttcatactggacaccagctgataaactggccaaaggctataagcataatgtcccttatcctgtagaatcacaaagtggggggagagagatgcaaagatgcctctctcccctctgcagctggtggaggggtgggggtggatgggttcttaagagggaggcggagcagcaaccagaagtggcaggggacccatgaggaagccgaatccaagtgtttaatcacacatgccccacccccatcttactactacatgaccactctatgcaccagggtcttctttctagtgacctatagcccactaggttagtaattatatggcactatgggtgagtgaagatgtaggtaggcccgagctcaaatctaaaccttgccaaatcttttaagcaaaggatgagcaagtagcttgaaattgacccgccccccccccccaatttcctcctctacaaagtaggaagtgccatatgctctaaccaggagggctgcaccgtatatgggtagatgtacacagaaggccttgggacttcccccaccacactaacaggaagagttacaagctggccatctgtgcccaagggttcttggatttagccaatcacagactaaacacaagggacaagaagtccattgtgtgctactaaacatgcttggacttcccttgccattgctccctgaatgatgtagtgtaaaacctatttgcatatcatttgcattgtattggacattgtgagtagtctagtcatggggtaaggacaggggagggaattcataggttctatgcaaatgtcactctgtttcatataagaaatttggacatctaaggttctggtatgttaggggccctgatgccagtactcccagacaccaaggaacatccatttttgtgttttgaggtggagtttcactaattcaataaatcaatcatcacatctttatatattttttttcaagctgtgaattctgtttatagtagtagaaatgtagtcacaacaaaagacagaccatggtgtggtggactatgggtagacggtaggcccaaagtgcctccacaccagggaggtctaaagattcttaagccggaagatgccatgttataatgatgtcctggtatttctatatcagttattcatggggaccatgggcattctcaaatggcttctgctgccatatacacccttgacccctctcagtgtttgcccaggaatctcaaagctgagctttaagattaatgtgatagacccctcaccccagaggtactgggtatagaaacaggaccctctgacaaggttactaatgcctgccctgtgcaaagcaacctcagggacttttaggaagaggcacaagagagggggaaatagacaaacgtgtactcttttggttaccagagtctacagttcttacccctcacctctctaccaaaagctagagtcaaaaatttgagagaggaaatagatttattcaaggccagccctgaggaaaagacaggagagttcttaatctcaaatcgacatcctggggtgggaggctcaagagtgcaaagacctcagacaccggcttcagggaggcactgggcgggacactgatgcgcggcagaggcctttcctctcagagcctgtctcctcgcttcctgaccttgacctaggagaccatcacatgcaacttcttttcaacaaacacagtcagttcacctgctctgaggaggggagaccctcagagactcctcctctttatgatttagaaaaccacaggaaaagggaaggtggcttaaaggtcaggtagggaattatggaagggcgcagaggtcacagtttcttgctctgctgcaccttaaaacagcgtcggatcagctgtggtggcacacgcctttaatcctatcattcagtaggcagaggcaggaggatctctgagtttgaggcccatctgatctacacaaagactagtcagagctatagcgtgagaccctgcctcaaagaagtcaaaaactgatttggggggaagagttaggctataaagagagctgagaagaaaggcatcgtggggatgaggagaggataggcttgcctgtctgagtttgcccaggagaggttcagtcattggctcacctgctattacctttcctctataacatatctcgggctgttccagactctcactgtatagatgaaaggccttattttgccatgaggagagatatttgggttcctgtggtgttgcccagctgtttcctgttcatagctgtaccctaagagggtggtgttctgagctccaagtttttattgtggtttttttttttgccccctcctccttcccccactcgatcctgtttcccagggagccctcgaggaacagctgaccctgactggagatgccgcctacaacgcgcactttggggagagcatcgccaacctgggcgacattgatgatgacgggttcccaggtgagcaggaccgcatagggtctctccaagtgcagccacttgtcacgctctgactttgtcccttgtttgtgactggctcctggattttctgctctacacccaaaggcacagcagctccatggggagagtgggcaactcttagagatggattggccaccagaatgcaccttttgtataatccattgtcatcagctccaccctctgtgccatgtgcttgctatggcctctgggactggtccacgggcttcttcccatcattgactctgtatctgggatgctctatcatgttgttaggggagtgaataaagagggtattagatatcgtcttccctgataatatcagcctggttgagtacagtgtgtgtcagaagaatgggtggtatatagacctaatgtccatttcttcttggacaatagtcccctccacagacttttggcttctctctctggtctttttagtacctcatcccctcaccatgtgtagagtatacagacattaggagctgcttctgcagggcagggatgtggcttgcttaggctagctgctcttcaagtccatcacactattggccacagatggtttcattagtgagagggctatcacctcagggtcaggggaatgcacagatcccacccttggtattacaggatcaggcatatggcgtactagaagccaagggtgggaaggaaggaagattctgggcattagccaccaactgtagaattgtgacagacgaaggttaggacaggtcctcttcatttgtgaatcttttatggattgcttccatgtccttccctcagaggatgaagagagacacttttcctaggagtaacctctcctcagcctttgtaaacttccaccttttaagtgttaggagaccatttgcccaatttaacgtttgaataatgaatagtggagaagttgtgacgagatagaattcagacatgatgactggggttgagaaagcctccatggcatctctaacagctgtctccccctcagatgtggctgtcggggcacctaaggaggaggactttgctggcgcagtctacatctatcatggtgatgccaatgggattgtccccaagtactcaatggtgagtgtgggagggaccgtgatgactctctacgtgtggtgtgtgtttgtatgtggggtgtgtgtgcacatgtgtgtgcaggtaagtgtatgtggtatacgtgtgtgtgtgagagagaaagagagagagaggacagagagagatacagagagagagacagacagacagacagacagacagacagagagaggatagagagagatacagagagagacagacagacagaaagagagagacagagagagagagagagattgatgctccactgtgaaccatgctatgggattgtggatttgggcttcctttcatatttttcactagtgaaaggaacaatcagttaattgataattgatagtttattaaatccagaaaaattgttatagactccccaatttacccaatttgagagtacatccaacatatgtaaaagaatatctaaattgtttttttcaaatattttatttttaattgtgtgtgtatataatatatatgtacacacacacacacacacacacacacacacggatgcagtgccttcagaggtcagaagagggtgaggtaggaagagggtgctggtttctctagaactggagttacctgtggttgtgagaagatgcagctgctgggaaccagaccttggtcctctgcagtgctgatctaactgctgatctgtctctccagccccaacagggacattttcatctagaattggagctgtttatttttacacttatttattttactctgtgtttgtgtgtgtgtgtgtgtgtgtgtgagagagagagagagagagagagagagagatgtataagtacacgctcatgcatgtgggggtcagaagacagcttgtgggagatggttttgttccaccatgtgccccagggattgaactcagggcagtgaagctttgtggtaagcacctttgcctgctcaacggcttgctcatccccacagcttcgtatataaaaagagagatgcaacttcctctatggttgacatctttgccaaaccaccggtgtactaagccagtggaatctaatttgtttttaatatttaactatttttggacagtgttgtgtgtagcccaggctggtctcaaacttacaaggtagtttagagcatcctttaatttctgattctccttcctctacccacaaagtgctaggattcctgtgtgtgccacgaaactccgctttatatggtgcgagtaatagagcccagagctttgtttatactgggcaagcattctaccccctgagccacatccccaggcctctgagaaacatattttaagatataatctagggacaaagggatgcacagagggcctgaaagttgtcacaggctattgtcaaacttggcatcgaaaccagggctaatcaaagtcccggtttcacatcccagacttggggacgtggaagtggcgaattctctatttttgcctcattagcacagtgctcaatcttgctgacggcatcaagctggcccatgggaaaaaaggaagtcaggctctcaacagaaacacagtcaggatatgtgtggtgtgtgtggagcggcttgtatctttctcccagcgggtcagtgacagaaaagaacacacgataagaactctgcagttagtgcttgcgagcctgcacgaggtcctgggttccacgttcagcaccccccacacaacacatggtgtcacatgtctggagtcccagtgctcaggacgcagaagcaggaagagcagaggtttgaggttatcctcagcaagtttgaggccagcctgggttataaaatcctcatcagcaaactcaaaataaaacaaaacaaaaacccccttttcagtcagcaaatatttgtaatcggacacttatgcactgagcacttcctgttcacacctgtacacagagatttgtatttttaaggctgagctatctttccagccctgggtttccttttttttttttttttttttttttggtttgtttgtttttggtttgttttttgtttgtttgtttgtttgttttacaaacccttgtgtcgagggctgactttcaatagatcgcagcgagggagctgctctgctacgtaggaaaccctgacccagaagcaggtcgtctacgaatggtttagcgccaggttccacgggcgagacggcggccccctttccggccgcaccccgtttcccaagaccaatggctctccgcaccggatccccggtcccgacacccggcaggggggtgggggcgggtttacatttttaaaatgtaacttcatattgattcttggattgattctttgtattgactgattttcacatcactcaccccattcccactcttcttcccattccatgtatccacctcggctcttgcaaccttcccaccaaaacaacaaaaaagtcccgttgttgacgctatagtgtgtcacagtgtggtccaaggtataccgtctgtccacacaacttaacttgcaaatgttcatctcaatgagccattggtctggttcaagcctctggcctctgctacagatcaatacagatcttccctaggacttctctggggtaccctgtcgttgccctgtgtcatggatatcttgcagctttggctctgcaaaactggtcccttcacgtgctgcagcagttcatagttagggtagatgttggggtgggccaactcaaagccttggatctgggcttaggtagtatcggaatttctcagctcccccacacccacgccaccagagacagctctcccatgcttacgctctcaggctggctcatccattgccacggcaggcaagggacagggccagctctttggttctcatgcccttggggccagctcacccgccctcacactaccagggccagctctcccatgctcacacccttaggctggctcacccaaaactcctagaaccagggccagttctactgtgcttcctgggcaaggtactggtcctgctccccccccccccaaccagtgctacagttggcaagggggaaaggaagggccagctctcctgctctaccacgatgcccagggggaggggggtggggccagctcttcacaacctcagatatcaacatggcctcaggcagcagcccagaccagggatatccactaggcctttggtggtaacagacctctgctactgtggggccatggacacagacatgacccaagtggcagcatgggccaggacctcaccacggccttaggtggcatcactggctactcgcagcaggctgttcctcactgccgtggagtcttttcactgtgcacacatccttctgcctctcttactcttccatctctccacattcacttgctcatcttagtggccctcaggcctctgggcatctggagttgtctcagaagtgctatgcccaacccatgcagagtggcaccaggcaggggtcatctgggacatgctctgcctacctgggccgtgtgagccaaggtctgtattttaggaagcatttgtaaatagggttacagtctctctcatgtttgtttgtttgtttgtttgttcgttcgttcattcattcattcattcattcatccattcattcattcatttgtgtgtatgtgtacatgtatgaatgtgtgtacacatgtgtgtatttatagtgttgtgtgtttggagcatgtgcacatacatgtgtgatacacacaggccagaggagggtgtgaggcacccctggtctgtcactctctccttccttcccttaagacactacagctaggatggtgtctttcaaggcccagcaatcctcctgcctccgtccctgttcaggctcatgtggcatacctgctttctatgtggccgctgagaatttgaacttgggtcctcatgttctacagcacgtgcccttgcccatagagcatctccccagccccgcagacacagtgtctacatgtacaacagtccttgcagcaaatctgagttagacggtggggccttgctaatgacttgggcctaggctctttctctctgccaacacctgcttagtcagagcttgacctcaactaagggaaaagtccttagggagattcacggagaggaggaggggctattgccagagagcctgtcatttctccaacctgaatcctcatcacagctgtgtgagacagatacacttcttcgccgttggctttctgatgagccccgcagagggtattggctttgcccagagtagctgccttcctcaactgcattttggaaaaaggcctgcccaaggaggttccataggaaaacctacagatatggggacttgtacacacacttcctggtgcgtccgtccacacagactgctcctttgtccttagatacaagtaaccatgggaacaacaaactataggtgattctgccagcttcattagaagctggaaacacagagtgtggcctccagggtttgggtcagggatgctttgtccccatgatgtcatctaaggagcccatccttaggtggagatgaggggtggggagttaagggggagggtcagtctccacacatcctcctggaagcttgtgcctggacctcggaggctaatcacacagaggggccacctgcaggagcccctgcctctcctctggcgtggctctccagtgttttgtttggttgctgggtggaagccttgcagaaagctgcagtgcacatttgtggttagagcggagcgtcttgtgggaagccgcgactggcagctggaaacggtgcccctgtcagcacgcaccctggcttgctgagcctttgcggctctttaaataaaaagggtggagagaaaatgaacaagagaaaaacagccatggtcacattttctaggcttgctaatatgtgtatgataaggccaatgatttaaaagggaaaaacaatcctttaatgacaggttcttccggacctggatcctggacagagagggcattgtgtttaagaactggaggaagaaatcagaaatgaatctaagcaatgggattgcttttctttggacccaaatggtattatttcttctggagaaattgtgagatcagagcctggacttctcccatgttcctctctaactcatgccacctccttgaggttaccatgaaaagtgttgattttaagatcctcagatgcctttctcaatccgagaaccccccgggtgggcatgtcgcagcggcccctgtgatctttctcctgccctaacagatgctgcacgtaaacctggacaagtggaggtttcccacagttcctggtttccatttacagttattagcaccgtgcagacttatcttcctggctttatagcataatggcctgcagatgtcagtggataacttaagcctgcatcgccaccccccaaatggaccacccctcgctctcccccactcccagccacagtatacccaagaaaggagaacccacagcaagatgcttccaatgttcttggcctccagagccgagatgtgcagcttcaaagcgtgggttttactcagatacacacacatttgtttagacaaagccatgtgggatgtgtggctgagccctgttaacaggcagtgtttttgcagtactgcctacagggcttcgagctgtcctttgatgctcacacatttccggccggatgccttaacagaagatggcaagccaccgtcttagatcatctctgggacagttccttgtagttatcagctgctgagggcaggggatagcctctcttcagcagagcccgtggacacgcccccagccccaccagggcttccccacagaatgactcaataagcatagagaaagaaaggcagagtgagccaaagctaccattcacattcctgttgttcagttccattcaaagacaccaaacttcttgagccagaaagtctcattttctgagatctgatcaattccactctttttttctgtccacggtggcctacttagctttttgtctccgtgattaaaaaaaaaaaaaaaaaaaaaagaccaaaacccgcgaggaaagggttgacttccgtttacagattataatccaccacagagagaaatcaaggcaggggcttgaagtagaaaccatggaaagatcactgcttatcagcctgctcactctgacttgcttggccagcttcctcagacagacaaggcccacctactggggatggccccgcccacagtgggctggcccctcctacattagaaaatgacacatagtcgcgcctataggtcaatctaatgaaggcaattcttcggttgatgttctctctttcccatgactgtagatttgtatcaagttgatacccgaagcaaactattgtgtagtgaagcccacggcagaaccgcgactgggggggggtctggcagtgtgacactgtattcttttgggtttttatttattttttaaaatttatttattttttatttttttattgggcatttatttcatttacatttccaatgctatcccaaaagtcccccacacgctcccccacccactcccacttcttggccctggcattcccctgtactggtgttcttttgttaaaagtatctttttactttctagttatgtgcatttgtgtatgttggggtgggggcctgtgcagtgaatgcagtcactgaggaagcagaagagggtactggttcaccctgaactggaatcgcaggcagttgcacccaaatgtgggtgctgggaaccaaactcggagccccggggaagaacactgtgctctaaccattggacaacccctccagccctgtattctttattaaaatgtgcatacggacgtgtgtgtgtgtgtgtgtgtgtgtgtatgtgtgtgtgtgtgtgtaatgaagctagaggacaattctagaggacaatttcaggcatcatcctcggctgcactgtccacaacctttgactcagggtctctaatagacctggggtctactgattaggaaggaggatgcccttgtcccctgaatccccccactaggattgcaagcacatcctaccatgcctgactttttatgtcgatgctggagccagatctcaggttcttgtgcttgcaagtcaagtgttttaccaggtgccccagacccaacaaatattcctgaacaaggctgtctgtcacgatgaagctaatggtgtataatatgtgacctggtagaggagtaatggatgtgacccgtgggttaaggtctttcagaagtggccgactccctccctgtactttctaggaggctcagcaccatgcagttctagatttaccaggtccaacagctgagccattgctataaagctcagaagtccatagacctcctagttggctgcctggagggtaagtttccacacaggtgtctttccagctggatacagtagtgacctgtccatcttaggagaggcaaatgcagtagttagtacctaactaagtaacaggagggaaggatgctcccgcatctcagccagttgtatctgggtcaaagcaaaggagacaagagagatggctcagtaaagtgcttgcctgccttgtaattccagcattagcgaagcaggttcagttggattgctgggcatgttggtcagtcagactagaccacttggtaagcttcataccattgagagacccagcctttatttgtcttgaacgtgtcaaaatcatagatgagccagcaagatggttcagtaggtacagacatttgctgccaagcccgacaacctacagttagttcccgggaccctcaaggagagaactggttctttgaggtcatcttctgtcctccgcatgtgtactgcagcctaggcaagccatgcacgcaaataaacaaatggaaaaaaaaataatgtctttaaaatcaaggcttaatagacattttgttggcaccaaacccaggcaaatttttaaatgaggacttctggctaaggcaagcaagaataaggaagtgtgtgatcttcaagtatctactatagaccttatggccaaatttacctatggttcctttcaacagcttcagacccagggccctgagggagctgggttccagcagtcccagtcctcactgcccccctgtgactccgagtttctattgtctgtttcagaagctgtctgggaggaggctaaacccgaccctgcggatgtttgggcagtccatatcagggggcattgatatggatggaaatggctatcctggtaagctgtttttctcaaaaccatgccagataaaagaagataggtgtgtgagataagataggttttcagtttagttagcagttgttctcacagctgaatgggagcttttgcctggtggcttcagctgccgtaagaaaatcctttatacaaagtcttgctaagaaaacccaaatccttggcaaaagatctgctttcaaatcactaaaaagcaatccacccaacacagattacagtaaactatatattcaaataaaatcatatctgctgttgcttaatgattaaagcttaatcattgtttaatgatatatttatatataatagtatgtgctagtaactacagaaaaatatacataaacaagatgaagttaatcttcatgacgtgtagtccaagatagccaacattttatcattttaatgtataactaatataaaagttattaatgagttaatttttaaaaattaggtcttttaaaatctgctatggattttacatatccagccctgtttccaggcctccgtacccacatgtggttggctgccacttaagacaatgtggctgtaattcttacaaagacattacacagccagacagcagcagtaggaagggctccctgaccacaaggctgggcctttgtcactgtggccctgaaccaaaggacagctggggctgctttccacaaggttctgagtctgaattcttgttctcagatgtcaccatcggagccttcctgtccgacagcgtggttctcctcaggtgagatgtctggctcttgctcgaagggccatgttcttcatgagtaacagccggagctttgttggggaggcctgggacagatcctatcagttggctctttcttttgtcttactccttgcaggctgaagggtctgtgcacacacaggaatgctccctttattctcggtcagtctttaccaccgagttccagagtgtgggcagggagctgagacctttctggggcctcttgacagggtttcgggtgatccaagagttgtttgcctttggtcatgaccacccccctttgttgacataaatacaaacattcttgttttttataagtaccagacactcaaagctctgggaaccctgtccagcctcggcttctatctttataaccaggatcgtcactcagttagtccttaatggcagggaccagggacctcctgtcactagcgcagcagaggtgagagacatgcacttgggcccaggacttgctaaagcctactgagcaccatctctacccgtgtatcatcttcagtatctcggcctctgtgagtcagaggaagcagaattttactttggagtgggagccaacggttttgttaataactcgatggcagaatgttctaaaataaactgctatggtcttccagctggaaaggatccagagcccatgtagccctccactacagatgctttgaatttagctctgccttctccatgcctcctcggagggacacgctctcctcttaaatgacataccccacaggaaagaaccagctgaccgctagaccgttctaaactttgaattgcccatgtgccagcaaaaataaccttgaagtcgggtatgacgtggagggcaggtggtgtgagttcaagccctacctctgtccttctaggtggagcctcttgggcaagccctttgacctctctgttccagggttttcctctgccaaagacaataacaggagtatttcccacaagctgtgggttgataacatgtaactgttagacacagcctggtatagagaaaagctggtcttgggtgggtatggttggtttgactttctgacattctgctttctggttttgtgtcatctacacagaagccctgcagtttcgaagagaacagtgcattccccagatgccaaagtcaaacctccctggttccttaaattatcaccctcatgactcggtttccactctttcctccctattctctggcatggccttcctcttgggcatggtggctctcctcttaggcatggtggctttcctcttggtcatggtggctttcctcttaggcatggtggctttcctcttaggcatggtggctttcctcttaggcaaggccacagtgaagagctgtgaagtgaagagctgggggagcctcagtggcaccctgtgaggcgtgtattcccctcacaatgacctgacagctccttgtggttctcagggtccctcttagaggaaacatgtcccctggattcttaggaagcagtcttgatacccagagcacttatttgtttttgtggtttgtttctgttgttgtttgtttttgttttacaaggcactgtttctctgtgtagctctggctgtcctggaactcactctgtagaccaggctgaccttgaactcacagagtccacagcctctgatttccaagtgcagggattaaaggcattgtttgtctcttaggctttatcattttttaaaattgaaaataaattctttttcctacaatatatcctgatcactgtttctgctccctcatctccttccagagcctccccacctccccatccatccaaccccaggccttctttctcttcctttccttagaaaacagagaaatcaaaacaaaacaaaagaaaaagaaaacatacccagtgtttaggagaaagagaaaaaccacaagaagcacacacaaatccgtaaaacccacagaatcgggaaccataacagataagcaaaagattaaaaagaacaaaaagctcaaagtgttatgagagaaaaaaaaatctctgaaaagcctgttgagttgattttgcgttgtcatctactgcgggcacgtggcctgcccctacgggtttatatactctcggagactccattggagaaaactgagttttcctatgcaaggagtgggatagcttctgagttagggtgggagatgaagctcgcttccccgctcagtgctgggacctcatctttattcccctgtgagctctgaatccaacgaagtttctgttcatctctctgccccatgagtacagatgttaagtgagttgccctcactgtggatgggagacctcagactccagcatggagcagaaggtggagtctggtgaggtggaatgccaggaagactgcacatgggtgagggagtgaggaccccacccctggacaacaatgagcccaagtgagcttcagaggaggatgggggtgccgccatcgcaggagtccatgccctcctcccccgctctccccacttatatacactgctctgttagcatgaaactgtgtgtgtatttgatgctagagactggacagagaacagggtggcaggcagtcctggttctggatctttgatcctagccagtgagccataaacaagtagatgatgatgcaggtaaccatgacgagtgcctccctcgcaccaggtactacatgagcgttttatgtacagtcctgtgcctagccagccataggcatgcactcagagggatgcttcagtaggtgatttcatcatggctgagtttcacagtatgtacttacagtaagctaacgcagctatgtggtgccatctatgggactgccatcatgcgtgcaatctgtcttcaccgctgtgcagtgcacgactatattcattgtgtgttctctttctttcttggattgtaatttgtatacagcaaaacgtagcagtttgggcatacggttcaatgagctctgactggtgtggatacccaagcaaattacaccaccatcaagacaaagtacatttctgccaccttgcacctttccgtatgctgttaaaagttaattcttattgttattgtgttggagaggctcacattaggacagcgttgtggaatgggttctgtccttctagctttatgtgggttctgagaagcaaactcatgacaagtgctttatctaccggtcttcctatgttctaatagcatctttctcccaataggcatctaccattgtggtttctgtcaccacaggtcactttcacctattccagaattccacataagtgaggttacaccgtatgcattctaatttctgagctctttcactcaacttgatgtttctgagatcttgtactcacagcgtgaactgacctctagccctctaaccagctccatggcgtgtgtactgctaataacctgctttatgggtggagaactaggggctttgcggtggtgagcttggttgtcagcttgacacacctgggaagaaagagaaccagtggaagaattgcttccatctggttggcctgtgagaagttttcctgattgctaattgatatgggagggcctggtccactgtgggcggtgtcatccctaaggcaggtgggtctgtctggtctgaacgtgaaagctagctgggcaagccagggggagaagctgatgaacagtgagccttgatggtttctacttcaagctcctgctttagctctccttgacattgggccataaattggaagctgaaataaacccctttctcctcctgttgcttttggtcatggtgtttatcgcagcaacaggaaagcaaattaagacaagctttgtagaaaattccagattctgataagggccggtaggaaaacacaacagggccacatggtcagaggcaacggtggtgtcacattcagccgaaaggaccaggtgggcatgtcctggcagaggtgatacccaaggtcagtgattgtattggctgatgcagcttttgggtattgtgtggcaggggcacacagctgtggttgagggaaggagactgggtgagagtgagagtggctattcctgaaggtgggttgcagatccacagatggttcagggacagtgcttcggggaagttagatttggagtttcttctgatttggggtgagccaagcaaagaggaatgtgtgtgtgtgcatgcctgcagagagcttctgggctcgctgcagttgcaggcgctgagggatgcacttgggatttggggaagctttgagctgtggctcagagagaatctgactgagcgtcttcatctgtgtggacgcagatgagcttcttggacagaggaaggcccggggctggttttataactaacctttccctgccccttccctgccaggagcacaagaacaccaccccatgagaactgtgccctagccacttttattatttgtctggaagtacaatgtgaagatttgatgtctctgccattgtaaagcactctagttacctgcttctttgaagtcttaaaagcacccctggctctgtcctcaggtgccccctctctgcctctgttatctctggggctggtgagtggcagatagggttcaccctaggagatggagcagctccgccctcaggaagtttgcacagggggcggggggggggggcacggtgttggtgctgtgttctggtgataggagcctactgccatgccaccaaagagcaaaggaaatgaccagagaggcttacgaaagattgttctcctcatccaaaaacaacacttgaagtggaaacaaaaaacccgagagacctgatgtaacagatgttggaaggagatgggcccaggagggctttgcccaccctttctttcaaaggaccctccctgctttgcaaggtttgcaaggtggcttgttgacattacacttggctcttcctcccagccccatgctctcagaaataagactcagactcaaaatatgtttacaacaccttgcccacatatctaggctcttcttgaactagaattaaaacaggataacccatttcttttaatcttcattttgtcacgtggctagttccctgtgctcaggtactatgcgtccagctcacatcttccagtgccttgctctttcccaaaatcctttctgccttccggatgtcccaccttccatttcctgcctaagccataggctataggctttttaatcgacaagtaatgcatccatacaatatgcaggatattctctctaaagtagttctggactgctccttctgtctcctgctcatcatgccatcatgttcagctgagctctctggaaagggaccttgccttctttctgacccgtggataaagggatggactctgtctggcctttcatcttcttttccaaagcctagcagtcaggagttgccagggtgtttctgtagaaaggagcctagctctctctctctgaagctttggatacttttctgtgctcccctgcccagaaatgggcttcagacttgtgggtgaggtttagaaagaaacagtagctatttttcttagtaatgcagcaggcagagataagtcatagggctgaggccacatatgtgtgcctgcactcgaacgaacacacacccacatacacacgagagagagagagagagagagagagagagagagagagagagggagagggagagggagagagagagagagagagagggagggagagagagggagagagagaaggagggatggagggagggatggagggaggggtggagggagggatggagggagggagggggagagagagagagagaaacacacagtagggaggcttcgcagccagcaggcttttatacagcattcctcagcttctttgttgcctacttcttattgctatgacaaaagcttggataaaaagcctaatgagtcaaggaaggaaaggtttgttttgacttgtaggttaagggtacagtccctttggagtcatggaggcaggggcatgaggcagggggtcacactgcatcatagttaggatgcagagggagccaaatgctgctacttggctccgtttctcctttttacccagcccaagacccccagcccatgggccacactttccccatgcagggtaggtcttcctacctcacttaacctgatctagaaatccgttctcgtgatgactccagaccctgtcaggttgacaaagttaatcaggacatcaattgtataccaatgagagtgtggtgatctactttatcagtagttctagcatcttcaggaagaaagaagaacatggagaggccaggatgttggtttctttcaggccttagtgctgcctgacttccttttgtcccatagccagatttgttcagagtcccccagttcactgcccggtcacagctgcccttccttctctgcaatggcggctacagcagggtcccctcatgccctccatcttctcagtgccttatgtggccaagttttcctttaatgttctctcatcctggagttggttggtcctctgttccctctgtcctgtcaccccagtgcatgttggttgatccttacatctttcccatgctcttggtgccccttaatctcgtgtcactccagatgcataaggccaggactcctgagaggtgaaaggttgggaggggagaaggtcaagccacagcttaggtgacacctccttgagcagatgtttatgatgggaaggagatgcctgcttctgtctcagcttttgtcttgatgccccaggggagtccagggatgctggccatccatcaggcactgggcgggtggtcatgtcagagagagggctgtgtttattgcatttcattttgtcctaaggccagacaggccttgaaatgttcggctggtaccagctgggactccattaatcaattcattttagagcataaccaatgcgttgatagacataaatgaaagaggatatttgaccaagtggatgagatagaagtttgccaagttctaactcacttagataaaaagggagaagcgactcagtgtatacccagtgttctccatctccctgtctatctctgtctctgtctctctcttccctgccacctgcttcctttggcttcgtaatgccggtacccaggctggcctggaactctgggaattccttctgagtcagttactgggattctggggttccagggtaagctgtcacagccagctctgtgtctagtctctgagtcccagtttatgttgtagaaacttctcgacagtgtctccccaacaagatggaaagcggaacttcttgggtgaaattttaaataatcgcccagcatctggtggctgatttatggcctcagccagctgtgtttcattaacaactaacttgcctttgttaccgggaagcaaaccattagtattttagggaatgtgctacttttaaaaccagaaaaaatacttacagagagcacactggcctttctctcttggggcatttcattctttaattaaatgctggctgaaggcccgggatctattctgcctgtgtagttcatgtttggttcgggaagctgctacttaacacaggttcccctccccctccttgtcctgcagggccagaccggtcatcacggtggatgtctccatcttcctgccaggctccatcaacatcacagcacctcagtgtcacgatggacaacagcctgtgaactgcctgaatgtcaccgtgtgcttccggttccatggcaagaatgtaccaggagaaatcggtaatgagtcacagtgtcgggactcgccagtcttagctgatgcgaggtgacaacccgggggatgctccaagttccctctcactttgagtcccagtgggctttgcaggcagggggtcttgtggactggatactcttcctctgcggctctgccttcctcttccctgctcatttacgtgtttcaagtttcacacacccttcagctctaggacaagaacctcttcctgcattctctccccaaatacatgaggaccagacgggaactcaccgggcggggcagagtgtgggctgctgagatggagtgcctgagcatcctctgcatgcaacactccatgcattgacataaggagatgataggaatctggaggccgcccactaagcttgcaccatcaactaggtacccgacacacagctgactttgggatctggaggtgaaggtttccaggactcaggtttttaagagtgtggtgttactctggcatctcagagagtttgggaaaagctcatattcagttagacattctcggacagtccagggagatggtgctgcacatggggttgggccctcccaaaatcaaccatcaatcaagaacactctctattagatatgaccacaaggcaaaatgaggtacatgcctcagttgagattccctctgatgatgagaggcagtgtcaactggagagctgtagctaattatggccacttccgtgtgaggtttgtgtgcaatctgagtgtgaaaagcactactctggagttcgtacttatgcacaacccccaaacctgcaaagcacacccacacgtgtagttccctcagctggacttaggacattccatccgttacatcaacatgctgatcagttgttagcaaacatttcacaggatgctgtaagcaattattatgttggaacggggaagggatggggagttgccaaacccaggccctcttgcccgataaatacatgcctatactcccaaacccctgaatcttaattttgttacacataaaagggatattttagagctctagaagatatgcaagcaatagttcacactgattctcattcaataaccatttactcaaatctacctgcgccctacaccaggaacagttccgagctgcaggcctgtggggagttctcgttgctctgttcctgatgtggtggtggacaccacttttatagttatgatttcggttctgtagaacattaaaatgagtggcatttgggagagcggagaaaccgagaagtgagtttaagggcaagaaggctcagagcgtgagactccagggctgagtgaggagatggggtggagcccctatgctttctcaaccggtgaccctttccggggccacagtcacacaacagcttttcacagaccactagggtctgagcttgaccatggtccttaaagtattgaaaggttgtggaaaggcaggctgaggagccacctgggcagtggtcagtggtgggtgtttgacccctgtgcattctccattcaggtcacttccctagcctctgtcacatgagtcactgaagacaaatgtccctttgtactctgcggctctctaggaatctttgccattagcaaccaggttggggcttgagttatagctgagtcttaaagaaagtgcttaacatgtgtgagacccagaattcaacccccagaagcacatgtatgtgcacacatggaagaactaagattcacgtgtggacgatattgaaattgatagggcagtaaggagaagtcccctcacttgtttttgtaagatgctgccctccggggacaaccaccatcacttcatctgaatagcaggaactactcaaggcccctgagatgaggttgttgtctgttccctcatagaaggaagaagagggaagtcactggactcacctgagactccagccatttgcgtccatacctcttagccatttgtatgtcattctgccctaattgcgcttggcctcacagtctctggcacgctggagtggccgtgggaggtcactggagaggtgaggaccatgcagctgtggggaagttgtcatctatgctggggtgacactttccagagtggctgttctgggatcacccacactcctgcaagaaccattctttcatgctctgtaagttagcccaacaatcctcctggttccctgttgggaattggttctctccccaagctggactttaggggatcatagtttgttctggactttgcttggcccttgaacccctctagaaaaggggtaggctttcatttacatccctttagggaatgaattcccaaactatcatctcattttcttctgtcattttcatgaaaatgagggacatctcaatcagaaatggagaatgagctggctgtggagcagagagtttagagagaaaaatggatggctgttctggaaatgtggtcatcagtgggggaggtagcttattggagctgtgtaagccagggctgatgtggctatcccccatggtcagcaaggagactcttggttccacagagctaggaagacggtgtccccagtctccagatacaggaaggacaggcacctccaggacaaatggtcctccacccagggtcatctcctaggcctctgcattcagaaggcagagctgggggctctgtattccttcctacttctttttggcggtggacccctagctgtcccgggtgttgtctgtggactgcctggtgatgcctgtctggaaaggtcttctggacactcggcatgtctgtattctgggctgtttaccagcagatggctgcatatgggcagccccacctgggcacctgaattacaaccaagggtggggtcttctgtggcatcagtctggtgggtcttcagtcacatgacctgtttggaggatgactttgggagccagagaagctgtcttgtcccttgggcttctgcatcttgtccttggaacctatcgggcttggccaagtacacgtctcttcaatcttgcttcagcaatgggaaatctcaactctcatttggtcacagcagtgtcaagttcagcctgtagaggggcaatggtgacttctgggaatactgtgagaaatgggatgtccataaggggtgaatttgccttggccactgtaataagcaaaatccagtgaggaaacagattgccgcagtatacattgtaagagggtttgactcttcttggaagggactgagcaggccggagaggaagcagtggtaactgcagaggagagctgccatggctgagtccaagccagtagctgtccagctagctgctcagatcagctgcatgacatctcctgcgggcttctggttagccatgtacacacaaactgaaagagaatttcaggtagaagacagtgacctgtgctttaccaagcttctgggtggcctgtcaaggttacactcagttaactccttccttggggttatcagaacctgagagtttgtggaagggactctgtgcaactccaacccaattctttaagcagagagcactgggtggaactacatacccctctgagaaagtatgatgagggctctgggccatggagaagaaactaagaagttgaattatggctgttggggccagctgccatgaaaaaaaaagttgttggttaagcggatgaataagcatggaggagaaaggccttcttacccctccagccttgcaggctccctgtctctctctctccctcttgttattggcagaacctcacagggagctgttggcaaaacaggtttgtgggatcccaaccctagaagcacagcagagtggatggtgggcttggaactgagaaccaagggcttcataaaccagcagagaagcatctcggttcatgggggatctgaagtatgaaggccacgttcctactccagagagccttggctctcagaggccgttctccgtgctcaccctggactctggaagcatggaggtgggaagatgaacctcatctgtgttattttgggctcttggatcagcaaagcgtgatgaagctctgccagacgctgtgctcagccctgggcacagagcacaggctcacattctagcgggaggggtctcctcacttgcccttctagacacgtgccaagtggcatgccggctggcttcccactctggcagcaggcagcctcacgaacaggtttatcccatgtttcactaagcaattgcaaacaagagttcggctcattccaaagagtattctcggatgcttcatccttggctgcctgtggcttcctagagcctcctgacagccacaaagagaattgatttctgtaaccaagagcgatttgctccttacccataggctatgtctctagttagaccatagggttgtcttggtggtcacaggcttgccctagcatcagatgaaaacttgcaagggctgagtcccatgacattgctttttccacctgctagttcaggggttgaatccagggtctcaagcatgctacgaaaaccctcgaccacagggctgtgtgcccagcctgtcttttgctctctgatccttcacatctccctggcttacagacaacctgacaaagctttccattgagcagaggccctatcactgcctgcagacaagctgtcgatcccagcgtccgaggatggccctcaggtcatccaaaggcatagcagaaatatagtcggaagcagatacctggtacccgcaaaccctttttttctgacgttagaggtggtgtatctgctctggagagctttttttgcatgaagagaattttcccaaagcttctggtcccctgaagtgtaggaatgggaaacggagagccttgtccacggaaggaacggagttacctaaaaaactaattgcttgctgctcaagtaaatatcgcattctttggaagaagagagagagggttaagaaaagccagcaaggtggaaatgtctctttccctcctctcctgggatgcgctgagggaaatgagtaaggctggaagtcaactttcagagctgaaaccttgttctgatggagatttgggaatgatttggtgttggctgggacagaccagagccccagttgattcaagacagctggtgctctcccggccccagcccatgtggggggcctttgggaaccagctctggggcagggaggggaggggcatgactggggacggtcagcttttccaccacatgacatcattcgacatggcatagacacaaactgccagaaggaagaacttgatgtgtcatgtgctgtgagaaccggagctaaccagaaccagcatcctcccgggcaggggctttgagggctggcttgcattagggggttgctactcagacaccaccctacctcaagcgagctgattggctccagcctagcatgtgtggggcacttgagtgggagctatttaaaggtcccgctggagcagagggcttcacagtcgaccgtttcttcttacttctggcagctcccagactctcctcactcaggagtttcttcatggtgaatcttgtttgtttctagaagggagagtcagatgaagaatcaacctatatagacttaaaatgtcaagataaattccatacctcgtaggaggcagcgctagagaggaaatgattacctttggcgggtggataaccaggtctgtctgggatcagacacttgaacactggggataaagctactaggttaaagggttggcacctgaatgccccactcagagcagagctggtgtctcatctatggctctgttgtttgaactgcagcctcctacccttccatgagcctccagaatcttcactcgtgactgcagtgatactttgagcagtaggcgcttgcaaaatacccagcgcggcgtagcaagccaaagtcattcccctattctgacttgccctgggttaatttaaaaatctcccacaatagactcccaagacaagggtctcagggcacaccttggcagagggatgagcccgggcagtaccagcctgtaaatgtgacagaatattggcataagcaggattctccagaggaacaggccagggagattggaaacgggaagaataagagtatcagggggtgtggggcgagctgatgggttttaagggatttgctcataggacaataggactgacaagcctgaattctgaactaggcaaagatgcgggctgagctgaagctttggtttagatctgtagacaggctcgatgcagaattccttattggggtacagaaagaacttaggggttttcttctcaagattttcaactactgcagcccacccacattgtggaatttgttttgcttcattcaaagtttaataatttaactgtcaaactcatttcaaaagacccttacagaggtgtgtagttcagtgcttgacgggttaccgaggtccaaccaaattggcacataaattagccattctagcaaaccaaacagggcctgtatgactaagcatgtcaccactgtgggtccattaaactcagtcctgctgggcatctcatgcctcagtgtgaggcaccctaaggggaaagaaaacactgtctacctactgggtgctgcttggagtcctggcttctaccatgaactggaaaagtaccttcgtggagacagagagattggaaaaggccaagaggatgtgtgttggagtccacagcttctgccctgacttcctgtcttcctgtcttccttccattctctctgagctcatctggctggatcaccagggtctgctgtccctcccagtttccttttcctggggggcatgaacaaccctcacttgtcagccaagaggatggctggacaagggctgttaaaaccatgtggctctagccacagcctctgacttgtcccagcagtgggcattctccagatgtgatcttgctacatagcatcctgaaactcgcttcatttaaacataacctttcatactgtggggttgttggtgcctgaaatcaatggtagattgcctcagagtttggctctggacctcagtctgtgcttggttctgccacttctgcattcagagagtaagaggtttcaggtcaggtgagactgaaaaattaagttctcagactgtgtggtaggagtagccagactagatctggagaggtcttgattctactgaatggcagatggctcttgggctgggctgagtatttccatttggaagcctcgggtccctttgtctcaaaaatggaggttttgtatgagttgacccagagaatttcttcaagaccttggcagtctatacacacacactccacttgtagcatctgcttctaccccgtgctttctctacaaaagcactttccctagatgcccttttcttaatagtagaactatctcctgggatgacccatgtcctgggtccctcctggtgacccagcatcaccttagaatccagctgtttgttgggatatgcaagttgggggcatcatagccttcagtgactaggaatctgccatctgggcatgatggggagccatgatatggcaggggcccagggaaaccattagatacagcaaaagtatgccgagacgtagctaaggacaactgacaaatcacctttctctctccctgttcagacttccccggtctcgtgtctctttgatgttgcttaaggacacagtcattcctgtgagttgggctcaccatacttaaatactggccaggcactggctttcagtggctcagcttctgacagatgggtgtgtggagatggcttggggaggggcctcttgtttgcctccccactggtcagctatctcatctggtcatgttagaggcagacattgttgtttgtctactataaaaactatacttcctggagctagaaaaatggctcagtgattggagtctctggaggacccaagtttggttcccagtacccaagctgggcagctcagccagctggacctcccgttccaggagatctgatgtctcttgtagcaccttagagcacttgctcccatgtaacatgcaatcacatacacactcgtaatatatagtttttaaaagccttaaaaaatacaataacctcagaacccacaagagttaagaaatagaatggcttagagaggggctggcccctgccgcagagaacagggctgtagatctgctgatgcaggagtccagttacctagtaaaacttacagctggctgtttacttatagactcaaagtgatggaggcaaggtgttctgggtttacctggcatgaatttagcatcatagcctcagtcctttttatattctattctgtgtgcaggccactctgctgtctggcactgtcctcacaggtataggggctgagttttcagaagaaaaccaccatgtaggagccactatggccaaagtcttgctagaaggatgggcacactgagagtaaagccatcctcagcctgtatcagtttggggctccgtgatagtcgacttttctttttgtctgtgtgtcgactgatacctcgtcccaccacgggtagctcacagtcagagaaggtctggcatttgtaagagatatgggaattattgcaagcagttgttccctgtatcacatatagtcgaacagaagtcattttcatgatgttagtcccttctagttacgtttgacagacttgctgtgatgctggcccgtcagaacagcaccctacacgtgataaaagtaatccctgaatatatccaaattggtggttctgttggcatctcacaaaggcatgaggtttgaacaaggatgaaccttaagtctgatgagcacagaatcctggatcttccataggctgactacaggcttctgagaaggtcttgatgtgggctgccaggcagtttcctatactgtgtgaactgtgcatagggtctccacagaactgtggggctcagagtctcaacactctatgtccatctttgctaacatctttgactcttatttactgtcaggtctgaactacaatctgacggctgatgtggcacagaaggagaagggccagctgcccagagtctattttgtgttgtttggagagacggcagggcaggtctcagaaaggctgcagctgtcccacatggacgaagtgtgtcatcactacgtggcccacgtcaaggtcagtctcctcttctttttaaccctccgattccgagcagcatgagctacttttgtttcattatgtagcctcggacttccaccattctacttcacaacatgcattttgccttttgaagttaaaagctgacagccatcttatttatgtttaattccgtttggaaacactgttgcgttgtggaggggtgcacacctgccctggtgtgtatgtgaaggtcaaaaaacacgtccgcggcataggttctatcctctgcctttaagcagttgggaatattgacctcagctggtgtgcgaggggagtgctacccacggagtcattgcactggtccctttgcttactgtgctggcctcagcctccgagaaggggtagaggatggcaggagagcagtgacagtctctgactgtgcctcgttctcttgggaggttttcatcctctccaaggcttggcagtcactgggaggaacaactcagaagctgtgtgctgggtcttcagttgcgtcattctggatgcccatctttgtggtccactgcacgatgtagtaactcacggtcagagatgcatttgaagactggttggggctcacttctcttactttctatttatcttaggagtgcatttgggggggtctcttcccttcctccaaataaactcctaaaatgtttttctcttcttgagattatttgctgggtatattttcatgtaattcaggaagccaggctttggtgatagagaggccctgcagaatggtcagccactgacccacagacagagacagagaacaaaggtggacagatccacggcgtgggcagttggtgtaatgcctgtgggtatagggttgaatctcacagagccggtgtggatcagttgtgtgagcactgtgtgagcctctgactctctaaaacacgtgcaacagtcgctctgacagtcatcattagcatcagcagcccccagagcagagtagcaatcccagcacttggtaggaaagggcagaagaccatgagctcaaattctacccaggctacttagagagttgcagcttagtctcggcttatatggtcagaccctgcctcaaaccaaaccaaaagataaacattgcatagtgagtataaaaactttgcatggagtctgatgaagctctcagggttattagtctttggttgggacatacatagtttccaatattctacttacacaaacaccaattttgtttagtttaacataatattattagccatagccgtctagcagatggaaatctgtagattgaagtatcttcccgttgttgcctcgttggggtcatagtcagatagtaacagctgcatctaggctgtgtgtagagaactgcttccatgtctggcctggagcccatgagttcatagcctgagatactttgctatggggctgggctctgccttctgccagacagactcatgtcagggcctgcccaggccagctgcccttgcctggcgctgctggccacttataaagccacccgtgctcttgctaagcctaccctgcccttcttgagcttagattcctttggtttgtgagtgagggtgtggactgctcaggagaggcctgtgtgcaaacctcaaggtgtatcaaatggctctgtgtggcacttgctagggagtggggcttccttgtgctaagttggcaccacaaatcttttcctttgaggctctttgcaacttcttgctttggctgaaaatgtcatagcaggtggttcatacccactagaagtcaccactgcagagaacctgctaagtactcttggctaagtgcattcaggaacagcaatggcgaagaacaggctggggcggagctatctctgtgatggtctgaggaaggctgccccaaaggttgctctggccccttctgttctaagcacttaccagctataacagtcaaaacacaaaacttcccattgaatttggattttagataaacggttaatatgtgtgcaatgtccctctttcttagtggcttctctttctgaggtatcagtcactataggtctctgaggtccagtggcatatatggaaaaataatctaaaaataataaatgttaaggtaaataccttttacctcaggatatggtagtttcatttttaaaacagttatttctttgtctaatttatgaactttatcgtaagtattatataatgattgatattatttgcagtttcatatagccgcggaatttctaggaacatatccctgtgcataagggggcttggcattacccaaatacttccagaccatagtctggttgttctcatgtggccacatgaggctgtggaatataccagagagagacgtcattccaagaaatgctcaaggcagtgactgagctgtctcctaccgttacttcctggaccctaacagaggacctgggcgaatgtggagtattgagtgggaggaagtgttgatgagctagctggctgtttccattgtggcacagctggcctaagacctcgcagccatagcccggtggcttacaggggttgtgggaaaacagctggggagactgtggcttatgtgagggttgagatggggcagcaggagtgggggaggggatgctgcagtgattgctttccatcctgggggcggggggggggcatagactggaatctgagagttagggctgaaggactgtgacacagtctctactgcacaggcctggcgctcggctcggcagacaagtcacggaagacaaatgcaaacgtcccgtcttatcacacgccatatggccagcagacaagccggcactggggccacgcgtgttttgtttaggctatctttaggcatttttctttctgtcgttaagcccgttcagtactctcttgttttcttttccgctctctccccctaagttttctctccatatatggtgatagtctccactgcagagactagcttggaccaatacctgcctcctgagttagctgtgtggtaccttgctctggtcctgaagggatctccggggagattccacttttgtggcaaaacacatcctcctcttggggcagtgctgaagcggttccagtggcttccttgattgcttcccagatgtcatagaccccacttatctcttccctttcccccaaaccagtctagctttggaggtagccccctcccctgctgtccaagtggtctggaggtgtcacaggtaaaacccagagcatgtcctcttggcttcagggctctctagcactcagccccagtttaccttttttttgccttctacttgcatgacacagatgctctgactcagctgccgtgccccttctctctgagctaccgggatccatgcttttccaccgcagcccttgggctcctgctgctgtctccagcccttcagtcatgttaggtccagctcttgtgtctgcttccagtcctgcacctcctgctttctctttgcattcttcctgccttaaggctccactcccttcatgcttgctttcataatttctctttaactcagatgactttgggtgcttttgtacaataagaggggcagtgcccttgtgtaaacagaaaaccaatcattgcccaactcagaaggcaactgggaaaaatgcaaaaaacccactgaagtcaggacactgttgtggaattctggtcagttcctagactccacagaggcgcctaccatcctgtgtgttgaaaagggaaattaccagactcagagagaattgaaaacattagggtaccccagtggtgtgctccccctgacaccaccagaaggatgaacagggagttgaccagggggtaactttttaaattgatggtccttttatagagccatgctgagtgtcattggcagcacatacatcagcccacattgcagcctttgtcatattctgagtaacatgactcttccctcctcatctgctgaatatatctgactgtccctgaggacacagtctcgccatgggccagccccagtcatggtcccaggccctaagtaacctccctcatgttcctgccttctggaaatggttccccaccagactcctgctttgggatagtcagctcagaataaatacctggtacatggaaccatgttggaatggctacctgtgctagctagcacctggatcacaaggagtttctcttacagagtggagctcgtatctctgagaaaccagtaaatggtgttaggagaaagtgggcaggagagcttgggacaggaacaaacatcccgtggctacttctatgataggtggtgtcacccagaccagcggtgactgctcctcatcaggcagtacccagggaagtgtgtcctgaaccttccattagatggagtgtgggacaggccagtgagcagccacagcagccatgctgagtgaaccatggggatgcaggaggtcccacacgtgaggcctgcccctcccttcctcctgtgagggtcagcaatgccctccagaagccctcagtgacccccgagggctgctgagaggcccagcaggtaaaagtgcttgctacagagcctgaggatctgagcttgatcgctcggctccacgtggtgaaaattcctacgttctgagctctgtcctctgacttccacgctttagccttggcatgtatatgtggtcttcacaggtgtcatgtgtgctatccctcagtcccaccccatctcacacacacaaatgtaaaaagaaaaaaaaacttttgttgaacagaactgagccactgatctgtccaagaaaagcccacaagaacagggctctaagcactttggccattctggaaagtcacagttctccttgaaatggctctagtatgtttcatggagggacttgcaagaggatttcaatcaagtttctgtggccctgcttgtaggaacagtacccctcctggcctggcagggtcttgcactggtcagtgctgtcctgggctgagatcgcaccatgggcttcgtctactcccattctacatcccataaagcacctgcgagccctcagctcagtcacatgcgtgagtctgcagaacagacatggagtaatgatcctcaggtttcagagcactcccatacacacatacacatatgcacacattcatatacacactcacacacacacacacacacacactctacacacacacacacatatatatacactacatacacatatatacatnnnnnnnnnnnnnnnnnnnnacacacatacacactcacatacacagaaggatgaacacattcgtatacacacacttaatacacttacactcacatatacacacacactctacacacacacacactctacacacacacatatatacacactacattcacatatatacatacatacaaacatatacatacacacatgcacatatacacatacacactcacacacacatacacacatacacatacacagagatgaacacattcgtatacacacacttaatacacttacactcacatacacacacacactctacacacacacacacactctacacacacacatatatatacatacacacatatatacatacatacaaacatatacatacatacatgcacatatacacatacacactcacacacacatacacactcacacatacacagagatgaacacattcatatacacacacttaatacacttacactcacatacacacacactctacacacacaggcacatatatgctcacactcacatacactcacatacactatactcataggacacacatatatactcacatgctgccactctcacacatgcacatacacccagacttatacacacactcatacacacttacttacacacagtcacacacacacacacattcacacacactcacgtacttgctaagaaggaaatagtgaaggaaagggcaaccagttgcaggggaagaactcttacatgagaaataagaggaaaaaaacagcaaaggtcccttctttttctggagaaataatagctcaaagccaaccatgttgattatgcaaagagatggctgaaaatatttaaagctgtacagtttggcagatttaagactgagagaaacatagagcattagaaacatagagggctttagagaaacatagttatgtttttgaaaaccattctaagaagcatagaagggaagaatgtctctcaaccccctctgccactgcagcaactgtttttagtttcttagggtgtccggcaagcacttgtttgtatatttagaaaactgtggtgcctcctggaaggtagtgagctacaatgcgctgtggaaaagctcccgtgcctcccactgcctggagcatggactttgggacttctgccgaatgatggagtgtaaagaacttggcaaagaatggaccactcctaacacgttagcacggagggcctccaggagcattgtgtgaagacgcctgatgcagcgggctacctgctatctgctcccatccgtgtggcattcgagacaagctcacttaatgagccaggaggtggatcaggggtttctggaggccaaggatttggagagaggtggcagttacgatactagcaccaaagacaaatgagactttctgggctgaggaacacattttaggtcatggctgtgtgagtaggtcctgttaccaaagctcattggcatgtagattgaagtgcagggttggcatatataaattacagtgcaaccaaatgtaattgattttgtcacatattaacagcacagtgatgtcggatttgccccactgtcattctgttggattccttcctcctcttccacttccatgtccacagtgagtcccttccattaaatatgtccccaagattccacgtagagaggggacccgtgacgcctgtcttgctgacacggcttatctcagtgcaatgattgctctcctctcctgacagttcccagtgttctgggaactgctttctgcagttgtaacaaaatactgaccgaaagcaacttaggaagggaaggacttatgtggcttacagggtttagtccatcactgagagaagtcagggaaggaagccagaggcgggaactgaagcagaagccatggagggtcgctgtctactgacttgcttcctgaggcttgctcaactgcctttctacctgcccaaggctggctccgcccacagtgggctgggccctgtcacatcaatcaataatcaaggaaacgcccccacagacacgcccacaggccagtttgctgaggcggatcctctgagattctccctttctgggtatgttgaagtttgagtctatggacaaaactgtgacaaaccacgctatttgagtttgctttgtttcgctcagtgcactctcaagctcttacctgctgacaccctctcccatccccattcattcatttttaaaagttttaaacttttgcttgtttttctttctttgttctgttttccgttctcgttttttgttttgagtccaagtctcaggtagcccaggatgccgtctatcccaccattagctgaggagcactttgaactcctagtcttcctgcctccacctctcaagagcagaaattgctgatgcatgtgtgtgtcataatgtttagctatttccttttattttggcaaacatttcttcttttggaagaagtcaaaatctggcagtcagccaggttccttgcgaggctctttagaatgtgacgaagtgtgtttgggggaacatgacgtctgttattacagaaattagcatcaagccgttggtagttaacctccctctggaaacgattcttaggaaaaaaaccccacaccatgccaggtggcagtcacgggagccctcacacaaactgcgcatctaggatgtgccagccgctgcccattacacaacttgtgatgtattcactgccattatcttcattatcttgtacaggaaataaggacctgaccagaacttctggctggcaaatagggccggtacccagaaactctcacttcttagccgtcatatggtggcacggctcatacagatgacggattcaaactaatgggctctctgctcctctcgtgtggaggaagctagagaaagttgaccacagctgtagaactagaacgaggcttcccatcgagtcccaggagcacctcttctgagcatgtgacatcagaggcagtggcttggaatgccctgccctctagagcagtgtttggcttctaatgtttagcagcagggtattggttgtggggagctaacgtgagtcctctgcttggcttcctggtgagatatttcactgtggctgattttaagcagccggatgacatcactaatgctggcttggaagatgcctgtagccgagaattattatgtagaggatctgatacttctaagcatcttcaggagcaagaaccgtgataaaacacagcaaagcgatcagggtgacttctcagcattgaaaccttcatcttagtgtgaagtttaactcgcaggtctattctatttaactcttactaacatatgtgatgagccccaacctgcagagctcttggaaatgtaatggtggggtcttgcaaaccgactgctgccagctcacaccactgactgtgtgtttgttagtaagtgggactgtcgtctgagtcacgctttacacgcagctgtttatcaaagtcattcacccttgtttcatttggctttggcaatgggtaggaatatgaatcgcagggtccgtgtaaccagcacaccacaggtacgtgtgtgtgtgtgtgtgtgtgtgtgtgtgttgggtttaaagaccatctgtattttggctaagtttattagactgtatcatattcatttttaaactttttttcttgaaacaccttgatcttactcctcacctattattctatgtgtaggggtgggggaagggccatcctgcagccttctgtgtgctaaagaaacatcaacggctgaacatcgagggactggagagggaactggggagctcctccgacccctcctcctaggtagagcttttgcatcttctgagactttgtctagctccacatggacttccacacctaccctgccatcacttatggctgagtccatggcgatggctcttatacatgttctaaggaagggacctctacatggaaactttactgctcaggataagaagaccagcatctcaagggcttaaacaggttgacttaaaataaaattctaacaatgtaaattcagattttttttttgttttttattttttgtttttttcgagacagggtttctctgtgtagccctggctgtcctggaactaactttgtagaccaggctggcctcgaactcagaaatctgcctgcctctgcctcccaagtgctgggattaaaggcgtgcgctaccaccacccggctcagattttttttttatgtctgtctatatggttaaagaaaattagttacttttagtaagtttattaaaattgagtcctcttttaaaaaaatatttgtttttattttatgtgtatgactgttttgcctgcataaactatgggcaccatgtgcctgtagtacctgcagaggccagaagaaggcactggatcctcagaagctggagttgtgagccattgtgtgggtgctaggaactaaactcaggtactctgcaagactcagcgagtcctcagccagtgctcttaactgctgagccatctccccaggtggttatatcctcatttctctgactttggggaaattcttcagactctttaacaaagaagtcatttttctcagaaagcatttgagtagtctgaggctatatgaaccgggggtttaaaaatagccatgaaaacacaggattaaaattaatttggaacaaatcaaacctttgagaaagagctgaaaacatgctcttcatcttctctcctcctcttcctcctctctccctctctcccccctccatgagcaccctccttctctcccccctccatgagcactctccctctctcccccctccatgagcactctccctctcccccccccatgagcacatagatgcatgcacatgtannnnnnnnnnnnnnnnnnnnnnnnnnnnnnnnnnnnnnnnnnnnnnnnnnnnnnnnnnnnnnnnnnnnnnnnnnnnnnnnnnnnnnnnnnnnnnnnnnnnnnnnnnnnnnnnnnnnnnnnnnnnnnnnnnnnnnnnnnnnnnnnnnnnnnnnnnnnnnnnnnnnnnnnnnnnnnnncatctacctgctaaccttcatcctacctggctttgcccctcctcccacctcaggcctctctagggaaagttgctgacagactgctgccctctccctacagacatcagacccagatattctctccactaaccatgcatatgtactgaaatcagaagactaaatgcacatgaccgttagctcaaacttttctagttgtccacatgtcctctgacgggggaacgtaatcctgtgtcccacggattgtcatgtcctctgacgggggaacgtaatcctgtgtcccacggattgtcatgtcctctgatgggggaatgtaatcctgtgtcccacggattgtcatgtcctctgatgggggaacgtaatcctgtgtcccacggattgtcatttcctctgatgggggaatgtaatcctgtgtcccatggattgtcatgttctcttggaatggttctttggctttgtcttctgtgtcatgatggtttggaagaggacaggccaactctttcatagaaggtctctctgtttggatttctctgcctgacagttagattcatggtatacatatgttgtagcaataccatgaacaattatgtcttatatatctagatacatacacagccagcatcacggaagaatagatttttactttgaattcagtgtggctttccaaagttgggttcctattgtcccagaagagggctgtcagcgtttgaaggaagcgattatgtatctctgctgcctggaccagaggcatgtattccaggtcctagaaaagtgataaattgattcctaagaaagagtttcagggcctgatgtctgttctcactgcaatctgagagttgaacatgatatcttcgaatttcatagagccataagctaggaattccacgcagctgctacggatcaagaccagactacaggagtgttagcacatcgagatgaattgtctgtcttctaggcaaagagaagttgctggtgttgtttctggggcaggaggatgttacttgattgacagtgctcaggaaatgaacattttatgcctactatgtgctgggctggtgggcttcagcttcattcataactgaaaggattctggctattgagggttacatctcagtggagggacagatgtgatacaataaaggtagtggggggaatgggggagtcagggtgaatgcagatcaagggtgcaaaggtcactgacaagacaagatttgaaccaacacttgtaggatctttgggagacagggagcccttcctgaaggcagtgctatgatggggcctgggttggggggggggtgtatttgaggcagaggagggaggccaggccaggagcaaagtgagaggaggaggtcagagtgcaggctgttggccaggactgtgtggagcctcagtcccaggaagcactgtgcctgtgtcctaagccacaaggggacctgtgggagggaatgagcagggtagtgacatggtgacatggtttagctcccatcctttaaggacacaaccggctgctgggttgaagtggatgacggatagaagcaagcctggtgagaagactgtgcagatgggctaaagaaagatggcagctccgcctgggatgacatcagccaggacggtgagatggactggaagacactgagagtggagtctgtggcatttcccctgtgctttagtagccgttaaaggtggcttcctgtgactgtagggatcgagnnnnnnnnnnnnnnnnnnnnnnnnnnnnnnnnnnnnnnnnnnnnnnnnnnnnnnnnnnnnnnnnnnnnnnnnnnnnnnnnnnnnnnnnnnnnnnnnnnnnnnnnnnnnnnnnnnnnnnnnnnnnnnnnnaggaggaaggaggagaggaggaaggagaaggggaggaaggggggagcaccgcgttgctgtgtgccgccctctgtccctgtgtaatttattatttccttcctacactttgctttgtttctcgccctctgagtgcaggtgggacttattttaagggtaaaatctgcactgttctttctgagcaagaatgggtttgaaaggctccgaagttcacagagactgccaacagtgtaaaaggctagagcagggcagggcaccaagggcagagtgcccctcccccacactcccgaggttgctgcagggttccagctacactatatgctttacatgtacggagaagaggtacggtcaaagggcgctgggagtctaacctgagaccctttaaagagccacatcttaaagaggcaggtgtgaaatgccagtttgggttgcatgtcttagaaactctactagcttcacagcccaaagaactcatcttaaagatggaaatgaccagtctgctggtaacttatgattactgatccccaaaacatggtgcagctcggggacaggatttttgctcttatttaattataattcatttaaattgcattctggtgtgaatcatggtacatgtgcgtgtgcacttgcacgcatgcacacctgggtcaaggaaaatttgtagatgtctattgtcccctaaaacatggttccaggtactgaactcgggttatcaagcctggcagcaaatgcccttagatgctgatccatcgtgccaggcccttagctcttgtggtggactgtacaggcattgaagcgtggttgttcgagaaggcaagatggacactggatagacagctcccagtctctgccacagcagaacgtggaggcatcaagggtgtcagtcacatcaatcaagcctcgggacaaggtggagagaaacaagcatgcccaggaattccgccgtccccctctgcactgggctgacggggcgtgagttttcagcatgcagtgagcgtggttctctggggcccttcactcacaggtgcctccgcttgaatccatacggggcctcaggtgcaatgggagatgcaacggtttcagctgcctacaatcccagggagacaggcagactaaaggagtgggatcttgatttgcagactggtctgactcaaggagcaaagcaaatcaacagagagggagcgttctaaggattaaggtatgagatccatcatggaattgcctgtaatatagagagagcccccttcccactgctcacactcagggtgggtaggaatgtgttctgtttcagcatgtgcgaagcacgtggactgcaggctactcctgctcgggatggcgggcgctggccgggcttggtgtcctgccaaccacgtggtctgtgcaagtcgcttcatcctcattgagacataagcatcctatgcccagaaaggaagactcgccacagttctgagttcctagaaggtccgcagcccttcgagtcaccccacccatcccccactctacctgctttcttatttggaatggatggagacctattccattgctactcagagcttttttcttctttcttcctttctttctttccttcttttctttatgattggaagcagatgtcgagaaacaaaagagaagtgtaggaaggaaataatgaattacgtggggacagggggcagtgcgcagcaactcgatgatcccacactctacctggaatagagacctggaatggcacctcactgaatttacaagggcccttcaaatggtaatgtgtccatgaagtacctgggggccttgttgcaggcagattccagcacaagggagccgatgtgagctgcaaactcctaccctggaccgtcagaagaaataggtgcccagagttaggagtgatagaaaaaagtgactgctggtggttgactccagtgtcacaaatgaggcttaggaggcacagatgctgctcccatcatcctggtagtgagggagcacctgacaggtcactggtgtcatgagagaagtactcatgtatggagctgatgtgggatctctttgcagcaggtataagagcctacaagttaggggagcgctccccacaggtggaagtgctccctcacagtgggagtgctctctacaggtgggagtgttcccccacaggtaggaatggtccccacaggtaagagtgctcccccacaggtgggaatgctccttacaggcaggagtgctccccacaggtaggagtactccccccacaggtgatgttaacgtttttcagtcacaggagccctcctcacaggtagcatgaggcccccccagtctgtgagagttcctcacccacagagattggagtccctcacctgggtagtggcactgagcatatttctagtcagcaagtagacagcatcttgctggaatgtgtcaaccgagggggggtgcacttacaggagggatgtgtgtgctgtgtgtggactatgatttctttgaaatcagttcttcttgcccgaaggacaagtattgtcagtagacagtgtacagacatgattctgagcagttctgtttaatgtgagtagagaatttggaggacagctgttggaaatgcctttgtccttcccagggtctgggacacactgtgacacagtctcaggacatggaatgctgtggtgggttttccttctctttacctcagctctgcctcagggtccgcgtgtgctctcctcctgcccgaggagcagaaagctgtccttttctctttaggtgacaggtttggaatgatttgttttgagggtgggggctttctggttgtggggtacctgtgctagatgacagaaggcttatcatagagagcccccatgcagaataaacctatatcttccaaggaactttctctagagcggtggttctcagccttcctaaagctgcgaccctttaacacagttccccatgctatggtgacccccaatcataaaattattttcgtcgctgcttcttaactgtaattttctactgttatgagttctaatgtaaatatttgtggagacagaggcttgccaaagggatcatgacccacaagttgaaaactgcggctgtggttgacttcagggctttggggatcctctctaaacacaggaattgtcccatgtcccaagggttggaacaaattttggagcattttaggatgtccgcccacttatacccaggggggttgtgagaacaggtgacaggagaagttgctttctctttaaatctactaagttctgcgtgtttaaactaggcgggcgagccgcctcagcaggtaaaggcatctgatgccaaacctgacagccagggttggattcgcggaacccacatggtaaaaagagaacggagtcctgctggctgcccctgacttgcacacaaagactgtggtgtgcacgcacacacatatacacacacacacacatacacacaatcactactaagagtaaaataataagtcttagccctatgctaaatgttctatacacttcttttgactttttaatgagcccagttacatacataacactgcatgtgtccaaattagattcagaaatctgagattgacagctaaacacactcaacatcttccagctggcgagcaatgaggtcttgggtttgaattccatctggctcctaaccagctctgtggccttggacagatagtgtggcctgatggtcatgcacacattgtggtcctccctttgccggatggccatgcatgcagtgtggtcctccctgatggtcatagtgctctccctgaaaataatttggtgagaagacaatattaacacggccattttggggttcagagctgatggaaatgcttcccggataataccactcactggttataaatgtgttattgggaaagcacagtgagcagctgtctgcctctcggagccggtgggggtgaagtgtggtggtgtgtaagccagcagggcaagcatgggaacagcgagtgtctgggaatcccctcagtggcagcttcaggcaggtgcgctccctgcctctcctcagcctttgtcagtctggactttgttcagtaacaaagacccaggtggcattgtgtggttgcctggttgcctgctctctgtggcatctgcctcctctactttaccctgcctgggaaacaaggggggtgactccaggtgttttaggaaagggttcaaagctttgtcaccttaaagagaaaccaagtcattacctgaggggaaggcttgttgcttggcgtggtactggcagctgagacccttgatttaagtgaagggaggtgctaaggatggagtaagcagtttgttccactatggaatctgagagtggcattgtataatatagttgtgtatgtcctgtgtacatgtgtgtgtatacatacgtaattatagctttaccggtagtctacgtaaaagttaaatagtcacctttggcctgacaaaggtcactccataggtgacttaaataacatttgcttgctcacagtttggggatcagaagttctagcacacacacacacacacacacacacacacacacacacaggcttggtttcttctgacgtctctcttcttgacttgctgtgaccactgtcttgagcattgcttttcctctatttagacacacctgccatccctgcacatgtccaaattctgcttcataataggacagcagtcacgttgttttagggaccaccctaatggcctcgcttctcatgaccctttaaaagcctcatgtgcaaatacaggcatgttcttaggtagagcacagttcatcacacaacagcattctgctgtttgcttcacgagatgcaaaacatttcagcctatagtataaaaactatgacagatgtttccattttgtccttggtctttgatatatggcgaatattttagccacattttatatgctcactaggtacaagtgcatggtgagacatgtgacacattggacggtgcaagtctagagccatatctgggatatagaatagttatgaacaggcctgagtggactcacacacacacaaggatctctagagtcaaccattagaccctccccggaggactgaggctacactgatcttagaaagctggtcttcgcccctgggcaagttgggaaggatggttctggaactggggattttggagcctgaattccatgagcaaggtcacgagggtctgaaaaccttttagcgtcacagcgactgccatctactccttgaagagacccacacccttgagtcattgtggcatcttacccagcgggtgcgtcaaggcagtgcattctgccttggcttttggatgacatcacaggaacccccacgtgagcacatagagaaatctcttatgtttgactccctctcagactccagggcaagccttgtaggggtttctccgagagctctttttaactcactcgagggttggagggagccaggggagaacggaagacctgagcgtattgctgagcgagcacttcctgtgttgaagtcagggcagaaacatttcctgtgtgctgcagacaatgttcctcacctggctgcaatgcctgggaactgcagcacctgcattccctcagcccctctgcctgcagctgcttggcattcctcctagtctcagagcagaaccacaaacagggtgctgggacccatggcagacatctctcagcttgggccatctggctatagagggacattactgttcagtactggactacatccacaacccaggggcccttccttcagctatgtggccacaccctcctctcctagccgtgcccctgagcagccacagatggtctgtcctctcaccacccctacttcctgtttccccaacctcagtatcctgagtgtctctgggtcactagttattccattactgaattcatctgtacctgctatttataattcgtttcttcctttgttcttgcctcccgatgagaaaataaaggagaagggtttcatataaactgattttgttctttgtcaccagtggttgggaagatgctcatgacaggaacatgctatgccacttccctttctccctgcttaccagtcccctagccttgatgggatataatcctgtcgctcagaacagctagttctgagtcttctgatgttttggcagctacatgttggtatggatgaaacagtgatctttgttcgtgaggcctccactttccccgggctcgataccctctttaactgtcaacttgacattgcctagagtcatcagaaaggagatcctccattaaggaattgtctagaatagatgggcttgtcagcgtgtctgcaggtgattgtcttgattgttaattgatgggcccggcccactgtgggcagaaccattccctaggctgttctaagaaaactagctaagtatgaggctgcttattctggagccagcaagaagttttcccccacggtttctgttctgcttccttggctgtgagcgagctccctagtctgagagaatgttgtgtgcaagggcaagcaggcctgccttcaagtccctgcttgagttcctgtcctgtcttctgtcagtgatgggctgtgacctgcaagctgaaacaaacctctcgcccttctaactcacttttagtcgtggtatttgtcacagcgacagaaactaaaacaactttccatcagtcttgttagagacaggttgggatggactaaatgtatcctcacctgattgatggatgagcccaaaattccaaaaacttggattataaccaaagtagtactggaaagaagtatagagggattcaacaagacttgcagtaattttatcaacaggaaagctgtaaagagcaccaggaaggctttaagatggttggcactcgccacaatcacatttgtctctgtttccccagcaccaagctcagtaattgacattgactaactgcccaataaatgttcactgaatgttcaaagatgttggacagtgtccaagacgagcatatgcttaagatattcttctaaaagttgtacagccctagctattacattaggtcagtgatctattttgagttaatttttgtgtgttgtccaagaaattcttgaacagctgtggttcggcatcatgagcagacatcagcctgtgggattatgcagcctaagggtcacctttgaacacttgatcacccaagtgcacctacattttaaggctggcactaaagggggcagctggaaacttaccctgtctcctaaatttgggactgtaagaatgaagtctcagactgaagccatgtatttaatttaagtgaccctttatagggggttgtggtactgggtttataccaggcttcagtctgagactactgcaggtcctccaaattctgtgtgtgccagctcctaaccacttagtctctggtgttaaatgttcaagtcccttctctttctattattctcttacttcagggtcatctttgggtgcctgactgtcatttctagtggacagactcattgtaacttatgttccagctaccaatgtcccctcagataccagcttattgtcccctaaatataccatgcagatctgaagctctcagtggaatcttggacaggcttcggacaccattgctgccagcacctgatgtttttgtcatcctgagaagcagcaagagtttaccagacactcttgtttacagacaatattcctttataagactcaacttctggctttaattacttggtaacaccaagggctggtatcttgtacaccagcattttagaaatagacgataagatgagtttcttacttttcttgttgctacggcataatgcctgacaaaaatcaatttgaggaggtcttattttgcccaatcattggatgggaggcaatctatcacgtaggggaggctggcaacaagtgactttgcagcagcaggagtatgaggcagagacagctcaccttaggtcatgactgagcaggaagcagagaaaggacaggaagtaagactgggcaataaagcatcaagatccaccctccatgacccacattctccagtgaggttcaacttcctaaaggtttcacagccttctgggttaatgccacagctggggaccaagtattcacacactccaaccagtgggggtggggtggtattgcacattcaccctgtcacaggtggtatagagtaagacaaaataaaattttatgctcagatacattttagaataaagtacatttaaaataccccatccgactaaggacaggctcctggattgcaacgcttcaggaccacaaaacactggaggagactagatgcttacattagttgaccttgcagcgtttttgtatctctgaagctgaggcagagcggttggttttctcgcagtaacttggctttgtgccttcagaggtcttttctctctatttatatggaaacttttttagcctcaaacttgagtgctagaaggacttatttcatatccatagatgttgcttaaagatagcatgatctctgcagtccccaccacttacagcttccatcaatcttctgatgagctaattgctgtactatatttttagtgggcttatgtactgtagaaaactctttgaaagcccacacttcatgttaaatttagctagaccctttgcagccttgagtgattgttcatcttgatggaagaaaataggatcctttctcctccacccaccgttgtcattcaattattacagatttatgcaggagaaagcaactcttgtgtgaatgggcatcttttaaagaatcatgacacatcactgagacagatatacttggcccccaattcaacgggtacctgtggagtgcttgtgcccataggttctgtggctgggctggagtccggaggctcatccggtcgtacagtcacacccagactaatagatgagggaatgaatgacagacactcaagaggaccaacagacatcctgaaagactggctctcacaaagagaacagaaatgctagttaaaattcaagatgtgcatgcgctttaagtgtttaaacaaagcaggcctggtcttggactcctaaagacttgtgagaggaattgctgtctggaaggctaaggctgtccagcagagagtgaaggcagagctggggtgtgaatgggacccctgtaccccacagactgagactaaagcacacttatttcctccttgaagagccagtttccatgagatggagccaacccagggttatgatatggatggatagatgtggtttaaccagaatgcccccagaaggtccctggcatatggctgacactccctccctctgtttccattagactccctttcctaggttcccatggagcctggagtgttacctagactgtagttaagagcttatccaagtaggaccctgcctcctgtgataaacagccccaggctgagtgggccacagaaggctggcatatatatgccaagtatattctcaagacatttgtatagtgagaagtgagaagatcgtgggtgccacataggcagaaggacagtcaccattgatattatgtggctaatgacatgatgctatgctgtgtaactacatgcatgtgtttcctacactgcaacaaccatacagtcacctggggcttttaaatgggttgatcataagcgggtatggagttttagaagagacaatgaagatactcaggagaggatggtagagatacgggtctaacagagatgatggtatagccatgtagatgtaagtgccagggaattttacacttagagatgcttaaagttagaagtgtgtctatttaaatcttctctccagctgaccggcaggtcccctatgcctggagtcttggattctgtaggtttacagcaggaactaacaagccagtatctaggaagtcccagtttattatctttctggtactttttaaaggtttatttatatttatttcaggcgtgtgggtgtgtgttttcttgcatgtttacgtgcatgtgtgtatgtgtcgcatgtgcttgatgtacccttggaggacagaagagggtattggatgcctggacctggagctacagttgcgagttgtcgtgtgggcgctgggaactgagaaaagcacctctgaatctcggccatctctccagccccaggactgtacggcttaagaagacttttagttttcagcaaatgttgattacagagaggaaacccctaacctggacatatgaacatcgtttcctgtgtgtattgcctgtggcttgtgacatccagcttctccaccagagctgactgactgaggtagtaaatgtctcctcatttgagagcttcaaatgtgagtcataggagtcccattcctcgatctgagagaagacttgggctagatgcttcctgagtgtctcctaccttaagaaccacaacagagtttgcatctaacattgactcagtgatgccccattgagtcgcccaaatgagtatctttctaggctctaacctaaaaggccacaaaatcctggcccacagaagaggggttgcagtgtttgctggattggcagagttgggtatagagttgaggatgggaaaaaaatttcatgacaagtcctttggcatggcttttgtgtgttgagccttggagatactagaagaccttggtatgatggatcgtaggcctccgaggaatagctatggctgcgtatgaagctgggttagattaagcgtctgatttatagtgctgtagttgaaactgccttgaggatgcatatcactgaatcatgccagtgagaaaatttaaaccatcttaatgtcacacgactgtgggaagccagctcccctgacataggttggtcagcggatttgccatgccctgaaacagctgcctacatctctaataacccagcatttctgccctgggtgtggccacccctagccttggatgacctcttgggtatagcaaagacccaaatggatgaacctcttaggttcttggcagcttttgtggggcagatttggagtcctgtaggctattctggttgttgctattcttacatattaagtgcccaggagattgaccaatcagatctggctgggcagcaaacttgggggtattaatgggggaaagattcagctgtgaaatgggcactggggtttgaaggccaggctgcattttgagtttcttgttaatcaaggcaaggtttggagtgtctggatatgtatagatgaggattgtgtcgacttgacacatgcctcctttccccattatttctttgtggcatgacctgtcatacttcattagggtatgtcattatggatgcagcaaaggattatgggagactcctgggagaaaaaaaaatctacctctgaggttgacctgtgcgaggcccagtgggctcatgtgcactttcccacaaatgttgacatctgagagcttccttcagtttccacagatataagtgttcttatttcaatcttaatcatagaaaaggagtgatgttgtcacagggtaacttcatagagcagagagataaaggaaatattttttaaaattggctctggaattgtaccagatgagagagcgcaagttatgacaccctcctgacgggaggtgactagaaatagaaaatcctaactcattgattgattcagaaaagggcttaaatgaggctgtttgcattgcttcctgggaacataccaagatgtggcagacctgatattgtctagttgcttaagaaacagattcactgggacacaagcctacaacctactttttctacaaataaactatcttagacttcaagttgaccataaaagaaaaataaactcaaggtctaggccatggtgtctgaggtgaccgattaaagatattcagtatagccacttgttaaaggcagaaggggtgggatttataactgttctggatgctatagctgctgctggctggccacagttctactccaggaatggagagtaactaaagaccacatctcatcagcaagttattaaatgcctacgacagtacaaagtctgacttgtttgtataacactacatccatgttaggctagggataagaaacaacaacacaaatggacaattgtacaaggaggctgaacctgaactacaaacccatagagccctgattgggaagtgactcaaatgtccagaaacactgcctagatatcagctgcaaatacaggagcaagagttctcttgtagtcccatgattcaaatcagcagctctcatgtaagaccagtgattctcaaatttttatcagaatcaaacacatacaacagaaattgctagagcagcaggtgtctgggccccaactgactttttttttttttaaatccagtaggtcagcaatgaatttgtagtgatttgaataagaattctcctcataggcctgggtatttgagtacttggtacccagtgggtggtccctagtctgtttgagctggtttggtggtacaggaagtatgtcactggcgttgggctttgagactagagccatttccggaggcttatgtcactgggctttggggttagtcccacttctagttctactctctgcttcatggtcatggttgagcactctcagcttcctgttccagccatcacacctcctgctatgatggactcatagccctctggaactataagcccnnnnnnnnnnnnnnnnnnnnttgccttggtgtgttttatgacaacagaaaaagtaacatagtatttcaaactgtctttgagagatcctgttgctaaaccacactctatactgtgaacaagtctggactccagccaaggggatctcacccttcttgtataggtgtcaagaagccaaggagactcctggggatgggagaagactgggtttatagatgggagaagttcctgctgcattcagattctcttggtttccttttcacttactgggataaaacactctgacaaaaaaccaatgtactcagcttacaattccagatacagtccatcatggggtgtgggtgggggtgggggtgggggacatcaacaataggagctcaggggaccattcatactgcattcataattaggagcacagaagaaagactgtgcctgctagtacttttctctcatacagtctaggatcccttcctagggattggtgccacccatagtgagatagtcttcacacctcaacctaatcaaaaaaaaaaaaaaatcccccacagacatgcttggaggcagttctaattttattaaactgacagttgacactaaaaatcacactctccacctgaagacccatcatgcttcattttatcctaccctcctgcttgctgttcgatctcagaaatctaggaggaagcttataactgcatttttgtttaaatggggtggggaataggactggattgactgtcacatgctgctgagagccactggttttctttcaattattttggtggcctgttggagtctcccttgaaattttaccaggatattactaagaatgatttctgagttcccgatgattaaatggaaagtgaggtgaagtcaagttcacattttaccctcatgaatattgccagagaaacaggatggtaggcagctaagagtgtggctcagatgaattcatggatttgagactccagcttcagtgctccaccattgccttaagccagtgatgtgaccccacctaagccatctgctaagttgaacccgggtgaatattgtcttagctagggttttactgctgtgaacagataccatgaccaaggcaactctaaaagacaacatttaatgggggctggcttacagcttcagaggttcagtccattatcatcaaggtgggaacatggcggcatctgagcaggcatggtgtaggagaagctgagtgttctacatcttcatctgaaggctgctagcaaaatactgtcctccagggagctaggacaagggtattaaagcccacaaggccacacctactccaacaagcccacatctcccaacagtgccactccctgggcctagcatatataaaccatcacaaatacaattgctataatcactcacatatctgacaatggcagggaccttggatgagatatcagtgtggaccctctacagggactgctctggggactcttggaagcatgacagcaagtgtctcacagaacaggaaggaagtgtgttatggtgcctgtatgacctactctcaaagtcacaaaacatcaccttagtacttgaaggatcctcaaatggcccacctaaccttaggacaaatgcaaacaggtatcaccagtcagggaagtaacgtcaaagccaagttataagaaaggcagatgaagggagaaagtacctatctatatgagctttgtacatggtatagatatggggagccagtgttggggatcctgagacagggaggccaagccagtttggatgcagttggggtgggggctggtggcaacgtgtccattacccactgatagttgctctgccaagccctgagccaggcccttcccagagatggttcaggactcagcagtgccttttcctcctgctgagaattggaccttattgtttctatttagcacaaatcttatgaagtcacacacaccctctaaaaagtcaagacttcttttcagcgtcctgcctttcttatgtttaagtcagatggcaagaaaaagaaatgagcgcaccagaggagacgggctgtaaaggtttgcttcgcgttgttgatgtcaagtttatttttggttctgttactctccgtagagcgagtctttctcctaagacggtggtgctgtttcctgctcccttgccactcccctaccagtgtaagctcacttttatttttaaatcctctccatgctctaagaatgtctaactttaaataatggttggagatgctccaggttaagaagagattaaaatccctctgccctttgacctcggaggtaggatcaagtgtgctgtaacatattattagtcccaagagtcaccttgtcagtttttccctattattctttcctgttattctgtactcatgaaagtcttgcagccaaagattgttccattaagatccaatctgaaattaaaatgtttgaggttttatccagtaatctgtgaagctgctgggttcccacagggacaggctccccattccctaaacttcctgggttgtcacctctgagccccatagttgatttcttgaacctttagtaagttcagttctctgagttccctgctgttcccacctgtgtggggagtgtaactgcagacccccagagctcaaggtcacaggctctgcagctgagctcttgtggatgagaggtgagaacctctcagtcctcctgggtggtacagactgacagtcacattgggagagggggtccacattggcaaggagcctcatggggtccgagcctaggcttccagaggtggacaacatcctcagaactttctagaagaccttgctctggaattaccttcaagcatccttttgatctgtgtatagagacatttttggaggtagctttcctgaacagaccctgagtcaaggctaatagggagtggagaacaactatatacagacagattttgaagtctggccattaaagagaagactgttgatggtaagaagacatagcccgtcgtagactgcttatcactccccggtcctggcgtgccgtgctccttgggtgtgccttccatgtttgttgtaatggattctgacttttctttactttttatgtctatgtgtgcccgagtgtgattgtgtgtgctgtgtgagtgcagatgcctatgaaagctaggagagagcatgggataccctaaaactagttacaaggagttgtgagccacggtttgtgggtgctggaaactgaactcaagtcctgtgcaagagcagtaagcatccttatgcctgggccatgtctccaggctcctttctcttcttctcccatctatggtcagtaagggtaggtgggatcttttgaaacaatgatgataatgatgatgatgagtgtttaatgaatgtttgtagctgggcactttctcacccaagctgtttctcttcctctttatcctgtgaagttttaaccaccaggaaacaggcccagagcagtaactttgcccaagatttgactagcagagagaagtgagtgtcaggacccaagtccacgttaaccttaactcaggaaattgtggtctacaatcatgtccccctggcacactgtgtgtgtgtgtatgtgtgtgtgtgtgtgtgtgtgtgtgtgtgtgtgtgtgtgtgttgagagggggaagatggtggcagaagcgtgggccgttggataacctcacgcctatgcattgcttacctaaagccaggcagttttcaaagtgtgctgagcgcggtgggaccacgcactaaagcccccgaggacttacttttatgatgatagttcatttcataattgagttttgagggggctaattttagacacacacacacccctctctcatgaagcaaagcctggggcttaagtacaaagcctcttaggacctgcattccttagaagtgacggaaaagtcagacataccctagcgcagttcaccgtccaaccccaggtcctgcagagcatcaggtagctgcagttgtgccgctgcggcatgcctgtcctggtggtgctcggtagtctccagcaacacaagctccatgtttgtccccaaactgcttttccttggggaagacacaggtggtcttggcacttgccatggtatgtcctgaactcttggtagacagctaagcagacagggctggaggccgatggggaagggaaggccttggcttggccatcgcacatttaatggcccatttcatgcagatgctctgtaaattagtttcttcacactcatgagttaaagccaggcttgttacaaagcaacacctaaatattagttcttcgttttctcatgagactttgtatttacgccactgtgaggcaggccaggtggctttctacctggcgtcattttccaccctcagaagtcctgttgggaaggagcaagcaggagttgagttaggaggaaagctatgcgcaatgttcaggactaggactctgtgaaagccaactatggaagctccagccaccagaagtgatataatgtatacagtcacagggatacaacctgatacccagtgctggcaggtgcttgtggtcagccccatacagggtgacacctgtaccctgtctcagggggcagtgcaggagctaagctctgtctctctgacgtgttatggtccagcagctagtaaaaaagcgcataggtataaggcaacttatcccctggggtatctctgtgacactgccccccccatgggtgaggggagcaccccaccaccgtgacactgccccatgggtgagggggacatttcaccactgtgacactgccccatgggtgagggaggcatccctgagctgctcattacatgtgactgaatgcctaacactacggctttgctttaagggagtttggctggacatggagtgactgctattataaaacctacatgatgcttttggcctcagttaaccaagagatgctgttccggaccctgtggtaacagctctaagagcagtaggcctcttgagctcttcagaggcgaagggtgcacttagattccctggagactcatcagaagtgaccacacgaagctccaggcctagtcagtgacttctctagtctttgatcaacagtgtttgaccatgaagtgaccccacaggctcatgcattagatacatggtctccggctggtgctttgaggggcatgtggaatgtttaggacactggctcagccagtagaagtgggtcactggttcctgacctacatagaagaaaacgagtggaaccgtgcgttcccagcatcgtagctaccatgccttatccaaccactgggactgatccccgacccccagagaaccatgagtcacaatacctgcccccacttaagttgcttctgccaggtaggccagaaaaactagtgacaggcacaagtccagtctcagtagtagctttcccagaataatcttagttcattctgtttttaattaagttgtggctcaagaggaacaattaacaaagactcctattgtctctctgtgaagctcagtgaggttttttgtatggaccatgcaaagtctgagcaggcttttagagatagtcttatttagccagttatcttcccttatagcataaattgcgttctcagcgatgctcatgttggtcattattcccaaagggcttcactattatggaatgccatcatctttacattgtactagggccgtgagggatctgagactctttccctctgggccatggcttactctataaaaataatatacttttaaataattctggatatttgatctcaaggccaaatatggtttctaatgagaaaaaaaaaggtattttgtaagcttgggatttttagttctaggaagaattgggggtgtgtgtgtttgggggtggggttgcatagtacagagatgaaggagcattctgttggtggaggcacactgactcctgtttctccttcagctttcaaaaaaccgagtttcctgtgtgggtggtgggggtgagcttgatttcgggatgtttgaatgtactgcttagtgttgctaaattttcacagcttcataggaaacttgagtgagctcatttcataaggaatggcatatgtcacgggccaaagtagggaaaggccagggaagccgtcatctttaaagggacctgcctcttcagagagaggctgcgtttgggtgggaaagtcaggattggtgtattttggggtgaatttttaaagttaggtggcagcagtcctgggtcgtgtttcttcctgatcctcatctttggggccccacagcatgactgccacacagtggtccttccacgtcagccttgggcacatcatgtgagagagaccaattcccttgggttcctggcctacagcgtgtgtgtgtgtgtgtgtgtgtgtgtgtgtagggcctgcttagcatcatgcaagaatcagtcttcctaccttttgtattgtttttatttttttattctgattttgagacagagcctcactatgtagctctggcttttctagaacactatgtggaccaggctggctttgaactcacggagagccacctgcctctgccttcccagggaaatgagggggagaaaggtaaaggagatacatttgctgttactgctaaagtcagcctgagggatgagaaagggggctgcagacggaagcgtgaggggaaagcgcggctgaaaagagtggaggcagagcttgattgctgtccactatcactgactctcccagccttcctttccgagagcctgtccttggcttgcctctgaatgagggacaccattcaagcgaggatgaattaaccatgtgtagtaaaagtcaaaataagagctgtcctcacatggaggttgttcagggctccggctgtagggtgacttcacaatgacaagaggatggaggaaccttcttcccatgcagctccagctactggcctcaactcatgtgctattgactactacttccagggaggctaactagtacttccaggaaggctaactagtacttctaggaaggctaactaggaagtactgcctttgactgcaggcaaatttcagatgatatagtcaagttcgactacaaggagaacagcggagaactgatgcttgctaggcaaatagcccaccgcagcatgcctcatgcgaaacacagcagaaacacagcacgtgtgaacagttaccgtctgctgactgctttagccattatgcaatatctaagcttactatcagaccctgggttgcttggaagcccctctccccaccccaccnnnnnnnnnnnnnnnnnnnnnnnnnnnnnnnnnnnnnnnnnnnnnnnnnnnnnnnnnnnnnnnnnnnnnnnnnnnnnnnnnnnnnnnnnnnnnnnnnnnnnnnnnnnnnnnnnnnnnnnnnnnnnnnnnnnnnnnnnnnnnnnnnnnnnnnnnnnnnnnnnnnnnnnnnnnnnnnnnnnnnnnnnnnnnnnnnnnnnnnnnnnnnnnnnnnnnnnnnnnnnnnnnnnnnnnnnnnnnnnnnnnnnnnnnnnnnnnnnnnnnnnnnnnnnnnnnnnnnnnnnnnnnnnnnnnnnnnnnnnnnnnnnnnnnnnnnnnnnnnnnnnnnnnnnnnnnnnnnnnnnnnnnnnnnnnnnnnnnncagggccacatgcccaggggtagcacaaactacacaactgtcaatcaagaaaagaaaccacaggcttgcccacaggtcaatctggtgtgtgtgtgggggggaggggcattttctcaattgaggttttctagcttgtgtcaagaaccaaactcaagtcctctgtgagagcagctagcgctcttgaccactgagccatctctccagtgttaaaggtagttctgtggcagattctcttcttcctgttcataattcagaccctggaatcaataaagtcaaggggtccctcctcccaggaggaagaaaccctctgtatgtgttttgtgcaagtgttcctcaaataatgactacagcaatgacaagtgccattcgtacttatgaagtcattgtccctgagtcaaaagtaagataaagtctttggcaaatctgcagagaatattttcaaagagaaagaggccagaatttacagagtccaaaaatagccactcaagtgcagctgtgtttagcttgtcggagaacctgttgagtcgagacaggcaggggttttatttctctggctgtgaggtcatcaggcttgtttaagagggaatagcaaacatttccaaatagggactggttttgaacgggaggaagatggctgaacatactcagaatcccgagttgctgctcccgcccttccctaccactttggaaacccactttggggagtggaagactcagtagccagatacctgctgggtggggtgcagatgttcctgtgacagggctcccctctggtacctgtgacctccctgaggattgctgctcaagttacttgacctcagtcggttctgtactaacgttttaagatggtaaataaatgtgcagttgaaggaaaacgttgtgacttccctaatgtgaggggatgattcttggatcttgttttgccctgtatctcatcagggataatgtcgtctttctgttatgtaactgacaagaagagcaacccctgatgcctctatttagatggcccagacctgtgatagcttgactcacaaattttcacctttccatgtccagagcctttcctgagctcatgacataagatgcaatagtctcttctgctgccggacagccacagggagccatagcacagacactcaactgtgttaccacagcaggaaacaaccagggctctgaaggggttctgtgtcccgaggttaggatgttcaatgggttagatgtattgagtgccttttcaacttaagacatttttggtgtaatggggttatgagtatagatagacttatggtaaaccaccaaacctatgtgcttgcaagtgccgcaatgtcatccacagtgaagatcaagagaaatgcacacatacatgctcagtgttcaactctccctgctcttatgaaattcagggccccaagccagggaatggtaacccatactttctttggggagagtcttctacagacatgtccacaggccatccaacccaggcctcgtcccaggggaatcctagctcgtgtaagttcataatcagaactaacatcacaactgctctacggaaacctgtggtgaaatgagttccatttaatggcgtcaaggctagaggttggcagtgtcacttttatccccagagtctcactgttgtttagctggccttgcctaagtgttagcctgtgtgtctgccagtacatcaaagctgttttgttcttgaaccttgatttctgtattcttctcttggtgtgcttagatgagattccttcctccaatgggacccttgtctgcccaaggtgagtcacagtgagaggcagccacagtactttgagggtagacaagaagacctctgcaaagcacctcactgtacaaggcaattcctgtgtaagcgtgtctgtagtcattgccaatgtcatcacggcagtcagtatgtctctgggagggttctgtggaggattttgttcatgggctaacgcggcgtaactgttgccttactggctatcatacctaacttgtgatataagtcctatatccatctttgtactagcccctgggcagctcagagcaatttttgtggttcatatctggtagaagagacattgattgggctggttggttcttgtttctctgctttttatgacagcttacttcataatgggagctcttcttccacgtgtgtgtgatgtgcagtgtggctattggatggtaccctcccttgcctcctcagacctggtatagtggtacccctccccccagctgttactcccaccctagaatggccttgccatctctctttataaacctgtttcctctctgggaaattgtccctttagtgagcccatctcagtctttctataccagagacacttggcactggccagacgatcagatcttgatttccctctcctctggtctctgtgccataaatactcatatcatataacctggacacctcgtgagatgtcagacaagggcccctcactcttaccacagagcttatcaagatgtgatccctcccaagaatccagaggacacagttgtcgccatgaactcagacagaaacagtttactctacttcctggaaacctttgtatgcaatcagggaggtggcctttcaagttaagcacttttctttattaattataggaagcttgttttccagatgtgatttctgtcatgtcacattccaacgagagaacatggtgtggggaggggataaagaggtcttaaaatataagaaatgctggataaaaccttctagtaacaataaccttattaaacttgaggttgtagttaactacagtgagtggctcaatggagccatacatttctgggttttttgtttgtttgtttgttttttgattttgttaagaaggatgttaaggactctcaaaatttaatttcctggatgagtttgaaccattggaggatttccccacacttccatcatgaagataatattttgtttaaaaagtcacattcgtcaagcccgtggttggcgtcggctaacctgtaccctgagtattcatgtttctcctgtgtgggaatgcactgagcctggctaaagtttctaacacactttggactgttgcctaaggagaaccccggggagaataagggtgatgccagtcagaagggtcctacagcaagctccagtttgctgaggtgtatgtgccttgcctcctgttactacagctcccctctccgacacttgtgcttgcccagggtgcctgtctcgatgttgttgtactagaactgcatgtcaagaatagtgccagcaggttgttgtgaaatgctttgattcctgacatatatgtgatatatgcgtttgcatgcacacatatccatagctaagcatgaaccccgcaagttaactgctcaccctttgtgagctgctgcgagactttttgataggattccttcagtcattcaactcacccaatgcctagatcacgaaagaggagtttgtagaacgctctgaggagggggttatatctcttttcctgacagttctagggaacccagacaaggagaatgctacctgcatctctctggataatagcaccgtgttgttccctaaaacaagcctggttcctccctccaagtcagaaagtctccctttaagaatgtgtttcctctctgtagccgttgtcgaaagctgtgcctaattactgatgaaaatgtctaatcattgataccagatcactaccaaatgcattctgcctaagttctgaggtctgtgtagtttgggggtgtgtggtggtttttaataagagtgattcttgtaggctcacatatctgaatgcttcctcaccatcagaattgtctgataggattagaaggattaggaggcatggcctacctggaagacttctgtcgcaggtagggggtgggttgggtgggaatggggggccttgaggttttaaagtgcttttaaagtctctctatatatatctatctgtgtgtttcctcctcctcctcttcctcctcctccttttctcttcctctctctccttccccacttatgtccatgtgccccccccgccccccccatgctccctcctgtgatgataacggactaagtctctgaacctgtaagccagtccccagttaaatgctttcctttatcaaagttgccttggtcgtggtgtctgttcacagcaacagaacattgtctaagacagtgagaagcaactcccaaagtcaacgcatttgggaattttactgaattttaatcagttgctgggcagcctgggtggctgacaaacttactgcgaatctggctgagtcctctgaggctgttgactgcaagtactctttgtgacactcgattcgcctatactctcttcccatccccaagtctgacccctccatatgcctttctccaaagtctatggcagtgtggaatgaactacggaaggctaagggcttgcaggagcaggagctgtggtgccctgtgtttatttattgacatggttccttcatccatggtgggcatcttggctggaagttgattcattactgtgtcccttagcacataagacatcatatatgggacatcctatgatatgacatcatatcagagaaaacagcctatttctccttctgcatttaaatatcagtgactaaaacccaagcctctgttaacttgcactaataattcctagactaaaaagcatctctgtgttccagagtaaccccgaggccatggcgggtctttgagactctcaggacagagagccccaggatgtgccctccagggctgagcttgtgtcccttgccatgagctcggggagcttccctagaggactgaagtacaagtcccagctccaggaaggagctccaaggctcgtgtctctgtttttctctctgaaagacaagtgcagtttatgttgggtacttgagattcactccaaggggcagctctggatgaatcaggacccgatgggcagtttctgagggctgtgtacttagtgacacacattaaagtacccatccacgtgcccatggtccatccatctttctgcttgcctgtccacattctcatccatgaatcctccaccactaactcctgcaaagcgtccagcactgttggcatgctgaagtttccatgatgaaacctggcagtgacaatgaccatttacctacggtgcgtcagtgtgactccagtcttcaaagcagccttgtggggtggagacttgtgacctgcagctcacaaagagacaatgagagaacagaggctcatgtaccttacctgaggtcacctaggaagagtggagtaagcctaggagtctctgtgacataaggaccaaatctctcttctttaggcggtatagcgtgtccattctggagtgcatcagagctggctttggtcttatttgtaagtccttcccccaacttctttggggggtttcctgctcttagccaaatagagagagggatcccttcctaagactttgctttgcctctcacaacctcacctatacttgaagttcaatgtagagacctctgtgtcttgaaccagagtataaaggaagttccactcagcaaagcctcaaggtttaaaagttacaaaccaaggtggtattaaacactctctgccctgccctcctgatgatctagaaggccaaaatcaaacttggaattctcaggctcctgagagttcagtgcacaaacaaagcacttttgggcacctggctcctggctcacccctccttcacagtgtgatctgcctccatgtcacactacagaggcctcccgagcatgggcataggtggtccaggcacgatggtcaggcttgtatatggatgttggttcaagaggcatccactggtgcctggacgctattggtgcttttcttcattttttgaggaggccatctttttatgaaccttgctttttgtctagccaggctgcatgagccagggcctgtcctcaggtcaccccagtcccctgttctcctgacttgctgagtgacgatagagaacaggaagatgggaggaagatgtttcagggctgggtggaggactagggtggagtccagctgggtgtgtgtatgagagagagagagagagagagagcagccaacaggaaggagtgctgggttctcttttgctaactggttcccagtatttcagggttcattctgaaaatgcattgttactatgtgtgcttgcagtcaagctggaccattgagctgtggccaccccggctcaattctgcttagaactatgatgtgaccagcagccaggatccattccaacagatacccaccctgttctttggcattagtctggggctggaaagctctcctgggtctgtttccaagtacagctgtcctccttacaggtctatgggtgggccctagaaggccactggtagagaggcaatgtggtatgggacagtgctggtctggaggaaccctcctgccctggccccagagtcctggcctttggggatacacagaggatgtgagcacttcaaagtgacagagttgtgattgaggacagattcattctcctctcagctcgtctttcctctcccacctctgtgcgttatgcctgtgctaaaatgaaagccattgtttatttaaaaggaccgtttgcctaatgcgcctggaatttattttctggagcgttttctatggtgatcatcagtccagaccttggctgtggctgggcgattatgtaacctgggatggaatgagttctgccggcgtgcgcagcctccagtgtacaggactcctagctgtgcctgagagggaagctggtgcacttgtggctgtatacacaacctgcttctgtgtcctgctgggtttgggagggtggggaggtgggggcctggggggattgtgggatggggaggtgggaaggtgggaaggtgggactagcccatagagagagtctgcgagcagctagtgttaagtcaggaggatgatttcttcatgggggcctgccttggatttgctgtagaactgccccccattctcctcagttattgtcactagggcttagatatccccttgtataaaccccaggcccttttacccccatctgcacgttagcaaaattcctgagtataatgatttgagccctggcaggatccagaaaatgttcctggccctttcctctctgctggcctctgtcctgtgtctccatgtgcctgtatcaacggcaatattgacctcaagagccactctttgccaggctccaaccctgaagtcccttgatttctactctggaaccttgcctgggtccaaggcgagttgctttgtcctggatgaacaatgggaggctctacgttgatcttgccttagaccctaaagggaagaataagcatagatgggtttggaactctgaccttagtcatggatggataccagtgagctccctttgtggttcctaacttagacccgcagtgttgggaaatggtacatttattgtgttttgtatctctcctctctttatgtaacgaagatgtatctcttccctattgttcctcggcttcccatgctagttaactcccactagcaacaaggcagctttggatttacccatttaacacaagagtggccgttagaacaagctgaggtgttgttgtcagtcaagccaggctcttcctcactggagatagcgtattccacatagggatttggagactccatatccttccattgccagctctcccattcccttgggggcttcaagtctttggcttcttggggacagaggaaaggcatccttctctagagacaagtcatatgccttccactcactatctgtcaaggaaaatttagtcacagctggcctcaaaagaacctggaaaatttggctgaggctgaacagccaactcattcatatagtgccgtgggactgggatcagagatgaaggacagatctccttgtgagatggcaggggagcaggattagccagaacttggtgatagagcatgtggggaacaatgaagggaaataggtagcctgaaacccctaaggtctctagttggcagatgagtggataatgctgtctctgggggatggagctgacaggaaggcaaaggatgtgaagcaggaatgttcaggctggtcactggcccaccatagtctggtgctatagaactgtgtcatgaatacaagaacccataggaaaaggtgtctaatgaccctatgtcccttgtgctaatctcagagaggggtggttcaggaagatgctgatgctgtactcacagccttagcacctgatgggatctgcccatcggtttccaagtacaaagctcaacataagaagaatcaaggggaaatagatacccagtggcccaggcggaagcagggagtctgacatcctgacctgttatctcggtggggaggatgtgttctgtccttgcactgtgacattccctttgcttgctttggactcagatttgttactctgggcatgtgatgccaagaaggactgaaagctggcatgatgcagaaatccccagaaataggagccagtaaaggccaagtctggggctgtaaccacgggccacttggccagtgagctaatgggtcagtcagtccaggttgctgttaccacccatgggttcatggttgccaatgatgccagtgaggtcacagccctggggctgcctgaggtctgggctaacagctggccaccagagcagggacttacaaacactttgtgggtaggggttaacatgggagtataaaagtcagatcgacagctttttaccattgtgcctccaaggtgggactcaaatctctgcctgtggggaacctgagcagagtaagaaaagatcagaggccttgttcctagatctgtcaaccttggccacctctctcactcagactattgaacagtgggaagcagtggggacagcagttcaaagtttgcgggggacggggggggggaagtcactgttaaagaagtgtgaagtgtgttttgccctctttgtggattttgcgtgaaaaatggaaggggctggatagctgcttatttggaaagaaggcacaggcacacaagacaaccatcaggagcctagagccatcccacggccacacacagccctggtgagttacatagctgcagtgatgcgagttggaatgactcctccccttcaagaagagccaactgcgtccttatccacacctgcttagtgcagggccggatttgtaaaacagcacctgtgaatggaatgacggcgatcaccagtccaaaccaacctgttttcagaaatatttgtattaatttgatgccccagcagcctgcatgaccccttttagcaccaaagggatagctgtgtttgctgagcatgagcagggcaatctgggactctaaggacagacagtggttgtaaagcaagaggttgtaacccctagggaatcatgtgcctcatggagtgtcctaagatgacatggaaggacattgttgctgtgtttcatatctggtagatttgcagcactgggaagagaagcgccatcatgctgaaagaaaagctaccttgaaatatagagatagccctatctccaaatatatctggggcaacccagaacagcagaggcctgagtgtgaagtaatggagaagattccagagggttcagattatgtacagggataaatgcatccacctaccggtggagccagcagccccgagtggttaataccaacgacagacagacagacagacagacagacagacagtagccctggtacaacaaaggccaggcgagcggggaggagaaaacccaatgagaaaagaccggcccagcaagatgtacagacggcaacaatctctaatggcaggtgcccagactgagtccaaacactgtggaagaaaataaccaagactgaaagcaaacagactcccgtccaaagcgcacaagtcggaaaatgccagagcagcataaacacctcgaagtgaatgcagccacttggcctcttgtttgagtaatcagaagtggcactagcaatgccgtaggagcggagtccgactcggatggctttgacctcacttggcttttcccctctcttcaaacaatgcatgagggctgcctcgccattccattcctttcttggagccgcattgcagtctaccagccctcgagaaaggacactttggggcactttcctaccagccagttctcaagggcattctctctgcccttacatggggaggtacaaatgacctggccctaagcctggactcgtagctgtgtgcacttggctgtctctgggtctgaacctgagaggcacctggaagcccctcccttattctgctgtggcagggaggttgaaggctgctttcccgtggaaatgttttcttcccccaccttctttcacagctatgatgggccagtcaacaagcactctcgggcactgaagctagaacagcattgtgctcggatcttttggcatgttggccaaggtttttgagttagagtagaagccaacaagccctttgtagttcaggctttagaagtagcacaatacttgtccttacgaactctcttggctggagcagataaggctgcgtggggaaactaagtctgactcctaatgaaaggagctgccagttgtggtgttgttgttgttattttctgccttttacccaaaattcattttgtgtcctcatttcgtagcttgaagcccatggtttctgaagttttggtaagcttccctgaggctgtaaagagagacaggtgtcacctctgtgttagtacaatatgaactcagggttgagatttggaaggcagcaaggaattcatcttttatccacactagaaattcagaaatgaaagtcagtcttggaggaaaagagagccatgttttcaaaccccagtcgtgaggctgtcaggtaaacaagagtacctcatgctctctcattgtggccttccttgagaccacctcagcacccaagcatcataaagacagccattccaaaacagtatgttgtaaaacagcaacttgaaatataccagatggtgcgaggagccagagacgcggagggagaaggcagtcggcattctttcttatccttcacctctgtgcctggacttgacgttgaaaaggcatctggaatattattcccattctaagtgcttccgaagttatagatcatcagagggtgtgctcagggcccttctctgtgtgctcttgctctgccttacggttatgctaccctctgctccctctctctgttccacacccagatcaaagctgactcttcctatgtcccaggtgtgcctcccaccttccccgtgttctttagtaggtccagggcaggaatggcctcccagagcaggtttggttgtagggaggaagagccaggatacatctgggatcctgagccagcatgcagtggtgttgaagttatgcctggttcttcctcccagctccatgcttccagaaataagactcatactcaaaatatatttacaaataccttggtcatatagctagactcttttctgactggatataacttaaaatatcccatttatttttaacctacattctgccacgtggctggctagctgtgttcaggtaccatgcgtctgtctcctcacatcttcctgcttgagtctccttttagtctctatttccctgaatcctctctcttcctgccagtctcccacctcctatttcctgcctcagctcattggccatcatcttttttattgacaggtgatgcttctaagaggctctctctatatgatgggaccatggaaggtgagggagatcaaacagggcagtgcttattccatctcaagtcttcactaagatccccttgtagcacacagtccatcttaaagtgtgttatagtatgtcctccctccaggccaatgtaggcagagctttctctagggctggagtgagggcagtactgagaacatacctaccatatgtgcaaccctactccatcctccacagagaagagaggaacacattttctcttttaaatacagcatccacttcctttgagtcccacaggtgctgatggaaacccttcagctatgcatgcacacactcccagctccatgggcagtgagaggctgggtgggatctttgtcttctcgctctcaactggctactgctgggtgcgaagagcaggcagtaactgtgaatgtcagcttagctcaagccacatgaagcagatgataaacatggttaccagccatgtggctgtggaagggagattttgtggcttactatggacccgtgatggggctctaagatcctttcccctaccacataaagtctctctgtctctctctctctctgtatgtatgtgcacatgtacatgtgtatgggtatgtgcgcatgtgtatgtgtgtgcacacctgcacactcacgtgcatgtatttatgtatatgtatgtgtatgtgcatgtgtgaggccagtgctaagtgtcttcctttatcaccgtcctccttattttctgagtcaggaactctcgatgagcctggacttcaccagtttggcaagactgatttggccagtgagccctggggatcctcctgtctcaacctccccagtgctagatttaaaggcacacaccaccacttgcagttttcaaatgcatttatttattcatttgtttacatgtctacgtggtatattcatcatatgtgttcaggagtctatggagatcagaagagtgtcacatctcctggaactggagttccagatgattctgagccaccatgtgggttctgggaactgagttggagtcctctgcagcagtagtcaatgttcttaaccactgaggccctcctcacagcattttaagaattcagtcatcacacttgcatggggaaggtacattccccaaggtccatctcccgagctccacaccagtcctcctgagggggagcagcagtcttgtgggagtccttacacttcccatgggaagaggaaagacatagactttctttctgccaagctctgtcgtccccgaggagacttccattcccccatccgtagcacctctctgaccaagccaactgtgattccggactttgctcaacccacggagctctcagagcgggaagacaggaagagtgtgatgtgagaagagacagagatgctttccagactagaaacgttcacagcctgaagagaactctgaggccaggaggaataatggcagcaagagagcactcagtgtggcagtgcggggagacagagataatgcagtaagtggagcttagttttccaccttccatcaacctctgtccgcatcagtggttccccccaagcagcagagaatgaggtagtgttgtattgtcgctagaagctgtgtacatgcagggatttttccagacagaacagactatttacaggtgtgatagcttccacagaccgtcaacccaagcaaccgccgattcatttctgctgtcagtgaggcttgattgtgtaacttatatattaaaggaattaaacattcaaaaatagccaatggaagaagggctttcataactgcaaaagttgttataatgtaacaaaaccacattaaccagtacagaagagagatctttttttcaggtcttagaaaaggctgagccattgattaaatattagtataaatgcttatctgttttgtaatataagttactactactttaagacacccacaataaaaaatgaaaggttgggctggggctgccagcatggctcagttggtagagtgcttgcctttcatgcatgaagccccagggcccatgcccagtgttgcataaatgggccctggtagtgcacacttgtaatctcagcgccagggaggcagaaggaaggagggtcagaagttcaaggtcgtctttgacctaggaggaaggctaacctggaatacgagagaaccatgagaccctgcacccccttcttccaaaacaaacaaacaaacaaacaaacaaacaagactagaaaagctttttaaaaactatattcataaactttaagtagggcagtcaccttaatacaggatgtcaagactgcaaagaatagagtgacataattgaaacccatttatgtgacaagaggtgatataagaagaataaaatgtcaagaagaaaaatggcaacagaaaatatatggtgcacagatgaagtggaagtttctggtagtacatgtgatacagactcacgtggtgttttgctgaggcaagacctgagggaggacacatgatgtttggagagagtataagtaggactgactggacagtgacagcgtgcctgcatagctagacttccaactctttaatggtatcaggtctttgctgatctttacttcattgagtgaggcatggcagaaaacttcctctggtgtcccagctggttctggtcgctcctgctgacttaagcagatttgttggaggcctggcggtttctgctggatcatgccaccactgctgactcatgtttagtaacttgacactactgaactggactgctggtatcctgacaaatggagactggaatcactccaaagaactacttccaaacaggtccacatcccctgtcctatttgccatcatttctcccctacctttgggctagaaggggtatcgaaacatttgataacccttatttaaagtaggttttgaaaaatataggcctccagattgaagtttcctaacatatatatctttttgaaacagtaagaaaaccacaaagtaagaaacataagaaggaaacacaagaagaatatacaaagaagtcctggtctaggatctatgatctacaatagcatgataagcaaacaaaaatatttattcatacttataatccagaggtggaagaaacaatgacatagcatttatagctcataatagcaaaatgtttaaaagattaacagcagcaaattgttagatgaaaatagggaaatgggcatttgtatttaccaatgatgagaatacaattgtctttgtcaagtgtttagttgttgatattcttcaaccaagtggctctaccacttgatagtttctccataaaaatatctgtacagtgatgttgacagtagaataaaaatcgaaacaacctaaacatggaaggaaggcaatgacatgacatgcaatggagtagggtatgggatcctgtagccaccatggcaagcttcagacgccctaagtttcatgatgataaaagcaacatcgcagatgctgcagtgcacagctcagagcccagatcaacctccaagaataaggagtgttttcctacagccaaactcttcacctgttcatttgcagtccatcgtcagccaaccttgtccaaggacacaccacttcattgaacaacctctatccagtggtggttcctcacagaggaacatagctcatagcctcttggtccagtttggactttgaaaagttcttctggttcaggattgtatgttctcattcagactgttacagcccagcttgcctctcctcaagtcctttccccactgtaactgttggtcccaagaacagtaattctcaatcttgcaaatctccattctaagcctccttcctagaaacctacattctggaatccttgccacaattgatgccatctatgtatagacgtccccacaagtctctgtgttcatggatggatagcatacaatctcttgtgtatgtgtgtgagtgcgtgtaggcacatggaggccaccagttgctgttggtgtcttctcaggagctcaccaccatatatctttaattatgtgtctgtgtgcatatctctgtgtgagtatgtgcacatgaaagcagatgaccacggaaatcaaaggagtcagattcctatggagctggagttacagatggttgtgggctgcccaacatgggtgcttgggattggacttgggttctctgtaagagcagtgcatgatcttaaccgctgagtgagtccttgacccactgaactgttcccacaggccctgcaattaagtttttaatgtatctgtttccttactaacacgaaggggtcatgtgacagagacatctgcttcaccaaacattttgggaaggatctccctttgttctgtgtgccaggatttgtgaggtagcatccatccctatctctttccttgctacaggaggaaagtgaggtgcagggaagtttactattcattcatattctcacacccagggcctcgaaccccagagcctgcctcttctttccactaagttttatcgccatccgtgaattgtgtggtgaagggcaggacagggaactggccctccaaagcttgcttaggcacgatcctcgctgctgcagctttttcaggcccttctgctagaatgaaaagagggacatttcatcaggaagatgaaccaaagctgagggcagcaggggagtttcttctggatgctcatgcactaatatgacgtttgagacatctagagtcttcccatgtctttgctttaaacagaagaaggacttgggggttatgtgaagataacagacacaggaaggtttccgtggactcggctttctaactctgtgtcagactccattcctgaactgggtcaaaccagccagccagccagccagccagccagtgaattctagaaacttcccttttcagtgtggtttaaaagcaatttataggaatctctccctccccgtctgttgtgggagggcagcagaaaaacgggttccttgtgtgatcagacacacaaactgagcattaagaggaccttgcccagggagccaatgtttagccagagagtttccacactgaaggctttgtgtcgctttggggaatggtgtagaaatcacgtgcctctagagtcccgctccatctgtcattacgattcacctctcctgaatgtcccctctctttttttcactcaccactgaagggaaacccaaaagatgtaggttttggcaggtgtgcctttctgtggggttcagtgtttcttactccacccatttaatcccctgaagtgagagttagtttcagacagtggagggacactgtaagcagagaggccccttccccttggcgaatacgcaatgctccgtctgtggggcctaaggaactcttcagcctttcatccagccatgaccttaggtggctcatttaccaactcctttgttgggaggaactcgagggagtccacgaaacaggctattgtcttgataggcctttccgtgtgagagggatgatgggaagtgaacatgtgtaatcagcgcgatggctcaggaagaaagcactcgccacaaagcccgatgacctgagtttgatcccagaacctacattaggtctgtaaggttatcctctgactttcacatgcatgctgtgacgcatgtgcccaaccacatgtgtgcacacgtgcacgcgcatgcacacaaatcataatataaataagtaaaaagttcacatagtggcaggtcacctcgaagacagattctagtagagctcatttcctctcacttacggttgctagcttttatacagttaaatcacatgtatgtagatgacatgaaagtctaaagcatactgtgtggcgggacaaagactaatttgagaggagctggtcaagaaaagggggcatagaagggagaacgtcctacatgtctatatatgtgaaaacgttctaaaaccaaatctagaaagtgacccacgagaggaggaaaaggagagactgtaggggacggtggtagagagggagactgaaatggggggtgctggggtgggagatctcagatgggagggaagtggggtgcagagaggaggtgttgggtggatcatcgagaacctactgggtaagaacattcaatggggagatctactctgtgtgttgatagaaatgggagtgcatatgtggctgtgtttgtgcacatacatgtatatgactgtggggaggtgtgcatgcatgtatgactgtgtgcatgcatgcatgcatgactgtgtgggtgcatgcatgtacgtgtgactatgtgcatgcgtgcatgcctgagtgatggagaagtacaaggaactacttcccgccaagtttgacagaccctgctcaatgagtgaaaataattagataagcaacaggaggttgtagaggatttccacccagtgtgttggggccaagggcagagttgaggagtgggaggtggagggactgtgacttggcgaatcgatgagagagcacaggagaccaggcagggtgcttgtaggactacaaaccacctcccatgccctggtccctgaagtgcattcaaattctgcccctaccagttcattactgcaccctctgggcaggtctcttgatctctctggcattcaactgttcacccctcataaaacaaggacaagtattttctcatgtggtctcttgaaggagtatgtattcataaagccctctgtaaacctggaccatatgcttatccgagccatggcgtgattcatatggagaggtggtgaaacccccctgcaaggctggaaacctaccctgctgcccctgggtgagcaaccgtttattacagcccagggctagaaagatgcttttgtttccttacggctgcggatgtctctaaggggggggggctgctgcttgaggaatcacgtggtgtggtcatgtatatgtaaccatttaccagggtaacaacttggaatgcttgagccttgctgccagattcatatctctgttcacatctgtgggtgacacattcatgggttgcattgtggatatgaagcaggctggagagaggtccattaaacaaacaaacaaaaaagttattctcctgctgacaagaggcagcagggttttagcacccagtcagtactcatgggccatcttgtccccccgttcctgatggttgctatggtctaatcctaagtgtatctgtgcagatgagggaaagttccataatacttattgtggctttgaacaaagaaaatctgccttctgccacgcatgtaggccatgcacaacccctatgcttgaaaagtttcagtttcaaacgccgctttctgtggtggcgttgacctgtgctgttggctgtcctgtcatccaggagtgtttcagggttccactgcagtagagaagtctgccagccttgtcccttgaagtagcagatccacaagccacatgtagccatggtgagatgtggccctgtggagatggctcagcatgtaaaaagcactcgccacgtaaatctgattaggtgagttcagtgcccagaacctgccaaagaaagctagatgatactgcatacatcagcagtcccagcactcctgctcagatgggaggtagagaaaagagaattatctaagagcttggggaccagctagcctggaccataaagagtggcatacagcatgagggaccttggtttgacaaggcaggagagaaccaacttctgaatgttgtccgctgacctccacgtatacgccatgtcatatgaagtctgtgaagcatcacacacacacacacacacaccgagagtggggggggggagacagagagagagagacagagagagacagagagaaagacaggggtggggtgttaggttaggttaggttaggttaggttaaggcctcagcctgtaacaaaaggggattaagtaacacataataccaaccggaaaggaaagaggtgcagctgttgtaactagcgagccaaattgtatggaacatcactaaaggttaacttcagtagccacttcctgtggtttgtggccactgactgacttcagagctctaggagagtgcgttttctcttggaagaccgtctcctttgagccctaaggcttaccttacctcagactctcatgattcccaagaagctcgccacaaaaatctgtgtctccaaatgtggaggaatgtgtagtgcgtacagttttctggctagactcggggaattaccttggctctgtgacattacagtggttttggtagcctgttaatgcttatgttttcccgtttgatctcattgggtgccttgctgtagctgtggatgacagcaagtctccagggaggaatgtgtcccttcctactcttgatggctaatattatcactcctgcatacacacttgagtgtctgtgtattgtttttgatttgttttcttttggtgtgtgtgtttgtgtgtgcatgcatgtgttttgggtaaaacctttgctttttgtttgttttcccacatgtcttctcagcctgtgaaagccctctagggaattataaccatattcttggcagtaataatagctgtgccagaggtgagagaggtggctcagtggttaagagcactagctgctcttgaagaggacccaggttcacttcttagcactcacatggttgctcagaaccatctgtgactacagttacaggccatccaatgccctcttgtgatctctgaggtgctacatgcaagtgatgcatagacacatgcaagccaaacacataaagtaaatgaaaaacaatatctgagtctctttgtgctcatcataggctgggaaaaggaacatatacagaagacatttatggtgatgaagaataagtggggggatggatggatggattggatgatttggtagatgggggaatggttgggtatatggctgtgtgggtgaatagatggatagatggtggatggatgagaaagattaatgtgtgcgtagataagtgggtagatgattggatggatggatggatggatgagtggatgagctgtaatatctttctagagccaaaagtggtcaaaccctagtagcctatgtgtttggaggaaaatgttgaaaattcctctagtacaggctgcagaaacaatataagagaaaaaccattgggcccaatggtgttttcaatcagtgaggaaagctggattgaaagtgtgtcttaagttttggagtatgataaatattaattataaatggaatctaagcttcttttgggccagaggtactagaaaaggtcacagattgacaactgaacgctctcatagtatggggtgtggagtacaatagatgcaccatcactggatagtggaatcctagactagggagtgaatcagggagccaggagccatggcggatgtggaccaataaaaggactgaagattctatgtaagacttccgggttaatgagagccatctttaatatgggaaaatcccagcttcaccattagcagatgctctggacctatggctccagctgcatacgtagcagaggatggccttatcaggcagcactgagaggagagcccccttggtcctgtgaaggctcccagggtagggttctgaggcaggaagtgggtagacaggtggaggagctcactcaaagaggcagggagaaggagagatgctagagtgtttgtgaaagggaaactggaaagggggggtaacatttgaaatgtaaataaataaaataaccaataaaatggaggagaagactttacacaaaacacttatggagggctgggaaagctggctcagtgttcataagcacttgttgctctggcagaagagcaggatttagttcccaacacttgcatgatagctcacaactgtctgtaactccaggtctaggggatccaacgccctattctgggctcatggtcacctctgcatgcatggtgcagagacatatgtatgcatgcggcacaaactcttaaggacttaaatgatgtgtttgtgctcacccacatacatgtgcacacacatgtgcacacacacacacacacacacacacacacacacataccacatgcacttacacactgcttgcaacagccaaaggcactggactctcagaactggagctgtaggcactgttagcaccccagtacaggtcctgggaaccaaggccctccataagagcagtaagtgttcttgacagccaagctatctctttagcccctctcacgatccttctctcatgcctggatgaccagacatgaaaaccagagtctttagcatactggtgactatgcgagatgcagccaggactttccattcaaggcacatctgtgagccaatggctgcagcctgggtaggaactggagtatcgttgtattttcagagtgtgcctttaaagaggataaccagacttcccttggctagagagggtaggtttataataaaagccttggtcatttgcgattccctttccaatatgagaagtgttattaatttgcccacttaaaaaggttaagatggaatagatcataaatcatcatttcaagaccctaaagttagctgttttgctaatggaaaagacatgtctggatactgattcagggaagaggagaggagggacggggagggtgatggaaggagaggaataaagaaaggggaagaatggagggagaaattcggagggaggagaaagaagaacaacggggcgggggggtagagggatggggagggcgagggggagggaaaaactacatctcacaggaaataacccaatccagggagaccacaaaacatatgttcttggaggtagtcatatatatagtggcagtttgctgaagttgtataatgtgtcttatacagttatcctcaagaccccagaaggtctatcaggatttgcaaatcctcttggatgactttgtccttggtgtggagattaaccagctcaaaatatttgaagctatttctctagtccaataaaaggctttcatcgtgttttttgtctgtgacatcaagttaaaaacatcgctgctgttctaggccgtaaacaggaccaactctcataaggaaggtttcagaagactagagaggtttgttgttttgttttgtttgttctgttctgttctgttttgttttgtttctctgaggttttcttggaaacttgagatcattgtggcccttgcggaagaggctgtaattcagtcagtagggtgggaggggcattggtggatgtggagcctggcattgtggacagaaacattgatgcattgaggtatagctgactcctcccagatgtgggactcaccacaaaacaagtgatgggcttctattcacaaagcaacaaggtttcggctagaatgacatgactggtcgtccctgcacccatcttaggaaatgggtgtttgtcttgctctgtccttctggggatgccacccacccaccctcccttactcctactccagcccctaccgcgttacatcgttcctagtgctgagcaccttccccttgtcctatagccaatgctttgtggtttggggtatcggattggaattatttacaagtaaatcttgtctcaccttaggaaaaacaaaaagcaaagcttccatgagagtggctgacatcttccctgcttggatcatgttctcaatgagcatttgtcgagtgactagattggagcagtttaacaactgtaaccatgttgttgtgttaaacagtgtaggatcactgtcaaagagaatagcatgctcccccacccgttacactcttaaacaagcataccacaaaatatgaaacttttagctatgtactactactgggtaacaagccaccccaaagcggatggtataaaacattttgccatgctcacaaattcaatggatgagcaggttagacaggtgctggagagtatgcgatcatcctttccagcaaagatgcttcaggttagagctggagagatggctcactggttcagagtacctgctgctcttccagggcacctgagtttgactctcagcacacatggcagactgctcacaactgtctgtaattccaactgcatgaggcttgacaccaaagatcgtggaaatgctggcctcttcttaatccctgctaatttctcagctcccagtaaaacaaaggttttactttagttgttctggcctcttcctaatcgcgttcttcacgcaaacagcccaggagaatctttctttgcttccctgtaaaacttcatacgccaggcctccattgcctgcatttctctcaaaacacttatcttccgagtgctcatagagcagctcacaagctttgaacactcggtggtttttctagccctgagttttcaagtcctacaatcctccccaaaacaacatgatcaggactattgtggcaataccccacttcttatactgatttctgtctagggttaccattgctgaggtcaacaccactgccaaaaagcacatcagggaagaaaggctttgcgctttatatcactgttcaccactgaaggaagtcaggacagggactcaaacagggcaggaacctggaggcaagagctgatgcggaggccatggaagggtgctgcttactggcttgcttctcatgacatgctcagccatctttcttatagaacccaaccaacccagggttggcaccacccacaatgggctgggccctcccccaccaataactattgagacagtgccttccaggcttgcgtttagcttgatcttgtggaggtgtttcctcagatgggattccctcctctctgatgactctagtttgtgtcaagttgacataaaactatccagtgtacctggtaaacccccaatctagaggtaaacgagtaataaattatatctagcacttagtttactaaaggtttgtggctaggtatgatgtcacctctttgaccttattaatttgcgaaggctcccaaggacagggatttgaataggaaagcagggagtgtctgtgtgaatttctgaactccaaaaggaatttgtgttagaacaaagagataaggctgatgactagtaaaaagtttattaacatacactgactacatatgtaggagctgttaaacgtgcctgttttaggaagagtgctctcaaaacttgccagtgactcccaaattgatcactgtctacctcacttcatctgaccaaaatgtttattgagctgcccaccttgttctacacaccatgatcaaagctgggcacgctgaggcgaatgtgaatcggctctgtgtctggaggggaatggtactgaggtgccatcccagaagaagaaggggcatcagggcagaaagaatgacccagtgggcagagtagggaaagatgagcatgaaggagaggttcaactctgagaaggatggatacgaatccagggagatgaggacaaaagaaagaaggtcggccagatcctgcagcacggcagccattggtgactctgctaaagcccgaggaagcagaatgacagaaaaatggagcacagctcaatgtgctgagtttgatgtgaagcttggaattttgatggccttgttttatggtggacaggggttcggtgtggtggggatacggctgtaagtctcacagaacgatggtcctagttcactgggcccccaagctgagcagacaggcccaccatggcttgagtaacttagaaatcccgtggagtcagtatggcttccctccacttttcagttctggttcagtgttttctcacaccactgaggtctagagaaaggtttcggctttctgggttacctcctctgggctcatgaaacagcaggcttgccccaggggtcaggacaccttctgtaaaagatgccagcatcctctatcctgtgcccccccttcctgtgggctcactcagtgaagcagatgtgtaatcataatttccagcatccaagtggccacgcgacgtccagccctgaaacatctattcaggacaaaattcttaaaacccccaggggttcagggtgatatttttctgcccagaccatgagactgtcattaaatgtaatggatggtgaaattgtaactgtggagaccggtttgtttctatgtccccagaagaaggaaactgcaactaggcatggcaagcacaccaaaagctacaggctggtctctcagcagcccgtaccatttaagcagttcttagctgactctatgcacaagccacttggggagttgcgtgtaaatcccttcccagaggaatgctttaagttcacttaagatacacgggaccacagagaaatttagttatattgaaaagcaaattagaatgcaaataaaaaattattagaccatatttgcaatgtggtaatacagatcctttttattaatgcattaattacacagtaacatctgaaatggctggtgtgttcatgtggagtctggtgcacgccagagcgcctctggtggtgctcctcgggtgctaagatcttttactgatttggaatgcagcaagtagactaggctggccagccactgagccataggactccaccgatcttggcttccatgtgtgaccagatcttccttccctttccccttctttctccctctcttccttccttcctcgctccctcttttttcctccctctatccctctgtttttctttcctcctccccttttctttctttctttctttctttctttctttctttctttctttctttcttcatgggttctggggatctagctcaggtcctcattgcttacaaagcctaagtgaatggtctccctaacaaagatctgtaaccttgaactgttaaacctaagttgaagtatctgcagttctaatatgatgggagaagtctttgactatgcactgtctgtggtcttcggtctttataatccttcttcagctgtgtgcatctttaatgaaagaagaaggataattttttatgagaagttgataaaaataacttttttcctctccacagcttcccagacctgtgaatgcccttctaggttaataatctctgatttaggatacaattttgattaacaataatgaaacaaaaacccatcattacttcataggttgtaagtcttcatttgttcattgttagttcttacatagttaagtcctgcagttttcgttgcaagtttttccctttgccaaaatccatcctctccaacacacacacacacacacacacacacacacacgcatgcatgcacatactcacacacatgcacacactcacacgtgtatacacacacatgcacatactcacacacatgcacacacactcacacatacacactcacacacgtacacaagtggctaactctaacaaaagtcaccctcacattttagccaggcttctcccctctttgtttaaaccaacaagcataggatgggtcttatttcacggtatttcacatcttgtttcccggaagcagaatctgagatatggggatttaggacaaagatttatgtggagagctgtcaaggtgagggagactgaatatggaggaaagagagagagaactgagtaaggatgctgagtcaagccccagccgaagcccggggaaggctctggtgtgcagtttatccttcccagtgaaggggagcgtgacaaagaggggcagtgagcttttacttgtgtgcatctggaagccaggagcacctgcgcatgcgtacactttccagcacgccgtaaaactaaaggtgtgtaatctcacagcttcggtgtgggcacggcctcgtttgaccttaagtatcaccaggctgcagttaaggtttggggcagttggaagcccagggctatcctccagactctgtggttgtgggcgaattgaatggtggccatgacaacttcgaggtctgcaagagactgtgtgggaaaccacctgagtaggtctacccagatcaccatttaactcagtctaactgatgcaggactttaattatatctgtgagcctcctgtgcctttgtcatataatgtaacatagtcacaagcgtgacacccactaatgttcagccattcccatgcccgtgagggggttattcaaaggcataggtagtgaggtcagttgcatgcagatgtaatctagaatgtggctggggtacacagctctgtacagagttcactctctcaccctctgccagtcacgctgactgtctgtgcgattgttgtcttagtgcttattgcaagcacctgtgatggacagacagtcttcactgctgtggactgagagacctctttccctgtgtgtctgtctctcccttacctttgtcgtgtggctttgctctgcaaggctcttctcaagggatcctcatggtgctgctgttcactgttgctcatgccaggatctcaagctcctccacacatagtcagtgtctgtctgtctgtctgtctgcctgtctttcctccccctccccttccccctctccctctctcactctcctccccccacccccatctttatttatttttccaatcctggagatggaacctgcctagggttttgcgcctgtcatgttagtatcctgctgcatgctttatctcctgacccctttttgaaactcccaaacactgtcttaatgagtttcccaggctggctttgaaatttcaatcctcctgtctcagcttcctaaatagctgggattacaaggctgtgctaccagacccagctgagtctcctcctcataaagtcatgcaaagtcgattctctccatctactttatatacaggacaggctcagagagaggaagcaagctgacctgggtcaaattctacgagagatggagctggggttctctccagcttgggctccttgcaaactttagtttcctttccagagcggctcctttccaaggattacctgttgttcctttgtctgtctgtgtgtgtgtgtgtgtgtgtgtgtgtgtgtgtgtgtgttcgtgcatgtgaacatgctcacgcacacacaccacccctccctctctataaactccaacgtagaatcaaactattactgacttttctcctttctgtcaccaaatgtgtgataagcagtcacaggaggaaggtttcatcttggcttgtgttttgaggatacagtgcatcctagcagggaaggcctggccttaggactgtgaagtagcaggttatgttgtaccagaggtgtagggatttgaagcttatcaacttcaaggcccatctccacttcctccagagagcccctccccaaacaggcaccaccagcctggagcccactcccaaaacacgtgagtaggtgggggcagggcaccacaacacaaacagatcctcagacaccccccacaacttgttggtttcatcagtagagtttgtggttttcatctgtgagtagagctatttatgcaaatatgcgaattggtacatccttgtccttactgagcactggtatgtgctgaaggactctcccacctatcagaccaaaaatctgtctgttagtgtgatggactgcacaaagagggtaggtggctttcactaagactgagggacaagagtcctgtggtcctttgaattcagccattttcaggatcctggttgatgtttgtaactcaatccttccagagataaagctttgtgtctttgcaaggtaaatggagtctggggagactgtcacagtcagaggtgcttttcatcacgttctgtttaaaattatttatagaatttcctccttagtttctttaattttgcctgtttgtcttctaatttataggactgcaatcaaaagcacacgtggcttccatttcttttctcatagaacagggagtagagttggctctgcgcaggtgtcctgataaagattggcttagcagcagggcaggagtatgttggcattttttcccattaaaaggtttggtagcagatttattgagacataattcataatgctgcacaatttgctcatttaaagcacgtcccagagactgtggcagcttgaatcacatggcccccctcagtctcagccatttgaatggtaagctcccaatggtggaactgttttggaaggatcgggagggtggggttgccttaatggaggagacgagtcagtatgcatgggctttgacatttcaagagactcctaagactcgtccgttcccaggatcctctctgtctcctacttgaggatcaagatgtgagctctctgcttttcctgttcccatatctttgcttcgtgaactgtcaccataagcccagttaaacagtttcttttgtaagttgccctggccgtggtgttttgtcacagtgatagaacagtaaggcagagagttttctcaatgctgcaaccaaatacctgacaagaagcagctcctggggggggtgggggtagcgttgctttgtcttatggctgggacaatatagtccatggtggcagaaaaggtagagccaggcagctctgcagtcaaaggtgcctgtggccagaattctcctcctcctcttcctcttcttcctcctcctcttcttcctcctcctcctcctcctcctcctcctcctcctcctctcactggagtaggaacaggaagagatgaatgctgactctggatttgtcttctctttgtgatgaagtctagagcccccgcctgtgggatggtgccactcacattcagggtgaatcttccctccctcttatcccttagagataaacctctctcaggctactctcatagacatggcggaggtatgtttctaggtaattctaaatccacccaagttgacaagtaaaattagctgtcacagagtgtgtgcatgtatgcgtgtgcatgtgtgtgcacacatatgtgtgcttgtactcgcgtatgtgtgtgatttagttttgatgtattggtagttctacagctattcccacaatcaatcttggaatactttcattatcccagaacgaattctgtgttgttcagtcacccctcatccagtttctgcatctactccctgaaccccaagcttcaatcaactagcgctggtaaaggaagttttacaaactttctttacatcagagatgctttacaaactagcacgagctgcctgccgcttactgtttgtgtgtgatgcagcgtgagcacactatcatgctaggcatactggataactatagatgtcacccctctcactgtgtcctgtgtgcctctggggctcctccctgagctttccattcattcttgttgacttgccggggtcacaggtcctctctcctgctgtgtctgctttaccgctggccaagagctggtatcccagcagcctaactcctgcccttgattgatctctcattctcaagctcttctgcttctgctgtggggatttccagctacctagagggtgagtgaagccttgggttcacactcctctctttgctcctctctctctttgggcccctgggtcctcatcctggctgcctctgagcatcccaaattcctggcagaagctcagctcgcagatcctcgttccacatggctacaagtctggatacatgtgaaggtgaaagagccagtaaatggcgtggtactctgtgtgttctcttcctctctgggggctccaggctatgaagtgctgaccctttcatggttccctcataattttaaaccagtgttgggggtaaatagagactctctctctctctctctctctctctctctctcactctatctcatgcacacacacacaccagcatatgtctatgtgtgtctaacttttccagttgtcagtgggaggaaatactaaatagtatttactattcctagacgtggaaaaaccttttgtgtccttttaaaccaacctcccagtttacgagaattttaaaatagcctgcaacattttagctgctgttctgatagcatcccgtggaggaggatgtcttctgagagagcagttaataggcaacttggccactgtgtgatcgccacaagcattctcatgcccactaggctggctgtgacgtcaccaggagctgcccagtctctgtgggttgaggaaagtgtcattatgcaacccagctggtttgtaagtagaagcacgggatgccattcccggcttgtggggatgtctgtgaggccaacacaggcagaagtggagagggttggccccagagaacacgtgagagaggattcaggatagaagggggggcgggggcagaaaaatcacatttacaaaagaaaaaagaacattgaggtttcaaaaacaaaacaacaacaaaaacccacttagtggactttcccccaaagcgatactctaacttaatgatagctgctcatttgctgaattcacttctgtgtattctgcaaatttaaagtgaggccagcccttcctgtttttatttaatttgccactgtgagccaaggaaaggaaaaactgtcagttactttttttttttttttttctttttccagaggggaaaagcagctatggggtagatttccaagtcacatggctagccagctggtgccacagtgatcaagcccagcctgcttagggcccttcagtgagaagtgggactaagtcaccctcaactcctcccaaacggtaacgcgtgtcttctttaggcccggagaggtgttcctgcctctggcccatggttgggtcctggctccagcccacccatgctgaacttttcatttatttttcaattcttattttaaattttaatttaattttttcccttttcactttacatcccactcactgcccccctccccgtcaccccttcccacaatccttccccctctaccctcccctcctcctctgagcaggtgggagcctctctgggtatccccccaccctggcacttcaaggctaggtgcttcgtctcctactgaggccagacaaggcagcccagctacaagaacatatcctgctcaagaacagctgctgggatagcccccattccagttgttcattctctgagaggcttcacccagcagctgactcagacagatgcagtcacccatagccacacagtggatgaagcttggggactcttatggaagaataggaggaaggattgcaggcactgaaggggataggaactccacaggaagaccagcagaataaactaacctggaccctcgggctctcaaagtctgaaccaacaaccaaagaacatatacaggccggacctaggcctcccacacataagtagcagacgtgtagcttggtcttcttgtgggtcccgaacaactgaaacgggggctatcccaaaagagatcttttgtttaaaccttcccagcctctttccaacccttctgccaccaataccgttgtgctacagctagcaaagctttccagacacagcctgaaggatcatgtgaaccctgtgctccctagcgcttagcgtggggttcactcagccttaatcagggacaccagggatctgattgttgcatgagccaccctgcccctgcccatgagcctgacttttctgtctttggatctatatggtcactagcacctctaagcttcctgtgcactgctgtaccagctgtaccagctgagccttcacccgttgtctggcacaagtccttctgtcttacagctcaacccacgagaacctctcctgggaagccttccaggcctttaagaataagacgtgatcgtcctttgtgtcctcaaagtcacctctaccctagtgcatggagtaggacattgtcgtggcttggcttttccctccggaactgttcgttccctccgggtctttcatgtctgtctcctgcccggcacaatgcctggcataaagtaagcacccaataaatttcaaatggaccatgtgttacattccctattaaataccccagctgcggccggctctgccaccagcctgggtgtcctccctaagtgtgccttcagttttcaaagtagtcctgatgccctcggcaggaaaaggttgcctctggcctctccgcggaggaggattaatatatagtcaacccaagaggtttctgtttgtagccttgagagatggtgcacgccggtgatcccagcactctggggcggcagcaaaatgatcaggactcatctttgattgcataaaaactttgagccagtctggggtagatgcgaccttgcctcaaaggagaagaaaaaggaaaaaaaaatcagcttgtagtggcaactttttaagtagtaaaagttaagccactgtggtgaatgccagagagccacagatttctactctggccagtccctccacttaatgtggtgtggaacagaaggaagcaggacttccaaaaaatgatggggaaacccccaaacagcctgctattttccctctgcagcttggagcagcccagtctgtggaaaggagaggctaggcttctgcagggcctgtttctaatccctgcaccctcctctgcctctgcccacctctcagtgtggtttgaatttcccaactgctcccagctactgcaacaggaagcaggaagctgcttttccaattcattcattaaagtaggctcctgcagttgctgccagagaatagcatccactcctagatgtcagcttatagtcatacttcaaactcagacacaccatgaccgaggtctccgtccctgacagtcactgtgcgtggtcataaacttacaaacactctcacttcatgcccttatttcctagctaccaatttttcatttatctctttgatgggtgtgtattgtgcttttgtggtgggggcttggggactatggtgtgtgtgtgtgtgtgtgtgtgtgtgtgtgtgtgtgtgtgtatggggtagtgctcacccacacatgtgcctatagaagccagtgtatcttcctttctcatccctgacctttgtttccgagacaagatttctcagtgaacctgccctttgccattttgcctagatcaaaccctccggatcttcctgtctgtacctcccctgcattagggttacaagtgtacaccaacttgtacacgcccatctttttatgtgggtgctgggcacctaagctcagccttgtaggacaggcagcttttcatcaaactatctcccaagccctggaatgagacattttttaaaagaaattgctggaccctaatgttatctgaatggtttttaaatagcacttcatgagctatgaggtgattacatacacatacctatatttgcagcactcgggtgactggggcaggaaggtcctgagactgaggccaacttgtactgtgcatagcacacacaaagccagctctaaccggctacacagtgggaccctcggcacagcagcaagccagctattaatggacagcaagaggattcccttggcttttggttcctagaactctggtcctaccacatgtgaggctctgggatggagctcctgggtctctgttgcacccctccgtaaaaaagcaaacagaaattcacccaccagacgttgtgaggattgagtgaaaacaagcttaactcagaacttagggacggccctgaaatacgcacagccgtccagccatgtgccctgggactgctgtccctcccctgctctcaccttccccgtgcccagagcaacagtgtccttgtgggcttactttgacatgaaatacttaaatattaaagtgcaagaccttgaaatagttaaccaacctcaaagaaacaccaggactgcatctacaaacgtgcaaatttgccgtctgttcatctgcctccctgcctaccagcaaccagctttgaactctggctggagtcagtaagctgggggtgcctggatcctaggtacatgtcttgctcctggaaagatcttgagtcttaaagatctgccctaagatgaggagttccagagaactttctggaaacgctttatctcggatgcttgcgtcactttgctggggaggtcttgtatttttgtctaggctgaggaattgactcttttccccaggtggatgttttactgaacacagatgggcatcatctgcttcttgtccaggcacctgcctctgatgtcactgtgtccctttgttctgcccccacccccccagacctcacctcttggttacatctgtttcccatcttcccttcactgactcccctccagaaccattgcaggaagattctagcatccaacacccttgactgcattctgcatctcaacaccctatcataggaagatctatgagaaaacacaggatgctgtgactcagtagaccgggaggccacaaccccattctcggacacaaccgaagtaaaaccagaattgacaagcaaaacagcgagatgctgtttatttaaccttgctctattttggtgtgccctgcccccacacttactaagcagactgccccactctgtgaaccaactctgccacagtctatgggctggccacctcccttcgcttctcaggcatatttcatccaaaatgggggtcatttgtcatccttatagtcactcagtgggcatccttacaaaggacactgatgttccccggggtgcgtgctgagcatagagatggcagagaagttaagagccaagctgcttggcccgtgttctctcacatctgtccccagctgtcccaaagggcagccatggctacctctgtgggagggaattggctgttgtaaaaggttgaagaatgctctcttttgggtacttcctgagacatttggaacattccaccattttgaacacaacaagactccaatcctaactccttcagacttcacagagaatagtgcgaattcatgcgctgtttgttcaagcctcctactgacaagccacacagtaagatgctgtttaaccctgctttattttggtgtgcaccccccacactgactaaccagtctgccccactcctagggaacccaaattccattctgagaaccatctctcccttcccttgttccttacaaggcctttctcggttccctgcaccacaccccatgttctctatgctggttttacaaagcagagagtctggcctcctcagccttaccactaaggtagacaacccccagataatatgctggcgcttaatgcaagactactgacccgcacgactcttgcctctaattctcacctgtgagcatgtggagcccagagacacccagagtcagttccactgtgcataaagatcatgaacttaaacttgaaaagccctggtctgtgtcctgtggaactgagtcttgggccttccttgttcttgtcctgtgtggtggtaggatatgggagagtgttgtttatctctagaagccacagcgtggaccggcatcttgtcttgtcttccctcctatagtgatttgaaggagaactgtatccaccctacccccaccccgccacttcccccagcccctgcataggctccaggatttgaatacttggtctctgggccgtaaagttgtttggaaaagcatagaagatgcagccttgcttggcggaagtgtgtcacaggaagtgggctttgagatttaagagtctccaccacttgtagtcaccccccaccaccaccgcctcacctcttccagctttgggctttctgttccttccgcttgctgccatgttccccaccatgacagactctaataatttgaaaccataaccccaatagactcttctataagttgcctcagtggtaatgttctatcacggcaacagaaacggtaactcccgtcccaccagtccactattcctttgggccttgaagtccttgagttctagagaaatgagcacaaacttacatctgatgtcaccgatggcttcaccaccacagacactgtttggagcagtgttgctgggtcccctgccctgacagaaaacactgatctcaatgcagaagtactgtggtcatccacacccccatgaaagggttaacaaagagtgagcagatgctctccccgcccccaactggcatctaagtatgcacatgctgggacgagttaggtgatgccttctggatgctctggagaagaggattagcatcatgcacggtagcctgagaaatccctgcctggcaacagagacccagacaaattgacctttgccctgggcctcacctaccttgcctacaagaaaaaccttagcttgtgcacgtggttataaggaccacctgaggtgagggagtggtgtgacgggtgggtctttgtttgtacatggcagaatgagtccccaccatctccagatgtccactgctaatgttccttcttgtttgctgtcgcagcggagagtccaggatgtcatcagccccattgtgtttgaagccgcctacagcctggatgagcatgtgatgggtgaggaagaccgggagctgccagacctgacaccagtgcttcgctggaagaagggacaaaggatctcccagaagaatcaggttagaacctgtctagctttgtttctgtctctggtaaagagaccctggcagaaagcaactcaggggagcaagggtttgttttagcccttgacgctaggttacaacccatctctgtggagaagtcaaggcaggccacttgaaacagtgagccacatcatggccaccaccggtgacatcaacagcaggggaggagagggagggagagagagagagagagagagagagagagagagagagagagagaaaatgcatgcatgtctagcactcaactagctttctctacttaaacacacccacacacatacatacacacattctctctctctctctctcacacacacacacacacacacacacacacacacacacacacacgcacaaacaggaacgtgccatttgagccctactggtcacttagactcataacaagtacaagggagatggaggggttagaaggacatggggtttttaagtgagtgaggcagtgtgcagggctagccttatggtaaagcacaaagaaagcagggagcagaagacaggaagatggttaagaaccagtcactgggagctggagagatggctcaactgctaagagcattggctgctctttctaaggacctatgtttgattcctagtacccacacagtggcttactgctgcctgtaattcctgttccagaggatctgatatgctcttctgaccagggaccaggcacacaaggggcagacactcgtgaagacaaaacattcatacaataagtatagaaactctgtgtgtgtgtgtgtgtgtgtgtgtgtgtgtcgtgtgtgtgtgtgtgtgtgtgtgtgtgtaatatgatcaggtcttccctaaccatggagcagtgacaagaagtcagcctggacacctgttactattcagtaattcctggtaataaaaccccagtctagaataatgactactctgttccttaaggcaaaatcttgctagcttaaaaagcaaacaagcaagcaaacaaaacctgcccaagcttatattgtaatacttgatgttttagaatctacctcagcaccctgtgtttgtcgagcctctgtactgatcagggagacagtcgttaactctagtcagcttgttgtagctctcagcagactttgcctggccctaaccctcattcctacaggttcatagagtgctgaggcgggtcttcctcactgaagaacgtcttaaaacctttactgactaatgttgactaggacagccagtgacccaatccaagccagagataagggaaaagactggtatcaaaatatcattcttggtcactccgggctctttaattagcaggcatatgaattagcagtcagccagacagttgattcattgttctctgaagagttgaataaactgcttcaggcaccagtatgagccagtcttcactgactgaaccctacttccagaatttgaagtccccacagtaagacctagccttccactcagccatccacccatctacggaccaaccaatcagtgctctgccctaagtatgagctggcaaccaaggacaactgagtttacaggatgtgggacacagaaaagaaaggccaactgacataaaaataaacagaatattttacttagaaggcagaaggttattctgtaaataaaaaaagattataaacttttattttgttttttttgatacaaggtcttgtcgtgcagcccagactggccttgaacttgtagtctccctgctttagcctcccaagtgctgagattacagataggtggggtcacacccaatctgagattataaaagctctctcacagtgtcttagtcagggtttctattcctgcacaaacatcatgaccaggaaacaagttggggaggaaagggtttgttcagcatacatttccacgttgctgttcatcaccaaaggaagtcaggactggaactcaatcaggtcagaaagcaggagctgatgcagaggccatggagggatgttctttactggcttgctcagcctgctctcttatagaacccaagactaccagcccagagatggtaccacccacaatggacccttcctccttgatcactaattgagaaaatgccttacagctggatctcatggaggcatttccccaactgaagctcctttctccgtgataactccagcctgtatcaagttgacacacaaaaccagccagtacaattgaccccttgtcaacttgacacacaaacacatcactagtaagcctcaacccttacattcttattcatccccaagatctaaataactttaaatgtcccacagtctacatagtcttaaaattttgatcttcttaaaatatctaatcttttttaaaatccaaagtctttttacaattaaaagtctcttaactgtgggctccactcaaatacttccttccttcaagagggaaaaatatcagggtgcagtcacaatcaaaagcaaaaatcaatctccaaccatccaatgtctgggatccaactcacgatcttctgggctcctccaagggtttgggtcacttctccagccctgccctttatagcacacaccttgtcttctatgcttcagcagcctgtagttcactgctgctgctgttcttggtggtcatctcatggtactggcatctccaaaacgctgctgtctttcactgcaacttggcttcaacaatagcctctcataggctctcttcatggtgccaaacctcaactcctttgcatgaccccttcagtcctgggccatcatttgcttctgaggctgcaccttcagcaacggccttctatggcctttcacagtgccaagcctcagctgctctgagtgaccccttcatgccttcaaaaccagtaccacctgggtgactcttacacattaccaatcccagccacagcacaaggtacaaccttggctatctctggaacacagcctctgtgctctcagaaaacacttcccagaagatgtcacctcaatgatgctggtctcttcttaatcaccgctaatttcttagctccagctaaccagcatcaatagtcccagcaatgcaatagtcccagcatagctaattcttcagccccagctaaccagaaccacagaatcttcacaatccaaaatagcaatggccctgaaaagactctttaattttccctctgaaacttcacaagccaggcctccatcttctacacggttctcaacattatcttccaggctcctatacaacatctgaaagagctcttaacactgaatggatcttctagcccaaagttccaaagtccttccacagtcctccccaaaacatggtcaggttgtcacgggaatgccccactatgctggtaccaatttgtcttagggtttctattcctgcacaaacatcatgaccaagaagcaagttgaggaggaaagggtttattcagcttacacttccacattgctattcatcaccaaaggaagtcaggactggaactcaagcaggtcaggaagcaggagctgatgcagaggccatggagggatgttctttactggcttgcttcccctggcttgctcagcctgctctcttatagaacccaagactaccagcccagagatggtcccacccacaaggggcccttcccccttgatcactaattgagaaaatgccttacaattgtatctcgtggaggcatttccccaactgaagctcctttctctgtgataacttcagctgtgtcaagttgacacaaaatcagccagtacatgcagtaaaggtgtttggttcacagtggccactctgtgtggctcacaaactcctgtaacatcagctcagggtatctgtcaccctttcctggcttccaagagcacctgcacacatgtgcatatgcacacacacatacacacatacacacatacatgtaaataataaaaatcttaagtgacctgttaagcaatgctatggttcaaacagaaggcatgttagcctgggatttggggtgactggatgaacacaaggaagaggagggcctgggtagcggatgattgtctgttaagttaaagccatgtgctcccagcttggcctctgtggaaaagaacatgtagtcaagactacattggctctaatgcaaaatcacgtagacataacaacatgaacacttcttatagattttggtctctgcctccaagccagttcatagcaaaaacaaagacgtcatcagagtgactggattgtagatgaataatagttctcttaaaacttaaatctcttagtatcttttttaaattgctgagctgggagagattgcagaacttaatgaaacaagaatttgctgtgcattactcgaaatgcagaggtcagcaatagtgtcgtggcccgaatgccccagtgccagtggccccagctgctttgggatcatgtaatagaaagtttgggagtagggaagatggttgagtgtctaaggggcttgccacacaggcattggaaggtagggatgggaagagcgagctggctaaagagactcgccatattggcaagctttgaatttgattaagatactctgtctcagctgctggagagatggctccgtggttaagagcactgactgctcttcagaggatctgggctcaattcccagcaccaacacggcagctcacaaccatctgtgactccagctccaagggacctgacacccgcacacagacacatgtgcagacaaaataccaatgcacataaagtaaaattaatcaattattatttttttaaaaaaaaagcccagcagtggtggtgcacacctttaatcccagcacttgggaggcagaggcaggtggatctctgagtttgaggccagcctggtctacagagtaagtcccaggacagccagggatacacagaaaaaccctgtctcaaaaaaccaaaaaccaaaaccaaaaaaaaaagatgttctacctcagtgaataaagtgggagagaaactaaggatgactcccaatgtcaaccctgtgtctccatgtgtaggcactcctttccacccccatacttgagcctacacacacacacacacacacacacacacacacacgagaactgacattgacaaaggaaaagagaattcccggacccacctagacacatgaaatcagaaacttatgggatgacacatggcttttaataagttgaccactgatcctgacacagctagtttgggacctgcagcagtagccgagctaagagtagcagtttgcctgtgagataggaaggagtggggggagtggggggggggaggagctgtggttagtcagtccttatctggtgtcaggaattcagtgggacaatgcattcatctggtaaactgagttgtcacatcagtatgctttctagagacacagaaataatcaccaagataaagacaatcagatgcttataacagtgctttcccttcaaagagacccggcatgggatgtgtggggtggagagagagtaatctaactttttttttttcaaccatgtcattctctggttgaaattaaaataaaagaaaaatattgttcttagattggaaggattgcccaggagcctgagactttctagggaagccgttcttgcttattcttctttgcctgattatgaaaaacaacaaaatcgagtcggcttagccatctccaccagccctccatgtggcttccagatgttggctctatcaaagagaaaagcaatggggcagctagcaagggccactccaggaagcagggctcaggcactatctctgtcaccgagagctcaaataggacacagtagtacacggatacccctcactcccacccccacccctgtcagtccccccaggctcagcccgaacagcttctcacctagatggtgcaccacacctgtgtccctgaatagcccctctacggctttcctctcagagtcaacaggacctcgaacggtggtgccctgatccttcagtgctctccagggtcacccacacacttcagtccagccacccccatacttcctgtgctcttccagccttgggccctgctggcccctcttctgtgaaggtttccatcctactcttctcaaggccaggctttgtgtttgaggtttcaccctgaatgtgactacctcagagatccatctcagctcccccaactcagcttcctgtctgctctgtctatgagctccatcacaatgaattctatccaatgacttgatcatcgcctacactagatagaagcccagggagtgcagagatcttccttctctcattagctattaacccccaacacctacctccaaacctggtctcacgtgagtctctccacagaaagagcccttgtgaaggaacaaaaacctatgccattctgcaaggctgctgctcaaagacataggatatgctgtgagctcccactgggattccctccttaaccagtttgtgctgtgatttgcagtgatttttgccacaggaatgtgtgtgtgtgtgtctatttttcaaaccatcaagcagaggaaatggtgaaagagaagttgtttctctctggcattttgtcttagccacgtaaaggtagaggagagggggtggggagaagtcaacactgggtttggtagctcagtaggcagagtgcttacctagcatgtatgaggacctgggttcaatcccttttaccatggaaaccaagtgtagtgactgaatgtctataatcccagtcctcaaaaggtggaggcaagagggttggaagctcaaggtcacccttggctacatagcaagctcaaggccaggctgaggtagaaaaaatactgtccattactattctgtttttaaaaggtcatgggtgcacacctttaatcccagaactcaggtggacttctgtgagttcaaagctatcctggtctacacagagagtgccaggccaggccaagtcagactgctctccatagagttccaggtcagtcaaggctccatagtgagaccctgtcttaaaacagcaccaacaaaatgaactgattgtgcttcctccatctggacaacacttctgaaaccatcctgcactcttaccatgggcctcatgcctcatgcctcatggatcttactgttgttttgttgttgttgtggtggtggtgggttttttgtttttgtttttgtttttgtttttgtttttgttttgagacagggtttctctgtatagccctggctgtcctggaactcactctgtagaccaggctggccttgaactcggaaatctgcctgcctctgcctccaagaagtgctgggattaaaggcatgcgccaccatgcctggctttttttttttttttttggttactgttgggttttattaaaataaaatagaaaccaaattggaactgagcaacctattcttaggttagggcaattatacaacgctaaatcccatgccaggtgtggtggtttgaataagaatggccccttagtaactatgatcaggaagtagcaccatttgggaagggctaggaggcgggccttcttggagtaggtgtggccttgctagaggaagcatgtcactggggctgggctttgaagtttccaaagcccaagctagccctggtttcttctcttcctctctgcccatgaatcatgccgtagctctcagctactattctggcacctgcctgtgtgccaccacactccttggcaccatggcaatggacaaaactgagatggtaaccaggccctcagttaaatgtcttggtcatggtgtcccttcacagcaatagaacaatgattaagacaccagatgacaaaggatcatataacacttgcacctaactggggcctctcatacctggagcagtactgtgggggagcaccaagtcctaaatgtcacatctgtggtcctggcaaatactacagtatgaagcagacacctgctgggaagtcacacatggtgtatcagactacatcttgcttgtttgcctttaagtagagccttcttgattagcccctttgggtgggatttgaaacacatttactcaacccaacccaattatcaaaggcttcagcctgggacttggttgccttagcaaccgaatatacagtgtacagcccatgtccataattgtagtttaatctaaaagaagtattgcctctctaagaaactggcccttctctgatcctaacagacacatttaatacttatccttcctgttacctgagaaggagggatttttctagtatggctgtggcagtagaaatgggtcccaggaggccggagcagctggagccacccagtgagttcccaacccctcacttccatgtcccggtcgctgtggtcgctgctttggcaccacgagaaaaactcacaaccctgcctcagaggcagatgccatccgaaccagatgcatccttcccaaaccacagcccaaaggtggtaaagacttcattagctacatattaaacagtaggagtcagcaggccccagcctgtggccaagtctgtttttgtaaaataaaaaaaaaaaatttaaaaaagtttgcttgcggtagttggcagggaaggtggatcagtggcaaaaaagcttgctgcacaaacatgagaaacacattcatacccaagaacccgtataaatcctggatgtgactggtggcccacctgtaattccagccctcacaaggcatgaatagacaggcaatcctctgaacaggctgcctagggaggccggtcacgtatgtgagttgtaggtctcctaagatacctcgcctcaaagaataggtagaagagtgatcaacgattactcccagcatcacctctggcctccacacgcatgtccacatacatgcaagcatgtataaacacacacctgaaacacacatgaaaacagaaaaaggattctcacctatgcccatgcctatgcacagacagttactgcatggtgcgtttgtctgtggagtcactggaagcaagacagcaaagatcacaaacgcaatgacgtccaatttcactcttcccagccaaaatttgctagccccatctttttaaaaaatccagtaaggatacaatgagaaatgagaaaagggattttctggatgaaagtgtaatccccaggggtacccagggtgaagagccgggtgaggaagaagccccaagaagaacctgagctggaggctgctgggcgcgctggccctcagcctcaggagtctgagacaggaagcgattatctctggagagaggttttagcttctcgaaacaaggagagatgagctcgacccgcatggctgggaaggctgcttccagggaagtgagcagtcagggccatgcagacctgcaggtagaggctggagggcaagagaggagactccagccacacccagtgtagcctggtctgacagaagtgccacacttgggttttccagaggattttgggtgcaggtaaaagtaacttgacaggttcctcagggaccaaacttacagctgttgggattgctacctgagaggaacactgtagctgggcccttaccttacagccatactctctgtgcttcatgccaaggagaaatttctcattattcctggaaactctgtcctcatccagcctgttgaagctgtggtgtgccagccgtcttacctcccagagatgattcctaggaaacaaattggccattttcccagaagagactggtccaggtccaggcacgggaatcaaatttcaacctcagcatacaaatgtgtggacatgtgtgaccaatgtgtgtatatgcacatgcatgcacacacacacacacacacacacacacacacacacacacaccacttattgggtacaggactcttgatttaatagtaaattgctgttttgatccttaaagcaactgctttcctaacttactaaggggcttgactcagtccaggttctaaatcatgcatcctgctcttgtgtccggtgttcctgactctaggaagaatactgggctggcagagtgttcagtgaacactctgctatcagactgttaaatctatcgctgcacaaaagaaaagaaaagaaaaaaactcagaaatttggctcccattaggagtcaaggatcttatatgttgcaccatttcttttttaatttacctgctgatggttgtttccatattgttgctcttgagaacactgatgtaataagtgtaagaatatagccatctcctcaaggtgcatgtaaactccacatgcacacacatgtgaacatgcacatacccatgtgcacacacatgcacatgttaataaaagaccttatctgtaattactgtaaagagactaaacccatgcaaataaaaacatatagtgatggaataggttaaaataacagaatatcaaactatctgccagaaattcacttctggtccaacagtgtacatatgggcaggaaaaagcctacataaatgttaaccaaagaaaagcaagcatagctccctcacacatacagacttaaagtagacgttaagagcaagaactgtctctgaaggcagtgaaggtctttacatagtaataaaagtgtcagaggggctatcaacatgttatctctcacatcagaaaagttacatacataaaacaaatactgacagacctgaaaagggacataggcagtaacacaaaactcaaccctggcaccttactttcaactatgggtagatagaggttctacacagaagactgctgtcttccttactattctactgtaaaaggataacacgatcaaggcaaacttagaaaagaaatcatttgaccaggggcttgcttacagtttcagagtccaggaccatcatggcagaaagcacagagccaggcaggcaggcaggccggcaggccggcaggcaggtgccaaggccaggcttgacatcaggagggttcattgaggcaggcagtgaaaaggggtatggtgttagcaagtggggtcagctgacagtctgatgacagcaacaggcaatttacagggtctgcactactgatgtaacaaaacttaactatctgggactggcaagaacactcagtacgaagctctgaactcttgtaatttgtaagtgtccatatgtataggcagacagacagatatacatttggtggatggcacagagccccaaagccacagctatacatttggtggatggggctgagccccaaaagtcacacactattccttctctctggtgagttatatcttcttagaccaaaattctttataaaattacttcatagataaaatgttatacaaagagagagttacagaaagatgtcaatagtaacttcaaagcagtgcttcattctctaagctcattacaagttcaaaacaacagtttcgcatggccttgctttatcatggtgtacacctgtggcttcatccttggacctgactcagagtgaatgtttttccctgatcacaaatctgtcccaagcctatatctcttcttagtgtaattatgaaggctcattgtactatgcagcctttgcttactattctgtgaggaggtggcgcattctattcgtgattctaactttattgcatctgtctggcaaaacaactaaaaccatctccttaagcgtttgtcttaaaattctttgaatcaaatgtggatttctataaagtcattagttcatctaaacagcattaattcatgaaagttcatcttcatgttgatcagcaggaaattttcccaatagggtgtcctgatgcccaggaatcattaggctgtgtaataataacaggaaaggcatatcagcagtaagaagcaatcctgggatgaagtctctgaagctgtgcctctcaagaatgcacccatcacagccatgtaaaaccgtgggctatctccaggaaactcatttgcttgccatagcctttacctggacggcttttggaaggcaggcaagcaggcagggcactagagcagtagtagctaaggacttacatcttcaagcataaggcagaaagagattgagacaggaactgttgtgagcttttaaaacctcaaagcgtaccccctgtgacatacctcctcctccaacaaagccacacctcctaatccttcctaaacaatctaccaaatgggacccaaacatttagatggcctgtggggatttgggtgtgtgtgggggggggtgcattctcattcaaaacacaaccaacaaaggaacaaaacagttaggcagcattgtagatcaatagacccaatagacatgcacagaatgttccacccaacaaaagatcacccaatgaccacccatcttctacaacgcacaaggaacagtctccacaatagacttcacgtgaaaacacaaatctcagcaaagcttgaatcataccaaatgttttttttttctgaccacaatgggttaaaattaaaaaatcaacaacagaggaaaaatgagggaaatggtgaatctgcttacagatttttcatttggcagggcttggtcaagccacctcatctctctgtacagagcaagttctcaccagagactctcaagtccctgacagctctactcctatgacaagtccatcacgtgggaacctctttacaaaaacctggggtttccttggctcaaagtagctaagttccaagaacaaataactaggagaaagccctgttgctttttatgtagttggcttagaagtcatatagtacagcttttattgtagccacagaccctgctggtcagcagggaagcagtcattagtgtgtgcttctctgtgggaggcactctcttatagcgttgtaaggagcataatgggggagacatttctgagcagatccttgaaaaataccttagtctaccctgaagcaggttcacatctactcctctttcaccatcaattaggaagtctcatggtgcctacttgtttaaactgtaaaatttgaggggggtctttccaaagatgggtagtagggtctaagagctgagttgtcagaggttggaaggacagggtcccaaacttgaagtatgtttgtcacaggatagattgagatcccattctctcctcagttcttacctctgtcagttgccacctctgaagccacctcttcccatcaccactcctggtgccacctctcccactcccatacttcatcccatgctgtctacaaaaggctcactttcaatcaagggtgcacccagggatggaaagagttcatgagacaaagctggagtagctttgccttagggaacatagactgagtcaggtcctcctgtcactagaggcaaagtcattacacggttattcaaaggttccaaccaacaagcagactccaggtttataataaatatacacctgaaattggaagagcccgctgtctcacttgcctgtaaagtaagatcaggaatggttttttgatgtctgtttttttgaggacctgatgttatatgattgagaggatgaatctaaaggaaaatagaaggtaaaattatcaatgtaaggtcaattgaaaggcctcagcagggccataggcttgcctatgatggactggcaagcttaagtttcatcatcttgttaaggatgcctttatcctcatccttgcccttcccttcatctcacttaaacatctgcacatctctcctgttctccccttggtggtgatgaggtatcacagacgtcttttattgaagctacactggaatttggcctttcccttgcttcagtagggtccaaaagaacacaggaaactgctctttcccccaagacttccatgataattaagaaagggaatgttggctgggacactttattcttttagaaatgtggcatgcgattatgaatttccatgggcaaaactaccctgtctagtagagtctagactttctattagccaacaggcttgctggagtccctactggcactgtgagaggccatgtggactggtagtgtgtaagggaacaaactgcctagaactgtgcttgggtaggaggggaaaacctcaccgacttgaacaggatccttgaaggtgtttgaaggttgataaatcagagctagtgaagagcaatgggctctcctttacaaatcctcccgaaatggtaaaacaatgggagctatggagcaccccattgcctagtagggaggacattttccatagatcagaacatcagagagatggagaccacaatgagaccacagtgctcacatcctcctactctgaaggaattgcagcctcagctactgttgcttcccatcacgtgaccaaccttcataggcaggcccacactccagagcatccctggaacctgagccacttctaacccactgagtttgaggccctgaactgagtggagctttgactgccgagggccagctccggtgagagaaacaacgttctctgcttacctctgactgctaaaatcatccctgtcatcttgcattctcagccctaaggcctctgggacaaataattcaacatggcctgagtgcttgtgcagaaaatggttcaaggaaagactttgttcctccccaagagagatcctagaagagatgaagagactggtgtctcaggatacctcacacagatggctggtcactgatgtcttagaccagcatgtgctgaaaggcatctgtcatgcatggccatgcctggcttttctagagtgctaggtgtgcaaactgaggcgttgaggctgggcacagggaagtgttcttacctactgagccatttccccagccccacctgcatgcctccagaaacaactccaggaagcactcagtcatctgagcattagaacaagtgatatgctcatggccttgggaccactgttgacagggatttcttggaaccttgaggaagtcccctccacacatccaggggctgacttcctggggttgggggaaagtgcctggagggtgctggtttgcaagtaggtggttggccattatttttgttcgtttaaattttgtaccaacacccgcctcttctctcccacagacagtttttgaaaggaattgccaatctgaggactgtgctgccgacctgcagcttcgggggaaactcctgctttccaggtaccgttccttcatgccaatgtcctaagaacctgctctcttttgatgctacaccacaaacctggaagttcagatttcccccaacaaaaaagaaataagcagtgtggatgagttaggatatttctgtgagttggttttagaatgtatgctataaatactaatttaatagcagatattaccagagggattagctgaggtaccgtttgcaattccatcccatctcacaacagactggctgatccttatgatttcgatgtttatttatgtgttggggcgggacttgacatttattaccttgtattacattgcactatgggaaactgccagcatttgacctttggggatggtttcatgtgacttaaggtagtattatttgaagatctctttcatctttttttcccctggcatttaacagtagtgtctgttttagcagtgaacagtttctgaggcaggaaggggtgagggaagggggcagccggcctggcgttgcaagcaaacagtctctttattatttcaggccttcctcccatggtctgcaagtcccccctggccagggatgaaccagaccaaagccttctgtttcccctttgccaaccctttattttagacttctcttagaatgacagtacttatcctgaatcagccacagggcacacaatggtttccttttgtaacacgccttctgaaagattatagtagctttggggccaagaaccccctctgcaagatctgtagccacttttcaaacaagtatcagtgtggatagatactgtgtaaaatgtttcattgtgtactcgcccttacctaaaacattgagagttaagtttggatcagtgatgacagacagctaggacctttctttttctttttccttagttttcttccttccttcctttccttcttttctttaaagctagtcttacgtagcccaggttggcctctaacccccgtctgtttcagcctctaggtggctggattacaaatggtgtatcactatgcctggatcaactgctacaacgttttcttttttctgtgtgtttgtgggcgtaggagccagaggtctccatcagatgtgacagtgtccgggctatacagctgttttctgagatagggctctcttactggctgattgactaggctgtcctgcagtatcacctgcctctctctccacagttagacttactagtgtgcagcaccatgcctggctttttatataggttcttggagcagactggaggtctcatatctccatgatgagcactctatccactgagccatagcctcagtcccacactcttatttggggtgtttaataatattttattcatcaaaggaaaatcaaactgagattccattctttacttggagtatacctgagaaggtagcataagctccaagaccccacccccaagtatacacacacacacacacacacacacacacacacacacacacacacacacgctttccctgctacgtacatcttagatgctaattggctttggttcagttctggaagaagtggtggcttaaagtagcacatgcttttctaagcttgggaaattgctttagacgcatagagtgggtaatagggttgtttaacagtaagaagagcctcctggggtggttagagacatcaattttaaagaaggttcataaattatcagctcattcattttaattttaggtgtgtcttccaaaaatgtgttttagggaaagtacgtgagtttctttttatgttgagctggaccataaatgctggggtttattttggatcatagaagactccatgtggtaggaaaatatccacttgatccacggttaaacattgctaggaaagttctggcgcccttgctggccatttgttaattgtgctttctgtgtagcaagatggaaaactcgaggattgtggtcagcaaagcacttttggctgaagttgcttccctttctggcctttcaagagtgttgtcgtcgaggcatggcaagaaaaacccaaggatgtgatagaagtacctgtgaaatcttaaaaatatggtcacctaaacaacagcgatgccagttgacatcccagtgtgggtgcaaacaatcagacaagccccaccccagcataaattgctataggcaattaatggctgctgagaaagagagaatcagcaagaatcagccttgtccagggactgaacacctacaaataatactaagtgtatgtgtgtgtgtgtgtgtgtttgtgtgtatgagagagagagagagagagagagagagagagacagagagagagagagagagagagagagagagagacagggagacagaaacagagacaaagacagggaggaagggagagacaaaaagggacgatcttagtggcactcatggtgactgtttcttcttatcctgtgcaggtcatctgtagcttggttacattcagctgtaccttaagtcattcaccgtgcagctgagtctgctgagggctagatcccatgtctggctgtcccagcttccctctgctcttccattgtccctctggagcaagtaggctcgggtaggccctctcaaagaatgtcaaatttatttgaagccagcataaacaagcaatggctcctcaggcctgggctcagaactggaacactgtgacttcgagcttgttctatttcctactgcccctcacatggccaaactcaaactcaatggctagaaaaaaatttctgcctctttactgagtggatttcaaattttatgggaaagggcatgaagatagccagaggaaagaagagttacccatgatgtgatttacctgctccctatggggcagagtagcctcatctctcatcctgaaactgtaacaatttcaaggtgaatatgatagtttgtatatgtttggaccagggagtggcactaatggaggtgtgggcttgttggagtaggtgtatctctgtgggtgtgggcatacagccctgacactggatgagatctctgaagctcagagcagtgttcttagggctctgagccaatagttaggaattaggtattgtcctacaggacccatggtctctttccatggccatatctcccatgaaagaaacctttgtggtgctcttaaagcccctgcgttcccacaggaggtgtcagggaaacacacccattcataaccgggtgagcggagacgtgaaaccaaaccacagactcttccgagccaggcacatgaggaaggacacggccagaaagctgtgatgggagccaggctcgagactggattcactgtagtttacagcctcgaggcacaggaagttttacttgttattgaataacctctctctatccgttattgcctgaagtgtaatgcatacacatttcttttttaagcagctactatgaacagctgcagaaatgaatgggatgtggaccctaccctcctggtctgtagtccaggcaggatagggccgagagattggtggtaggtgtgaggtggataggctctcatagagaagtggctctagaagcctcacatcaaggggagtagaggtaactgaagcactctgggtaaagagaggatgtgcacagaggtcttcgcttacatgaagaactgctgtgtctagagttggagagctggttaggagcgagatgaggcagaaggaacagaggaattggaccaccatgtacccatgagttggggctgaagccagggaaggatacagaagtcccagaagaggagcataatcctaacaggattcagcaagctacgccccagggcctggggtataggatattggggtggtaaggggcctttggtctcctgcactcaaaaacagcatgttccacctggagctttgagcctgtttctcttcccatcatctaaattccgactttcctggcaaaggtctgaggcatagataccaactgtcttgagagtatggggatagacctggggggggtggggagaggggctgctggggttatcaccattatggtgcccctggtttcaccagggagttttagatagagctttggtctctcacacatcgttagagggaattttagatagagctttggtctctcacacatcggtagaacctagctgtcatgttctatgccctcactgtaggaagctgaagcacagccatataggaagcatgcctgcaatggctgggcagactgtggagtttgtgtcttatggcagtagatggatgtgctagagacatggctctctctttaagagtgtttattgctcttacagaggactcaagttcagttcccagctcacagctgactataacttcaactctgcctggcgtggtggcgaaagcctttaatcccagcaatcgggaggcagaagcaggcagatttctgagttcgaggccagcctggtctacaaagtgagttccaggacagtcagggctacacagagaaaccctgtctcgaaaaaacaaaaaacaaacaaacaaacaaaaaacttcaactccatggtattagacaccctcttcctgcctctttggacacctctattcatgcctgtccccctccctgtgtcaacacacacacacacacacacacacacacacacacactaatgtctttaaaagaaagtagagtatgataggagtttggccagattagatcagacttaaagcaaataaaagcaggtctattgggaggcagctattagtggggcttactgatctcacaggtggaggtcagtgacatcacacatctgggctaaagcaaggcgtctttatagagcttaggcgaggagtgatgacgtaccagctgggacctaggatggtgtccatatatggtcaaaactgagcacctagggaggcattctcagttgggttgcgggaaactcggagatgagaaatgatgctgttttagcccggagttttctctaaacggagggattggaggcagcggagttttctctgtgtgggcggggctaagggaaggaaggcagatgggggtttctcaggcctgtgcaggggatgagccgggcttccagccaaagagaggagaaaatgttggagtgtgtgggttatccagaatggccagggataatggctttgtctgcccaagatcatggatttagatggcattttcctcctgttttgccttttgagacagggactcactaagaagcccaggcagggctcaacctggcaaccttccacttcaacctccccagtggctggcattacatgtgtttgccactctgtcccggttggatgtcacttttctctgcataggacatgtgttcctgaaggtctgttgtcacttagccatccaactcttgaatgaaaactctgagatttaataggcttgagcctggttctaagacatgccatccacaaatacccggaaacagggatgaaattgtcccagagttttccatgaaacagagctgtcaattccattcatataaagatctgactgcctgtctgggtaccctcagcacctaagagggcatcagatgtgagcacaagaagagaaatagaaagtaaagtacttggtgacagttgagatgaaagccttttcatttctttttgacgtatcccaccatgcatagtggaccacctgaaggctttcttaacagccaacccccattaaaagttaaggtccttgaaaagaccacggctggacagtggtgacgcatgcctctactcccagcactcaagaggcagagacaggctgatccctgtgagttcgaggacagccatggccacacagagatcccatcttgaaaaacaaaacaaaacaccttggaatatttgcaaagcccaaaccattttcagccatggaattatactctggctgtaagcttggtcatgctgctttcatggggatttggagagtgtgtttccctaaaccacttcctggctggaagatagctcgctccatccataaaggaccagcttgtagagaggaccacccacctcaagagcatccatacttagaaacaaagtgtactccttctcaaatgtggtcggaatcatcaactacagaacagaagtgagatttttcttctttattgggcacctactatgtactaggtaccctatttatcgagcacctactatgcactaggtcccttacaaagttcagccattaagtgcactgactattcttccagaggacctgggttcagttcccagtacccacacagaggatcattaccatctggaactccagtcctaggggatccaataccttcttctggtctccatgggcaccagccatgcactggatacaaacacatatacacgggcataacaccctactcaaaaaattaaaaaattaataaaggtctcagtgtacacaaagattctgtgacatcttaacctgctgtatcactatggatgggtatttagtttctatatgactttgtctcttcagcttaaaaatggagaaatgactgctgccctgagttcatatgtatttccctgattcaaaaagtgtctggtgagccaggtgtggcagatgacacacctttaattttagcactcaggaggtagaggcaggggaatatctgtgagtttggggccagtctggcctacataatgagttccaggatggtcaaaggctttataggaagagatcctgactctaaataaataaataaataaataagtgcctgggatatatcgagcagtcagcaagtgagtcagagccaccttgctctcagaacaattttgagaagtaaatatgtccgtgcggcctctggaaaagcaccgagtctgagcttggaaagcattgctccagactcaagctttagggaaaacttaaaactacaagacccagacgtatggaaaccactcacctgagggcaaagcaaaacctaaatggtggagaaaaaaacacttggtggtggctcccaagctctgtattctgtcattttgactaatgtcctttgtcttcatggccagtatatcttggggaacctggcctagctcaaagatgaaatgacttggaaattctcttgtgttttgttgttgtatgtatatatgtttgttttcctgtgtgttgcagctggggatgggagggagtctgctacccaaagaactgaccccatttcttggttagatgcacacaaagtattgagggcgccttttgtgcacatacacagcaggcatccatctcaatgaagaacttcacagacagccctccccactgttgagatcatggtggatacactccagcttctccctggatggtagagaataaggatccttagcagggcactgaaggagaatggaggcagtaaccatagcaaccagaagggttgatagcatgcacacattgaactacccatccccccgagatgcttgcctaataaaattttatttggtggtattttccttggctttcaaatacagccagacataggaggtttctgcgtcagtctctccagtggggatgtgatgacaaggaccattgtcctaataaccagactgaagcaaatgactgacttatctaaagaacactgccacagagcctcaacatctttccatctcagccctgccttctcgaagatttttgcaggttattgcatctcctgccattaaatactagactcaccatggcagggcagacttgtcactgtgaaaagaaccaaattttgaagctgtgcggtggtgactttgttttctgtaagcatgcactctttcctcctccccaagctttcccttatcctgcatactctttccctgctttgatgcaagccacccgggggaaccagaggtggatgcagatgccctgcttgttctcataaacagctacacacgggaaaactcagtctttttgtttgtccccagtggccagaggccacccctaccctctgagccaaaagtgaagcttgggtaaaacatggaatgagcataaatcatagttcattcctacgggacggaattcataagactcccagatttcatgaacctcggtccttgacccccttccaggtggtctcaatctgagcatgacgagctgggtggatgccatggacaccacacccaggtccctcctgtgccaatgagtagaacatgctgccgtgatgaacccattgcctcctcaggttcacagaatctccgtggcctcctctccccaatccttaaccaatagggttgtagtatacagaagcttagccccttaagtacagattaactagatggcacagttgatatcgctcaagttcttgtgagcctccaagacctaggaccacagccttgcccaggctgcttccctggttcttatgaagccatccaattgctgagactcaggttctacatcctcagagcctgcatagaaatgcttagaagtcacacatcgtgcctacttgaatactccttcctctcctggatatgcagaagtcttttgtagaactctgaatttcagaaagaaatataatccagttgacttatgggttatggtgggacgttgcatgtgggctttttatttgtcttagaaatggaggggtgtggtaggggaggctccttcaggtaagttcacgggacttggattgtaggattgcctcctggtgcttattcccagggactttgggactgtccagatccacaggatacaggaaaaggaccacccttgtgggagatgctgctgccatgggagggagcacaggtgcccactactgggaaccatcagctttgcccggagcctcagacattttcttcagaaaactttctatcgtgatgaggtttgaacaaggaggcaatggcactgtctccattagtagctatttttcttcaagggggaaaaagaacaaattttaaaaaggtttttttttttttgaatatttttcctctagtatggaaacatgcaaaccatctgacctcctaaaccaaaagcgagagacttctcagttgtattcctcttgctcccagggttcaggaagagtggggcttgttaaagcaggggtgcttaaattggggtaaagagggccagctctaattgctgactccttgtagttacacacgccttttagaaattccttctcgaccagcggtggtggctcacgcctttaatcccagtgctcaggagacagaggcaggcagatctctgtgggttggaggccagccttgtctagagtgagttacaggacagccaggcctgcttgagaattcctgttgggggtggggagaaaagaaaaaagagtcccctccccctcatctttcttcccagcatccatggctgggcacgccctccccacctcctctccctccattgggcacgccctccccacctcctctccttccattgggcgcgccctccccacctcctctccctccattgggcacgccctccccacctcctctccttccattgggcgcgccctccccacctcctctccctccattgggcgcgccctccccacctcctctccttccattgggcacgccctccccacctcctctccctccatcacagcctcgcctcctccaaacagtcttcacggtcacttcccacggagcaggcgcctccttagtctgagccccatgccctgttgtgatccacgctggaattcctagcgtctgtgagctgagacaggaaaataatcgcatcttggttttcattgacatcaaagagaaagttagtattttatccaaatgtggctgcggcaccctcgacagtgacgtgagcaggaattggaaccttgtcacacacagaaaggactggtgtcctgagataatactgtagatattttgaaacgccgtttgtccctacctgagagttgtggttgtcaaatccattcccacatcttatcatttactgtgttattttaggaagcataatggggctagatcacacatttgttcaatatggtttatcatgtttttttttttttttttttttttgcatgcttgacttcattatcctactttgagtttcatggttattttaagaagggtccttttgggtcactacactgccaacaggatgtagcagcacaaaaccaggttagaaatgtgtcctagacattttccctgcacatgggtaaatatttgacgtgagaaaagcacattcagggtagctgggagacagccacagtattgtaatatctagaaccgggtcttctctggaaggttcagtcatttcttagtaatgtatagccaaacttaaaagccacagtacttccccggtggctcccagcaacacctatggtgacatctatactcatttttggttttcattaaggacacagggaattccaccagagcgcctgtgggctcaaagaggagagaattgctatggtggcacgtaagggcagccacactgtggacatgtggtggggccacctgtgtggctagagttgcctagcatgtacctgtcacactgcagagcctcggggacccagagaccaggggggaggaaagagcttgtggctcaagctcccatgtggctgcctcacctcacagcaggaaagacatacaattagggaagcttgtcattcattttagcctgttgtgattgacgtcacccatcggtgatatcattgtgccctgagagagttacttgtcaaaggcatcatggtcttttttagtcatcaggcaacatgcttatccaagcagtgcaagtgtgtctgacagtgtggcgtggctatgagcctttgactgagacaggcatcctacatgggcccctcctccctcaaggcaggagtcctccaaacagccaaatcttgagaactcccctgcctctgacccatccccccaccaaagcattcagtccttaatccagtggttacagggagtgaacctgattcatcccagatgtcccaagacttcatgattacagtaactcctaaggtaaaagctgaggagctctgaacttctgttatcagggaaccagtattgctttcagcagttatacagatgggacaagaagctcttgagccatttagagggaccaggagacagggttgggggtgggttgcctcctctggcttgctgtgtttcctcgatagaagaaacaaggttgttggagcaagtcctggcttgaccattactgagtagccgaatgagctggtgctagggcagagtcctcagggatgtgagcacattacagtaatgtggacaggctgtccttctctgtccctttcatgtctcctcagttaatgcctttactttcactattcagacataatactggaacagatgggtttaatatgaggaagggaaaaagtatttctaccttggtataaatggactttcagctcagatattcagtcttaggagccatcttcctgacacactgccaaggatcagtgagatgccttacagagccctcgattccagctggagctaattaccatgagggtccattccacgagactggaaaggattaacagagcatggccagatgcatagcccagcccattctgtgcagcatagcccacggctggagaaagttcgaatttacatatgtacatggtatagtctatttaatgatagtggtttgggtttatgcattgttgaggatataaaagtcataaatatggccaggtagtggtctttaaaggcgcatgcctttagtcccagcacttaagatgcagaggcaggcgaatctctgagttcaaggctagcctgatctacagagtgagttctaggacagccagaacttcacagagaaaccctgtctcaaaacaagaaaaacaaattcataagtatgaaagctgtattcatcctccattatctttaaagtatatgtctcagaaactagtagaaaatgcctgaaactataataaaataaggtttaaaataaaatttaaaccttataaatcatatatatatatacacatatatatgaatgatgtattagagtgacctacaggttatggtccaactattccaacagtggctatatcccaatagaaagtccaagaatccaatatttgttcagtccacaagtccatatgtctcagctggtcttgtcttcagtatatgccagagtcttgaacaagaatgctctaatgtcagtgaaggtcagtgagagaggtggcacacaaagaccaaaggcttccttcctcctggccctttataggcatggcccagatctaaggtgggtcttcctacctcaaaaaaatctggatttagggtgtgtcttcccgccttaaattattcaatcaagaaaaatccttcacaggtgtacccagatgttttgattttagattttagtccagatgtagtcaagttgacaaccacgaatagctgtcacataaaccatgttttctttctatatgcacaagttagacaggtaaattactaacaatagaccagagtaactataataatatgctacaataaaaacgttattattataggattagtattgatgtcctatttaaggctgttttatgtagaacatgaaaattgacacttgaagacacagactgacagtgaagccctgcctcccagccagcaacattgtgacttgaatgtgaagtgtcccccacaggcctaaatattcgaatgctcagtccccagctggtgccagtgctggggagattatggaacctttataaaacctttaggtgcgtagccttgcacaggggcaggcttcagggattatagctctatcttatttctggttgttactctctcagctcccagtgtgatctcatgctgggacatagagacagtcagatccctggaactcaatggccaggcagatcagccaactcagtgagttctaggccagttggagaccctgtctcaaaaagcaaggtagatggctcccggggaatggatgacatctaaggttgacctctgactgccatcctacaaacacacgtacatgcactacttaaatatacaaacaagagaagggaactatgatacctgggaggtacccttgtggaagtcatccatggaccacagaggttaaaggttatgtgttatccagagcctggggctccttccagaggagcctggatccctctttttcagaagtaacaggattaactagtgtctgcatcttcctagtgacaggtttccccccagacagaatccttgctacctagatcccttttctcccagtcctgagtttctggccttgttcctgatatcagaaactgcatctcttccacccatcaatgttgcttggaatgggtaccacctcccactgctacaacaccctcatccagggactgtctggagtcagtgcacagatattccttatcccaaatgggataacttgaggctgtgcttttcaaggtcccaggcacccagagaggtcactggcttcatgccacgaccctcaccgttgcctacttcttagtatagccttccctgtgtgagttttggagatctctcctgaaatactacttgcttcaaacctgtctctttttagggtagcccatgctaagatgttcctgttctcccaaagctctaaggctcaccttcttatcacatgtgtcaagtggtagtctcttgcctgacgggtaagccttggacatcagatttaagtaaaatttaaaaattacattgtgggggaaatccacttggatgcgttcttgtcttgccatttctcaacacttacaaggctacttaagatattttgtaactttttcatgcaccatattttggtcatattctttctactcccccagccccctccctacccaccccacttaataatttacaagagggttttgaagaaattggcactatcactgtggtttttctttttggtattgggattaaacctaaagccttacatatgctaggtaagctttctacccctcagccacatctccaggcttcagtgaggggtgtgtgtgtgtgtgtgtgtatgtgtgtgtgtgtatgtgtgtgtgtgtgtatgtgtgtgtgtatgtgtgtgtgtgtatgtgtgtgtgtgtgtatgtgtgtgtgtgtatgtgtgtgtgtgtgtatgtgtgtgtgtatgtgtgtgtgtgtatgtgtgtgtgtgtatgtgtgtgtgtgtatgtgtgtgtgtgtgtgtgtgtgtgtgtgtgtgtgtgtgtgtgtatgtgtgtgtgtagtgtgtgtgtgtgtgagtaaccaatctgatttacatgagtataattgactgggacgtacttagtggttgtgcagttagcatctttcacttacccgttgatgctggtagcaagaggaaagcatgatctctggcatgtagcttttacttccacgtaagatcacagctgagatctttaggaacattgaaaaatatccagtgatggaaaaaatccatcaccaacgtccttcagcctcctcaggttcttcctgttgaatctttagaacaacttatctggaaagaagtggagttttcatccatgaggattcagcataagtcgttgatatatgcatcaagtccaccccagtaaggaactttggatggtcttcatgctggatggaaggaatgaggccgaaaaataagtgtagcaaaaaatctgggacttcacacaactcccagttggctaccagtactgcctgacattgggaacagtgaatgaattcatgctaaagaattagggaccccataatacattccgaaggtagctgctttaacatgtcttagtagggctgcagagaacgctgactgatcttctggaggtcccaggttcaattccaagcaatcacgtggtcacaattgtctgtgactctagttccaggggatctgacatcctcttctggcctccacgggcactaggtgtgcacacagcacacacagaggcaggcaggcaaaatacccacacagaacaaacgatgcaaagatatattaaagaggaattttcaataaaaaaaaaataagcaatgtgtgtccatcgagctatgaaagtgtagaagatgaggcttacggaaagggtgcgattcaaatcttttggtggctgttaatgatccctttcattagaaagggcagcgaagggcctgtgtgcaaaggagcatgacccacttaaaaggctgcacaagcaaattagaattaatgggaaaatctatcagaggataaaattccttgaaaattagaaagattgttcttcaataaataaacaagcacccatggaatgtctggcacacaaactgtgcacgattgttttaaactcttggcaggcgtgtctgcgcagcaggtcttcacagaggcctgttctatttgaacgtcattaaaagaacctttctcgccagagcccttcctgatatgatgggctttattatacaagagtggcagcatggatggctaaggacatttgacactagctctagctcagacccagcagggctgggtgacctccgctgattgggtcctctctcagactcagcttctccctccggaaaatgtccagattaagctgatggtctgctgcctgcttcggggtgcttgtctgccgttcagtgagggctcatagaactccctcaggagaggccagcctctgacaccccactgaaagattaaacgaccaacacatcaggtccaggccgatcttcctaattgtcagggaattatatccccttagaaacttgtgctggaaccaattctgaccctgggagtgtaaggatgagcagacggaaacaaaggctccttcctggtccctctgtcacaccccatggtggagacatggtccccagtaccagattagtatgcaagatctaccagtagtctcatgtacaaaagaataattctccctcccagagctagcgattaactgccaacagccacccctggcctagagagaacctccccaacctatgctggaatttaggttggattgatcttgttcactcagccacagcttgagcgacataagtgccacaccatgccaagtctaaaagtttgtgtttcacagccctggccctcccctttcacacatggacagtgacaagtaggcttcgtgggtggggtggtttgtatgcacttggtccccggagactcatatatttgaatgtttggtcctcagtttgtggaagtgtttgggaaggattgggaagtgtggactttttgaaggaagtaagtcagttggggtgggctttgaggtttcaaaaccccacagcattccccagttagcgtgtctctgtctctgtctctctctgtctctccctacctctggctcgtttgtctgtgtgtctgtgtctctgtatgtctctctctctctctctctctctctctctctctctctctctgtgtgtgtgtgtgtgtgtgtgtgtgtgtgtgtgtgtgtgtgtgattttggattagatgtaagctctcagctactgctctagtgcttgcctgttgccatgctcccagccatgatggtcaaggactcaaaccctctggcactgtgagctccaattaaactctttcttttacaagttgccctggtcatggtgttttatcacagcaaaagaaaagtaactgaggcagtgagttattagaaagatggggtggattatgaagttggatggggagtcagaaggaaaaattggaggtataaatgaccatgtttaattgtatatatgcatgaaaattcttttaaattaattttaaaaattagtgtgaggctaccttggcaaagttctgagaagagctaatgagaattcatggggctggtaagctcactctaaggatgtgtgtcattcacaggaggagaccaggaaggacctctgcactatggcagatgggacagaaaggacgctggtggcagtggcaaggagtaggctctggaggcagcggaggctcttgcttctcctccagcctccagctctctgcctcacgatttcctcagctctaaaggaggctctcccgtccagtcctgtgagccctccaaaaggcttgtttgacagtacccggtcccatgctagcaaactgtattttcgtttcatttctaagaataacttagggagcagcaacctactgttttggttatagagttttagctttagagaaagaatgaaaacaactccaaggtttctttttcaaagttttgagtccacattctaccctggaaggtgcctggcttcccttaatcacaaagcccgctggaatcacttgactatgaaaacccaggcatgaccttactgcatggttaagtggcagaggcccgtggtgggcctggcaggagttcaggtgtttctggcctgattcctgggaatttacacatgagagaaaagactaacctcgtgaactacaacactgagaaagaggcggcagctctggcccgtgatgctgtgtccacctatgtggtctctctgcttaatattccacagtgactggtcactctgaggtctctggccctgtgtgaacatgtatgcaggtccttcccctgatcaagctaggttaatgctgtcccatactcaaggtctggccgttctcctttcatgttacaaaagcaaatgggaacagaaataacccatcagttgtttagacccagagtggccaacaataataaataatcagcagcagaaaggctgaggtcaaggtcttcattcattggagtccattcaagaattcgtaactctctcctctgagttaatttttcacatcttgtttggatcctcggagttcttgcttccaaagcaaggccatccgatttcttgtttcacatgtttttcttgttggcgtgccagacgtgctagacagcggggcttctttctgcagatggataatgacggttcctcccccccacccccatgaaatttgtatttcaaagagtcatagccggtcgagtgtttgaatggtcctcttcccttgcacgctgtattaactatgttaattgctgtggacaacaaaacatatgccagtgaacttaaatctcatttattggaaagatacaagccggttctgacgaggcttaaaagagggttggaggcgggcgtacaagttcaacaggaaacaagggaggcaaggtgtagctcaaggaagtgacttctgggtcttcaaacctcctgtggccaactccgatgaccacaggaccgtaatgctcttgtgaaaccctcaaaactcagagctgtcgatgggagcgttagtcaccaacataaggccacttgaacatctgtagatcatgggaatgtgtaatcaggggcccacagcttaaagactagaggggttagctgccccttctcatctgtcatggggttgcctgagccaaggagctgaaagagatgactgtccattgcacgaggactcccaggcttctccacatcttcctctaatgagctggccagttagagactggccactgcagtgacttcattttgcccagagcttatagcttatagataacttatctctgttatcaccttcatctcatcattaccatccttggccgattcaccccgcctccggctcttctgccattgccatactcccaaacaccctccccttctctccctgtctttgactggtccactttcgatgccaaggacaaaccgctaccagaggagtctggattccccacccacactcagtggctacgcctcacgctctgttcattcagccacagctgtccacatgttcaccaggccccaccagcaactgttccctgtcacgtgtccatccattgtgctttctctgatggcactttcccacgcacgtacagatacactgcgataattaccatcttcaaaaaaatcatgtccacagtccacttccccagtagcacatatcctgtttgtctactccattttactgaaagaaacacctccagatgcccctctgtgctcacctccagatccccctctgtgctcacctccagatccccctctgtgctcacctccaggtccccctctgtgctcacctccagatccccctctgtgctcacctccagatccccctctgtgctcacctccagatcccactctgtactcacctccagatccccctctgtgttcacctccagatcccactctgtgctcacctccagatccccctctgtactcacctccagatccccctctgtgctcacctccagatccccctgtgctcacctccaggtccccctgtactcacctccaaatgcccctctgtgctcacctccagatccccctctgtgctcacctccagatccccctgtgctcacctccagatccccctctgtgctcacctccagatccccccccccgtactcacctccagatccccctctgtgctcacctccagatccccctctgtgctcacctccagatctccctgtgctcacctccaggtccccccctgtactcacctccagatccccctctgtgctcacctccagatccccctctgtgctcacctccagatccccctctgtgctcacctccagatccccccctgtgctcacctccagatccccctctgtgctcacctccagatccccctctgtgctcacctccagatccccctctgtgctcacctccagatccccctgtgctcacctgcagatacccctctgtgctcacctccagatccccctctgtgctctctgttctaatatcattccctccctccaatccagctttcaaccatgacttgctctgtctatgtcaacgctgcttcaactgtgggtcacaacctgatacaggggtttatagctgaatgtggggattgcaagacctggcagtggtgggtgtctgaactcactatacctaaaacctaactcagaaataaggtactctggcagccctcacccacgctgtgctgcctaatgtcctctagtcccgccagtgtgaacctggcaccatgcatgcactcaccctccaggtgcagaattctacctgagcgttcgttcacgatcacagggccactctttcttacagactgcatctgcctgggtgtccacactcacagggccactcttacagactgcagcacttttactgtacacaccacgttttctgcatgaaacaaaatgatttcattataagaaataaagatttgtaataatcttctaccatcattattatatatcaattgagtatatattttaagctatttaaacagtatgttttaccctttgagtctttcacacttgcatacaatgtatcgagttactcctttctttctctcaatcttgtaaacccgcctatagtgcccagctcctcccagttttattttctcttttttaatgacccgctgaatcgaatttatggcggaatacccatgagttacgggcagcacgagttagcatgtatatggattgttgtgctgctcaggtaaccacagccatgtcttaagtataaaaacttgcttcagccttcgaaaaacattcaatttatatgtataccaaaaactatcttaaaatatagctattatttgtcaccagtaaatatttgatctatctacttgttttaaatacttatttatccagggtcaggtaaaaatttgtcagacattgtactggctagttttgtgtcaacttgacacagctggagttatcacagagaaaggagcttcagttgaggaaatgcctccatgagatccagctgtaaggcattttctcaattagtgatgaagggggaaaggcccctgtgggtgggaccatctctgggctagtagtcttggttcttaagagagcaggctgagcaagccagtaaagaacatccctccatggcttctgcatcagctcctgctttctgacctgcttgagttccagtcctgacatcctttggtgatgaatagcaatgtggaagtgtaagcccaataaaccctttcctccccaacttgcttcttggtcatgatgtttgtgcaggaatagaaaccctgactaagacagacatggtactcatcggttttaattgtcaacttgatatcatttagaatcagctgggaagaacgtgccagtgagggtttgtctagatcaggctggtctgttggcgtgtctgtgggggattatcttgactatattaatcaagatgggaagacctggcccactgttcaaggtgctattatctggatgtaggttctggtataaggggagattctgagctgaataataaccatgcatgcatttcatatctctctgctgttaactggggacatggtgtgtgctcttttaagttttttgcctgtaacctggaattgtgatctgaaataaacggtcggtcctataagtggctttttggggatattttatcacagcaataggaatgaaactcggataggcataagagaaacaagcagaatgaaccttagaagccctgctctatgtgactatcaccagtaatcagttctaattcctcatgctattttgacctatctgccatgctggacaaccctgacatcctcccttggagaaggccacacatggccattctgtgccatcaccctggtttcttcctacatgcctagcaatacccatttcctcctggcttcagattctaaatgagaaagctctcctccttctccactcatcccctgggtccttcgtgtttatcccagaggtagatctgcagcccaaatgcctcctgtatgccccagctccagtatcaacaagtatgtctcctacaaaatgcaacagtatcttcttgtctcctccttctctgcccacagtctttcccacctcagtaaatggcagccctaaatgcagctgtcggacccccaagccctggagctacccttggctgctcccctgttaacatccctcatctaacgcatgacgttacagttggcacaaccttcgaaacatatctccactgtgcactttgtactataatagctggccctgcctggcctgacctttcacctgcaggcgactccttataaacttctcccaagagtgctctgtagactatctacattgcatgtagtaggagcctcttcctgatatgggccccaagagtcactgcttctcagctgagagcaggtcagggctcccgtccatatcacatctacactaaggtgtccatggtgatactccaggacctacagactctgccagctccattttcttttcctcatggagttcatctcccctcaacccactcagtcctctctggcctccattctcttccttgaacatgccagatctgtgcctatcacagggcaagcccttggtaaggcctccattctgtgtgtcctgttctccttctcccaagtttctagcgagagtttgactcctcagtgaggctccctcccagactactgtattgggaattgcagcccactcctccaaaccacttcctaccctccaaggttatgtgtattcacttagtgtgagcattttccatgtccctgaagttttggtgtgaacattttctatgtccctgaagttacatgctacttcatgtgagcattttctatctccctcatgttacatgctactgttgccggtgtcttgctttcttttcctgttgttaagataaaaactctctaaccaaagaagcttgagggagaaggggttgattttggctagcacttccagattatggtcagtcatgacaggaagtctcagcagcaagctttagagagatggctcattgcatctgcattaagaagcagaggggggtctgaaatccctccccagggaagagttccacccacagtgaagacatcttcccacctcagttaacaccccacacaggcgtgtccagaggtcatctcccaggcagttccagattctgtcccatggactattaacactaaccttttcatccagcccaggatgagaaaaacacagggttcgctcaaaagagcggaatgaatgaatttcacgtaaagctttttcaatgtcttcagcttttcaagtttggtgtgtagactttcttacgagccactcaacaatctagtaagttcaaaacatagaacccccttgttatgggggggaaaggcccacgggtactgatatcctgtggccttgtgcctagtgaatggggctcctgagtgtcacagctgtgctcctgtttccctgacacctccacactaccgcctggcactcctgtcacattactgtaagggtaaggagagtaaccaatgtttggtttcctttgcagtgttgacgagaaaaccccacacctggctttgggggctgtgaagaatatctctctaaacatctccatctccaaccttggagacgacgcctatgatgccaacgtgtcctttaatgtctccagggaactcttcttcatcaacatgtggcagaaggtaaggagccgtttcccatctgagctgcttgctgacatgtttcgtagcaaagacggggcaatgagtctgcaaacgtcattccttcataagagcttggaattactagagattggctttcatcctggcctgagaaggttgctggtacagccaagcagcagccataaatacataccttggagaatatctatcctatgccctgctccatccctttcctctgagcagctacaactgttagcgccattatacacatgttctatagaacttcagttttgtgtcagtggttgttaaagacaagtataaacggatccctgatcgtcgtgatcgctatcactaacaacacactctgtgctctctgtcacaaggtcatctgtgtcagctgataccttgctgtatttatatatgtattcctgccatattcaagggaattgagaaaattggaagattatatgaaatgagtgagctttagtagagccgattagtttattcaagtgatagcatgactccaaaagaaaaagggaactaagctagtgctttctctttcccctgatgccctgcaatgcaaccaccgctgtgagagaggagggcaggccctgggcaggatagaccctgttctaaggccctgggcaggacagaccctgttctaaggccctgggcaggacagaccctgttctaaggccctgggcaggatagaccctgttctaaggccctgggcagcatagaccctgctctacccggttgttgcaaccagttatttggacgtttgcaattttttccctgtaaacagtgctgagcccactgagctggtgttcatgtggaccttagtcactttatgatgaaaaccttcaccctggtcctcagcacacgggcaccccacgatgcacatttgtgcaggtgaactgcccattgaggttatgggagacagggggagttagtcatgaattctagtcgaaggctgtggtcactagaggacagtgtacttgagaaggtcacaagactgagtctgtagctatcatagtggccatggggacagtgagtgtgcctcagcttggtctctttactactgagccataacctatagcctagagacccctgggtctcatcctggcagaaagctggcacgatatcatggtgcctcatggtgactgtgaacacgagtgggattggaaccgggcatagagacaccacactgctttggaccatcccggagagcagaccagtgacagaaataaggatgcccctcctgtgacaatcatacttcaaggttctgctagggatataaacagtttgcaatctaactgcacctagacggtaggtagtgataggtgaccaagggacctcacctgttctgtagcatgggcgatacatggcccatgtactaggccctgtaggagtcttacaaaaaagttctaaagcacaaaaccaagaaaagcctaattcaagatgaaataacatttaaaagcttattatcagagaaaaaatacattgttcagagtatattgtccttagtatcccgctttaccgagagggtaacctcaggagacccttgtgagggagtgaggaagctaagacaacgaagaaaggaagagtgaccataggggaggggccacttggtcttctcagatctctgagaacctcagatctgttcctctcaaggttgaggagggtgctagagaattttcccacaagcttctgtcttccactctaaaaagaaagagagagagagagttcagaaattagctcttgagtatactagccttccatagctacacccctacttcctgtccaatacaacagtatagtaatgagaaataaacactagctgagacagggctggaggggcttagctatcaagaatgcttactgctcttatagaacacccacatggtggctcgaccatccgcagcaccagttccaggggattccactttgacccctctgaaattatacacacatatgcacacactcagatacgtacacatacccagaaaataaaatattttaaaaactttaagcttaaacaaaaacaaatttatagataactcgtttcagttaaacttgggtatagaacagttaccagcacagtagatacataattcagaagaataattcaaagtaagtcttctggggctggagaggtggctcagcagttagagcattgggccttcttccagaggacccaagttcaattccccatggtggcccgcaactacctgaaacccattccgagacaatctgttgcctttttctggtctctgtgggcaccaagcatgcagacagaatgcccatatataaaaaaataaaattatatatatatatatatatatatatatatatatatatatactaagccttctgatctcagcaatagcagtgacaatttaagaattagctaggttgtctccctcctcctgcctcacgatcttcaggatggagttaggactcctcagctattcccacaaagccatcctgagcctgatccttccccagacccgcagctctctgtgcctgtcgtacacacacttgaatcagtaccggttcatgactgaagccactgctacagagacagcccttcctcccaccgccattcagagaacattgccctgaaatctcagctcatgtctgtcatcttctctggcttcttgcctggctgcacaggacttgtttggatatcagttaccaaatgtgcctgttaggtcacagtcactgcaggtgacagagataaataaggtatagttcctgttcccaggatgctcccagcctcataggaatgtcatcaaataattaataattaaggtaggataccaactgccctgcagacctgctgagaagttcccatgaagtgttgataatagctactctcaggttgttaaaatcttggggaggtcatgtgcctttgaaggtgtgatctggtcccctcttgcttccttcctctctgcttctcatctgtcacaagggttgaccactccctatgccccgtgctcctggtgctgtaatgttcagcccaagtacaaggaaacaagcagccattggctgaacaggctcagggttggctcagaagagtgtgccccgagttgcatcaggcctagtatcctaagcttgtgaggattcctggccacttagtgcctcacgtgatggtaaggagtagtgtgggaagaatacctgagctttgaattcaaagactggcctcggctcatgtgtacaccttcatgggattgattcgttccagaacatggtggaaacagacaggagctcgaaagaataaactttaacctcggtgcaagggaggtctgagcctgagtttgggcaccaagggtagcacccattggccatgaaattacagaggcagctgtaccaagagcaaaggcactgtagcagagagcctttctgcactagcgcctgtcgctgtgaactaatgctcaagatggcagcttgaagaggggaattccttacgttgttgcattgtctcggacagctcagctcatggttggttgttcccatggacttgggctgaatatgttggcattaggatcacgtggcttagaaggttgtcaaccctcacgacagacatgaaacagagggtaaggaagggagagggaaccagatatcacctccaaagctaccctcaatggtaccccctctcacgaccaccttcctctagctaagtgccacttccaaatcttctaccacctcaaaaatggctaccagctgggtgccagtccttcaccacacaagtctgaggaggacattttattttctaaccatgtggtagtttgggtgtttgaacacttggtcctcagagggtggtggcttttggggaagtcgtggaaattttaggaagtgcagccttactgaaaaagtgtgccactggggacaagatttgaaggtttatatccttgtcccatttcctgcttgttctctctgcttgctgtgtgtggaagaaacaggatgagccagctccctgttcctgcttcctattgccaattccccccacccctgccatgatggactctctttctttccaaccataagtcagaattaacccttactctcttgagttgcttgaagttacggcatattaccacagtaacaaagagtgactgatacaagccacgacactcatagatccaaggtttgcaagcctgagatgccatcttgctctgtgtctccagatgccaactgggaggcaaggagctgaggacattcagtttatttggaaattgggagaggatgaagggaaagtaagctgagagaccagccaccacggtggaggaggggcttagccatggctctccggaaacagtagagaaataaatatacccgagggatgaagaagcagaagttcaggtgctccctaaggcagcagttctcaatctctgggtcatgaccccttcggggtccgatgaccctttcacaggggtcacctaagaccattgggaagcacagatatttacattacaattcataacagtagcaaaattatagttataaaatattaatgagataatcttatgattgggggtcaccacaacataaggaactgtattaaagggtcgcagcgttagaaggctgaaaccacagcttgaaggcttagggtggggccctcctgggaggccattcaccaacacgtctgaactatcatgaacatatcagcgcagcctctgtcattcaggaaactgtccctcaggtgaagagatctagatgctggcagtgggaagctggcggagcaccagacagatgtgagccacatttgcaggctccttggtacccgccactgaacctctcactttctaggctcccagaagttgtaacttagagttctggttgaagagcacttcacagttccaggagttgggcaaggcaggcgtgtgcatagatgaaggtgtccagatgtggaacagaacgtggtagactctgtgggagatgggggttctgatgtcacccgtgggtcagccacctcagcagcccagtgactgaagtagcagcgtgaaccagtgctgcgagattttatttttcaataaaacccagaatttttatgttactttggcagctaattaaaatgttttctgagtgtcgtataagccaaacaaaacatgttccctgatcacatccagcctggggccaccggcctagccttctagcctagctgttccctatgtgtgccagctccatgctctaacctgcctgtctgccacatggcttggcatttctggtcaaactttttccacatccttggtgcgtctcatatccaaccgttggccacagataaactagctaaatagctaaactagcatttggatagtgtgtgtgtgtgtgtgtgtgtgtgtgtgtgtgtgtgtgtgtgtgtgattgtgtgtatgtgattatatgtgtgattgtgtatgtgattgtgtatataagcatgtgactgtatgattatatatgtgtgattgtatgttattgtgtatgtgtgattgtatgtaagtgtattgtaattgtgtgtgagtctgtgattatatgtgtgattgtgtatgattatgtatgtgattgtgtgtgatagtgtgtggtaattgtgtgtgatgcatgtgattgtgtatgatttgtgtgattgtatgtgatcatgtatgtaattgtgtgtatgattgtctatgtgtgattgtatgtgtgtgtgtatgtgtgtgattgtctatatgtgtttaggggatgaaagggaatagaaaagtcagcccaaatgtagcacccatgtcatttttaacgctagtgacttttaggctaaagtttgttctccggagtgatggtggaggcagctgaggcagagtttatattcacacagagagtaaaatgataggcgtggagtatggcgtggagggcagtgagctgtggtggctaacacagcagagctgacatttcagctttctctctgctgatcagtgtgccctgggtccagggtaccaaagtcttcactacaatgccggggtgtgctaagaattgaacgaggcctacgccaagtatgtgtataatgtgcccctactgtggtagacccccaactcccaccatgtgcagtacacactgtagagatccatctgtcctcagtgttctgctggtccccaccttctgatagttcagcttatgatttgtctgactttatgatgatgcaaaagccagacactttcagcagaaactgtgctctgggtttgaacttggatcttttactgggataccgcacaatactcttggaatgctaggcatctgtggtgccatcttacaggaagggtcatcaaaccagaaaaattggaagatttggtgatgggaatgttggaagacgggcacatgagggaggatgggtggtcctgggctcatgggagagggccagactccacccaccacactccacacagcttgtccaagcatggccaagatgctgagagctggagttcacaacctgttgttgacagtcactgagatgggccgtggagttagtaatggctccatcttcaatcaccatgagagactgagatgaggggacagattctgtgtcctttactcctccgtgacaaagcctgatgagggtcacagtagcctatcagggaagctcatttttgcggtttctgagaagtgaatggtttgaatatctaatcaggctgggtctccaagctgggctttggggtctttgtaaactaccagctcggctttcttttttatagcaagtggcatcaaggactggagagattgttttttctgtaaagtgagtcttcccactaatgtctacctctaccgcagaatgggtattctgtttctctcaggaatctctcttctcactttcaaggcaagccgattaagacggcgccagatgataaactgaccagctttctagctgatctgaggaaggatgtggacccttgacgtgttttcatagctttatatccgagggagtagctgacctttcctcgggcagaaggctcaatgcaggaacccggcatggctgtgcatgtgaacacagagagatgtgtcagtggcgctgaggagtcaggcattgccagggctgaagtacacctatccttctgtacgcgagcgaaagcacaaatccttcctcagtagccgctcccatagcagcagacttcattcccgttgtgctccgctatctccggtgtctcttatcaagttaatagacgcccccagtaaaacgcaatcctcagatgtttatagtcaccgtggcctggccattaaaatgatgaatgaactcactgctcaccttgtaagagagccctgcaggggaaatcaatccttagaacatagtaagtcttttccgctccttgcctgcctttaatctcgtgccctgagcaccctggtgactttaccttgaacttcctgcgtgatgccaggcagtggttctcacctggccctggtccaggtactgctcttaccctgcatcctcccggtgctcacttcctgtttcagttgcttctgagggccctaccgtttatccataataggctaagagaaagtggagaggagcaggtaccacaccccacccccgaccctgaggccagggtggtaatcctccagtaccatacctgtcactcctgcctgagcgccggcaccagagaggtagcaactggactgaaggcccctaagatggctggcccttctggtgtccaggaagagatggagaaccccaggtgtccgtttctaatcacagcgtggcctgtgttccgaggcaaagctcagctttcattggcatgaaaagcttcatttgtgtattcatggcatctgaagggaaggctgcagtctagctagagaaatatcaataaagctataactgcggcaagactcggtttagactacttcccaccaccgtgccacgggcatatctgtgagagggatttagaaagtgcacattaaaacgtctggaccctgccttcagggtctagatgcttcttcttcttctaaaagagaaaggtggagcctgcctggcttttaaatctttttcgccagacaacagagtacctttagggagagaagggaggaaggaggaagtgaaggagggaggaaagcaagccatgaaaggaaattgctaaactgagacaaaagacaacataaaaaaataaataaaacattagaaactaaatctgggagatggcctggtgggtaaaacagttgctgagcaagcctggcgatctagtttgggtctccagagcccgaatgtcagtggaaggggagaacagattccatccacaaaattagcttctgacctcacatcacacacacgcacacgcacacgcacatgcacacgcacacgcacacgcacacgcacacacacacacatcatgcacacatagtaatgaggagtacggagcctggctgtgtgcttaagagagcttgctgttcttgcagagaaccaaagttctgtccccagcacccacatcaggcagcccccaatgacctgcaactccagctccaagggctctgactccccctgctggcctgcatgtgcatctacactcaggtgttcacacacaatttgaaaagaataaaatttttggaagtcagaaaaaaagttggtagttcctgaggggtgtgtctgtccacaggagagatgctcatggtgaaacagggcagggcacaatctcaggcaagggcccccaaaccttagctctcagcttgatcttgcagggaaagcaccagctccattccctcccgtcttaaaggaagttacacttctgacctacaaacagctggtttagagccactttggaaactgttaaaacctgcagtcctttctaccccagaggatgtgatgtggacaggatgggcccaggaatcaaaagcaagtctcaaaagatggaagccattgtggacaacagggagcccacataaacttgctggtgggcatataaactagctagcccagcctctatggagatcagtgtggatggaggtttctcagaaagtagacacagatccactagatctaatgtataactcaggcctacatgacccctggtgttcacccaaaggtgtccatgtcaacgaatcacagggatagcgcatccatgtttactgcaacactgttcataacagacaagatgctgagccagcctagctgtccagcaagagagaaatagatagagaaaatgtggtttttatacacatggaatgcttttcagccataggaatgaagtcatgccatttgcaagaaactggatgcaactggaaacaataatattaagcaaattaagccaatatggaaaaaaagcttctctctcatttgtgattcctatggttttttttcttcttacatctcttcatttttttaaatcttaaactccagattttattcccctcccatgttcctatgttttgtatagtcacagggaatgaggtatgtatatattaaatgaaaggggaagtgagaatgtcaaagggaacaaaggggctgagggtaggaaaatgggggaaatgcagagaatgttcaacaaatgcatggaagaaatctaaatgtaaaataatggtctttgcaatggagaccttgtagcagcttagcgtgccatcaggaagcagtgacatatgttttgatagtgggcacaaagttaaggtgtgcatatgctagaaacatacaagaaatctgaaactgagagagagttttgggactccagataaaactcccaggacccacttaaggtagacaaggtggggctagggatgtggtagtgtatgtgtgtgtgggtgagcacgcgtccatgctcatatacatttccccgtgtgtgtgtgtgtgtgtgtgtgtgtgtgtgcgcgcgcgcgcgtgtgtgtgcagatacagaagcctatacagaaccctgaggttggtgacagcattctccctccaccttgcccattgagtcagggtctcccaattgaacccaatgctcatggatgtggataatctaactaattatcctgctccaaggatcctgtctctgccttctgagaactagaattacagagggccgacacacccaccctgcactaaacccaagccctcgtgctccctcccgaggcatttcctctatgcagtgaagcatcccccaatcccgcattgctcctttatttttcggtaatacctgtgactctttagaggactgactaacctcaggctgacggagctcatttagccgtggtcataaacagccacacgtgccaggacctgacagcaacctcaggctgctggtgctgaggcagcaaagcccagcacacaatgcaggcaatcaccgaggtgccgtctcgctctgggatttgtaacacacacacacacacacacacacacacacacacactgtatcctccctcctttttacgactgtccttcctggagacatttcatacaggttaggtttcttcattcatttgcttgtcttttgtgtgggtctttggttctttatgactcccatgtcagagtcggcttctgagtacccgagcctaaagcacatctctctccccaggcttattttattccaacagacgcatcgaaaaacctgaccaatcaaaatggctttgggggcgggagaggggagtaggttgtgtgtgacttcaatttttccccccaaatgatgctatttggtgtgtttcgcctttgtactatggcctggaggtctggaagtctaacctgttgatatttagcctgtgaggtttgacaagaacccaatctggttaagtctgaagtttttgatcaattattgctttcttttctcacaaactgtttatacttgaaatagtgctgtgtttgtgcaacctttcttttgagcttttaaggaaacaaactctgtttttaaaatttcaccccctgagcataaggactgaaatacgccgctgctataatttctaacgctttgctccgtgtgtttgtctccgtaatcataagcaagacgcatctcccagtttcctctgctgtgtgatctttgtcaggtttggatattggacttttgctagaatttttctaaaataaacagagagcctgcattctttctggtagtctgaaggcgtgtagctgatatggcttcaacactgggcaatgggaaagacagccttactgggtgctcagttttatgctacacacttcgctcggcactagttttgtgggtttttttttaacagccccacaataactcatgtccacttgtgagctttgttttcctgaggaggaaaccaacgcttaaagcaaggcacagctgccaaaactgggtactgggatccaggcactgaggagctgacttcagaggtctctgatgcatcttctttgcataaagaggctaatttgcatgtctgatggtcctgctggctgcccacctggcttgtagcagttaccctctggagagccaggtgcttagtgaatgacatctttcagattacgtcatcccccattttccttgtgtagggggtagcagacaggaagcactgatgaattttctggggcagctgtgttttctctaaacaagactctctttagtatcctggggggtactggcacagagacctaacccctaccaggctcccactagaggaagctttcctgtggtgcccatgtgttgctgcgctggattctgggagctggcacgacttccctgcctttttaaatgtcttctctggaactgatttgtcccaaggtgaactcagtgaaaggaatatcacacttaagagctttgcccctgaatgggccaggaaggtggaaaaaccacacacactgtccattttcccttctgcccgttgagttctaaacagctggaaaaagtcctaagaggtagagtcactcagcccttcgcgtgtcagacgctcgactgccttgctctatccccaagccatccatcattttcccaactcgggtccaaatattgttagggaaaagaaaaaaaaaaaaagcccctagctgtatgcccaagtcacctgtaagaggctagtggcacaccaggaacataggtgcctgatgacatggatcatgtgacaagcagagtcctattactgatacgtaacagcatctgggggctctgctagtgatagacaacagggattcccataggatagaaactcatgcttcctgtgcataggaatatatacccaatagtcaaaagcagttccaacaaagaaaagatggagtggataaaaaaaaaatggtgtcctgtttgcatggcccagagacagtaccttgatgttctacagaacttactcctccggctttaagtgctgagcttgagagtggaactgcctagcttggtctgactgctatcgccgctgctgtgctttctcatttattcaaaaagagtgaactgcacgtttaatgagtatttaaggtgtgagatgtatacacagaatagacataagctctgtggccacctcctcacaaacccagtggaggatgggtttgaagaagtgtctaggagttgtgactatggtgaacagaacaggcttgggggcccgggaaaggtgccctgggagatgttcaggaaaaagaggcactgagatgaggagggataagggccgctgtagagagggtggcacagtaggtgagcgaggggagctgagacatggctggtgtgttcggcaggggccaaacaacataggccttaggcgaacacagtgaagtgtccacagataaatggaggaaggtgtcgtgtgtgggtaacaaccttcattttgtctgaatgttggatcctatcatattcttacaaaaatgccttcaaaatgtcctaggaaatatttattataaaatcctggtccaactattagctctgaacaaggaatgggaaaaaaaaccaaaaactaaaagaaaagaaaacaaccctaagacatcgtctatagaggtcttcaaatggaggccaggggggatatcatcagaaaatgaacattaactattaaatgaatccaagctttaaatctaacctttgtcataacagaacacatgttctatccaagctgagagaagtctaaaaggtcacatctcacagaaggaacagccactcataaagggaacggtctagtgtgatcacagcgccacagttgggtcaaagttccatcctcctttgaggaacccgagtctacatagccttttcgtattgattattgaggactgatgtggaagagcctgtctcactgtgagcagtgccagtcctgggcagtggtcctgggtaggatagaaaaacaggctgattacttctctctctccctctctctctgtcactcacacacacacacacacacacacacacacacacacacatttattttttcttttgatgggaggatttgagctgggggagagggaggggaactacaggcaggctgtaatgtatgagagaggaaaaaaagttgagagagagagcgatatggctgatactccaggggaagccggccagtaagcagccctcctctgtggcttcagttcctgcctccgggttcctgcctggcttcagttcctgctctgacttccttaggttatagactatgatgtggaaatgtgagctgaaattaattctttcctccctatcctggtgtttatcacagccatagaaattctaagacaggcaggcaccaccaggtctggctcatgctaaaaatttttaaagaggaaaaaaaatctttttcacatagttttatttgcctcaaataaaaataaagacgtgctccagtagtttacaaatattaagggggcgatttcctgacaaactcccttccgttcaagtggcctctccctgacacagcacaccttcccaggcgccacatctcggaggattatgggattatgtagagccactgtactgtaagagctgatagtcacgacttacaaattaagcaccatggtttaaagcacaaccttagctatcatttgtctttagaaacagcatctcagtccctggtcacattcagcaactgatggcctgagggcacaggccaccaccaagccctcctcggacttagatttgcccacagagccttctggagggctgcagaggttcctgttacattcatgccttcacatctgctcagaagtattcttctagtgagtaccccaaaatgcttttgctcggagcatcttgacctttccttctgacacagaggaagcgggtgtcagtgctgcagcagcccagctgctccaggcaccattcctacctagctctgtcgcgtacttgcagaggccccagaacagtgaggtacttgcacctgctttagctctttttgttccgaacaatagaagagccaatctcccctcctactgagtgaacagagaaattgttgttcttcaaagtgaaagtctgaggttcgcttgccccccacccccaccccatgtttcctgttggacctctgagctttcttgcgatgtgtcctgttttggctccatgttcagacaagtctgtccccttagggtaccgagatcatagccaggtcaccatgaagaagtgctttgatttcacgaagttctagtagaaggaagtttcagagtctccctgggatgattgacataataagcctggtcacgtggtcctgggttagcaggctgcgaatgagatcaagcacccctaggctagtgggcggagcatggtgggctgggtgtctgccgcagcatctttgtcccatttaccagggaagaaattagacctcagagctggcgacacagctaagtctcacagccagtagcagccgagctggtcccttctgctgcccctgctctgcatgtcggtaaaggaagactttgtgtccacccagcccgcacccagcccgcacccagcccgcacctcagtgctgtaccatgtcagtgcctgcccagccctgccctacctgaccatcagctttggaagtgataggaaaggagcaagggccgccacgggcaggagagacaacgtctgcttctgctaagacaggagccctgtgaggagctctggtctccagacatgggagctggggcaatctgaaagtttgcatggcctctcctcgtcctgtgctgcctgtacatgaggtttaaacactgagtgctttcatggggtcagtatggagaggaggtgaatgtcttctgctgagcacacgttggggaggannnnnnnnnnnnnnnnnnnnnnnnnnnnnnnnnnnnnnnnnnnnnnnnnnnnnnnnnnnnnnnnnnnnnnnnnnnnnnnnnnnnnnnnnnnnnnnnnnnnnnnnnnnnnnnnnnnnnnnnnnnnncccaccccccaggccctgcccttatcagaggacctgttggcagctgatggctgctgagagagggacagtcactctcctttgtggctgctagtaggtttcttatggatggccacagcctacacacatgtgagcagcactaagtaatagcaaaacagtacaactaaaggcatagctctggggggtgggagggatgtggtgaggggcagtcgaggggcctggatgaggtggacggatatgagcaatacatattatataagggtgtggagcttagaataaaaatattagtttgttgttgttttgttttaattatctgctgggttgaggcctccttccctggaggccctcatctagaaggtttcagatgaaggaactgccttctgcctccaaaggaaacagaaggcagtggatggagccacacagggagggggaactcaaagagacagaaccgaaaccctctcctcagataagcaggccttcagaatgggggagcagagacctctggagtgggtggtgctttcagccctattcatgaagccatggcaggggaagaggctagacctcatgccaaggaaagctctcactggttttcccaaaaggcctgtagagcttttctgatgaaggagctgacggttggaacccagaaatggacggatacatcagttcatagctatgggtctcctgccaactgtagagaccttggtctctccacacacggtcacaccacagtttcctctgggcctaaagatgagccaggcagttgggacaccgacctggtccttcacctagaccagggtctgttccatggactcaaacgtacttgaagtggtgtctggcaggtgacactctgagcctcaggcaactctgcagcctccacagtgccaaagtggaaggaggctgcacagtggtgccataggcagcatattcactgccaagacggccttagaaggcagacctggccagaacatgcacaaggtatggagccaagctaggctggactggaatcttgatttcaggcaattgatcaccactgtggcaagctgactgacccttttcttgaggcctccttttctttatctgggcagtagaggccatgagacttacctcacagcctccagattaaataaaaaccagcttcaagaagttacaagttgggctggagagatggctcagcagttaagagcactgaatgctcttccagaggtcctgagttcaattcccagcaaccacatggtggctcacaaccatctctaatgggatccaatgcactcttctggtgtgtgactgaaggcagctacaatgtactcatataaatgaaaataaattaatatttaaaaaaaaagaagttacaggttgaacatcccttataagcccaacattcttagttcagagctgtttcagatgccagatgctttagactcagctcaacttgaacctgcagcgtcagtccatcccctcctcctctggtctcctccatgtctttactgcagagtatttaaattccactttccagcctctggtttttatgaggaggctggaagcaacctggggaaatgtgagtgccggtggcccaggagggattttacccaccagaggtaagtagtcctccagacttccccaaagcccctactctgaactgcaaaggggcacttaggcatccaatagaccagcagataaaggcctactcttgtctgtgattttcctcagaggtccagtctgggaagatacttcctatccaagggcaggaagcctcacaactacctctcagcctctgatagatgtagacttgctaagaagctcattgtgatattcaaatacagcttagaacgaccacggagaggagtttagtggggaattatctacattagtgtggtctgtggatatatgtgggaggctatccgattgccttaactgatttgaaagacacaacctgaaagtgggcagcaccagtcactagctgggggagggggggctagactgtgtaagaatagagaacgttaactgagcactaagcatgcatgcatgcatgcatccattctctctgttcttgattaagctgactgagcactaagcatgcaggcctccattctctctgctcttgattaagctggctgagcactaagcatgcatgcaggcctccattctctctgctctctaatatccatgtgatgtagtgacctgccttgagttcctgaaatgatggacagtaccctggaaattttaaactgaataaactttcttccctaagttgctttttacaagtttttaaaaacaaaacatagccacagaaataaaaccagcaaaaatgcttagagcagtgccagcctcaaatatggtcagagctcagtgtacagtagctctgccccctcagtttccaggcagtccgagcaggctgagggtctcactctgaggcagcatgaacaccataagcatctatgaccatctacgggtgaaaaagccaaatatatttgagaacaatattctgggtcctctctggatcctgatagccacaacagaacctaaatattaaatccaggattgccaggttctcaatttctccccctgaaaaatactgtagagaaaaaaaggggggggggttgagcctgctgttcagtgccccagctctcagtctgtggagatttacgtgggcaatgcctctgtcatcctcctccgagcatacaaaggaaacactcaggaacaataatggaatgagtcttgttttaagaggcacttaagtgaattaaaatcaatatgcaggcatgcgtgccatgggaggtggcatccggaatgttttactggtagcagtctctgctttagaagatactgatctctgcaggacaggaaggtcatgaggaagtgtctctgccctgcaacgtgttctaggatgtgaggtttagaagccctgtgagcccattccctcagaacctgacatcaagtggctgtctccatgggtgaggcacagagagaagatggagggtgggtgtttgtgtgtcctctgtttcttattttcttaggctgaggtcctgtcctacgttgactctgtcactctgacaaatgccacaaccaaaagcaacttagagaaggagtttcttatttgtcttttgcttccaggtcacaagccaccattgagagaagtcagaacagatagtcaagcaggagctttaagctgaaaccatggagggatgcttcttgctggcttactcctaggctcaagcttctttatacagcccaggatcagttgtctagggaacggtgccgcccacggtgggccaggttctccttcaacaattaacaatcaagacaactaatcccatccaggtatacccacaggctagttccatttaggcaattcctcatggatgattctacactttcctctttgctgtgtcaagctgaaaagctcactaggacagttctctacaatgaagtccttaccaaaactatcatgtaataatgatttcctaagtggtgtacataggggaatgaggaagtaagcctgggaaggaacaggtatcaaatgatgtactcatgagggcaaagatgagtgactctagcacagtcctaggaataattcacacctgagaacattctggtctgagacaagggaccgtgagtaaatgctctcttgaaggaattcccaagcatgacaatctccttgtgtccccaggcaaagatggttctagaaaccagtaatgatcctcagacacagcgatgctagcagagtgccttgtaagacccatgtaagaccactgatgagctatggaagcctggacagcagccctcttcccacagcctgtttttagagaattgttgtgtggtcagatctgccacatggagcaggaccaacaaaacaaaacaaaacaaaatcaaaaacaaaaaaaaaaaaaaaccaaaccaaacaaacaaacaaaacaccaacattgaaagagcaagatactggaaaacacttagaaaatgaagaaaaataggaatgaacaaaactgtccagagtgggaaagacacctagaaaatgctggtcattcaattacctttgcagcatcagcagaaagacgtaacaacccagtccattcagctcaccccaaccacggaggcagctcctaacacactcaagactaccatgttacaagcaatttacactgtgccttagactggctcataaccatgtggcttggcctttttttccccaaaggaccaggaaaagtcattagattctacacatctctagcaagataggatttgaaacctggtcatcaaaacagcctaaagcatccttatcatgtgtgtgggccagtcattccaaacaactggctagttaaccaaaagtggaagaccaaggataaacctggaaagcagaacctatctcccagggcatactaactcaagcatttaactctatttgtagattattattattattattattattattattattattatgtttagtatttttaaaagtgtaatgaatgttttgccagcttgtatctatatgaaccatatagaaaaaggcatcaaatccctcctgtacctgaagttcagccttcagctaccacgtgagtactaagaagtgaatcaggtcctctgcaaaagcaaccagtgctcttaaccactgagcctctcttctgtcccgttaattggtatttcttagctctgtgctcctgcagaagagtctttcaattgctataacaatggatcaatcactgaagttcttggccttgggcttttgggcggtatgcccataattgcacaccctgaaatatggctcgtgttcctttctctgccctatgggaaacttttgaaagcgtaattcttggttggtatgtggctccgtgttgaaccagctgccaagacaatggctctgtgtctgtgttacctcaggatagcgctggaagtcccctctctacatgacactgttaggaagtggtagactctttaggacacaggacttggtagaaggatgttagatcagtggggacctgctcttgaagatgatagttgggacctggacccctttctcactcccatctccttgacattgtaaggtaaatacacttgatccattccacactcaggacataccaagatgccatgcctcaccacaggctagctgatcatgagctgaaaccatgagccaaagccatttctactttcatgttgggtttcttgcgtctttgtcacagtgacaaagctgatcaggtcacagttgtaaataccagaagagcactaaagagaggcctacatctgtgaacctccaattctgacacacgagatagggcacaataacatcttccaaataaatccataaccgtacaaatcctatgctggccacagggccctggatagagctcttgtgtccaccaggtaaaactctgaatgagagccctttctgctgcacagtgcagcttatatgtggtgattgcatttactgccactcacgatggtactgacctacgcattcaaatggcaggctactctctaccacgacatgagtgtctgtctgactcaggtagactagcacgtcctataatcttaaaggacttacagatttcatggttcatgacaaaggaagataaaaattacagtagtggtgctgaactgtagagtaaggtttacagaatggaatagggaggcctggtgcttttcccattaagagttacccatcccatctgtgtgcagattgcccaaatactcagagactaaccactctttattcttagaaccaaccagttgctcctcctcccttctgccaggccaggcatcctctgtaaagtcaacaatgaccggattacaaaggcagatgacccacccaataaagggcattgttgatactctatggataattattcttaaacaagaaattaaacaaagacatgtgagaatggaagacttacctgttccatatataagaatttgtttaccacagctgtttcctgctgtagcaacatgaaagaaattggatggatggatggatggatggatggatggatggatgaatggatgggtgatgaatggttggatagatgggtgggtggatagatgatggatagatagatgggtagatggatgaatagatgggtgggtgatagatggataaatggatggatggatagatggatgatgggtggaggatagatggatgggtgctggatgaatggatggatgctggctgggtgggtgggtgaaatgaaatagataaatggagaatggatagatggatgaatggatagaggatggatggatgtgtaaatttctctggaacaaccaggagccctgagattagagttcagttctctgagttgcctacagcaatatgctctgaatgcacccaagatcacctgattccctgccatcagggcatggtgtgcagggaactggttacccaaggcctccatctgaggactcagggtctgggatgaccatcattgcacaggggtggagtcaccgccatagctacctgccagcaaaggttccagtgttcctcttctactgggtagcatatgtaataaccttcaagttgatagttgctggagagcaggagatagcctggagagcaggagtctcatggatggttctttccatagactacactcacacccaggagtcttcctaaaaactcttgggttgagtgtgtgtgatgaaatctagagattcaggaggcagaggcaggaggagtttgagttcaggtctagccttggctacacagtgagacccttcttgaggaaacaagaatcctgcactagagaagagggcctgaggtccattggaggtccttaacattgtgtagctttccaagggtcttaacttgagagcccataaggaccatgcagggagctttctgccaatgcacacccaggctgcctgctttggtttaatggagttaacaaagctctctggggaccattaccatcatcatcttccctgtagcctcatatagattagagaggtactaccgtctggtgagtctcagctctccaccagagcctggggcttggtgggaccagcatgcacttaatgtcttcatcaggtcctcaggcagggcctgtgcacagctagtcctcccggaagagtccgctcctggttagaactcagtggcagatgttcaggctcatcgcctctgaccgctgttaagcagaaggaaggggagatgctcagaggccacagtgaagtgggagaggtgaacgcagtcagttcagagcctccatttgagacgaatcccacggcttgtgcaccccacctttcaccctgcatctcttcccagcaagaagcagacgctaatgcatccccccctcgtgtttacctgttctgcacatctcacataaatggagcaacatgtgtgacattggctgcatggctggttcctttcactgcacctttgaattttgaatttcaagcaaacacctatgctgtgatatgcgtcagcattttctcaaggttgaatgctatcctgttccatggaaactccacgcttggtctcctcattgatcaatctaggtagagcctagattgtttccttctacattaaaaagtgttaatgctgctcccttaaaggctgacatcccctctcagccttcatagggccctctgttccatgcttggtgtttataggcatttgctggaagaacagtgagggagtttgtgaatgaatgcatgagtggatgaattaatgaatgctttgacgaatgcaaagacagcattaggcaacggcggaagataagacaccatgtgtgtattacctgtgacatatgtcagagcctaagtctcaccgccaaatgttcaagtgagaagtctccctcatacccttgctgtgccctgtactagatccatggggctggggttgtatcaggatacgggaatttacatttaaagagatggtgcagagaagcaggtctgagctcggacatttggcatccatatgcccactcagccctccagcacctgatagaacacctttgcactccaggttccttctcacaagtggagaagtaagagggaatcatgagacaatggagtttatacactgcctggcatgttggtgagccattgctgagcagagctcacctgtgaaacctacccacatccttcagctttggttgggacatgggggaggggagggtcatctcaggcaggtgctgtgacttcattagacaggtgataaaatgcaggcttccagaaaggatagtttatttacatgacaacacacatagccattgcaaatctgaaccaacagtcaaagcctaccggtgaaggccaaaacacgttcctttctaagctgcagccggcccacgtgtttcaccaacagaaatttgtcaggtgctgtcaggtgctgacaagtcagctgagcaacaagtctctcagctgacttgtcactgaagagagctgctggtgtcttctccaggagtaacgcctctttctgttgagccaggttgctaggggctttgcttgcctctggctcctctgttacttaagaagtttgggatgaaacacctccaaaaagaacccccaccagaggatgctaagaaacggatctcagaggaacatcaaaccgatagccagacatggagacctgagggtcgttttcagtttgacaaacacatgttgaaactagaaaatgcaaagtcaaaactccaaattcaatctgactcttagagtaaccccacctcgcaactcgaagacattctgtctccaaagactgctacgttggtggctgcgtaagacccttctcgaagtctaaaatcaaaccctcctgtgaatgagaggaaggaggccaaaaggccagagaggctcactggcttcattgtctgagcttccaaacacccccacgttgttacagagtctggaccctggctctgctggctgtgtgcccagaactagggcagccaaggtatgtctggaaaagacggcttcttcaaggcaagcgtccctcatgccaggcaggccagcaaaaggagctgctgtttgcagtcccctcacacgaggcttccacgagccaagcctgctcactcaataaatgcaaagtcaagagctcttgagtgccaggcactgagagtgtgtgtgcgtgcgcgcacaatacaatgcttcctgtcgttgtgttgtggtcttgtcgttgtttgcttgtttaatgttaactgatggtttcctatctcgagcataatgtgtactgttaagaaatttcaattggatcacaattccctgtgatctccagagaggaaccttgtcagcttcccttgctagctcaggaacagtgaggctgggagaaattagtcagtcggcctcaagtccagtccaagatctcatagtcaaaatattttcaaaagattttgttgggactctgcttgcaaaataagtaagaagctagtgaaaatatctgggctttatgccgcatttaaaatcattcagtatttttattatgactttcaaagataccaagctaaaggcttgctggtgtgattagcctctttaaaacagcaccgctggggccacggagatggctcaggggttaagagcacttgctactcattcaggggaccagagttcaattcccagtacccacatggcagctctcaaccatctgtaactccaattccaagatatccaatgtccttttctagcctttaagggtaccaggcatgcacacagtgcacacacatacatgtaggtaaaatatatgtacacataaaggagcaaaataaataaatcttttttaagtaaaaaataataacatgatgaataaaacatttgcatactgggcaaacggctactgagtgggagttttcttaacatatgatgccctgcacttccaccttttaaaagtgtatgtgtatgtgtgtatgtgtacatgcacacatggcatggtacacatgtgaatgtcagaggacagcctgtagcagtcagctctctcattccaccaggtgggtcctagggattaaactcttggttgtcaggcttggcagcaagtgcctttacccactgaaccatcctagcaacccagtcttctttgcttagaatacatgaggcccagttacaaaaccctttcctaagtgcagagggtcggggaagaaagagtgaaagaaggaatgttcatccaggtcccatggcccaagtctcctcagagactacacattcaatagggtatactctcctgtgtgagtccaaatccagagaagttaacaacgatggttaagacctcaatcattagtttaaaatcatctctagttctgtcctctgaagctgtctcggggaaccctgggaaagtgggcaggcagagaagagtggagacttggtctcagagctccagcccaccacagctggggacgaggccctcccatgcctccatcctccacacagtcccaccatctgttgacattttccgtttcaggaggagatgggcatttcctgtgagctgctggaatcagacttcctcaagtgcagtgtgggatttcctttcatgaggtcaaagtctaaggtaaggcccttggccaagatgggtgcttcctagaccagagtacccctggttcttcccattggccacttattgctacacacacatacacacacacacagagtcacatatgcacacacttgaatatacacacagaaatatgcacacgctcacacatatgcacacgcatatacacatgcatacacaaatatgcacacacctatgtacactcacatatgcacacacatatgcacacatgcacactcacacacatttgcacacactcacaccacttcatgtacattttccgagtaacagaaaagagacttcattgaaaagcccatggcctttcttgaacatgctactctgctgtaaaaatctaatccatgtgacaaatcaaaccaaaagtgcatgtagttgtctctcccagtggaaagtgagtctcaccaacatgtatcaactctgcaaatgtcataaagtcaatagaataatgactatcagaatattgatttcctgtttctgctgcagaggccataagcataaataatcatattatattatttttttaaattccacgtacagatgtcaagaccataagcaatattaactcagaggtgaggggatggggaggaggtagaaaacctagcaccgttacaagggctgagctcccctacctgtggccccctcacactctcctgtcctcagactctggggttatcaggtgccaggacctgctctgcccgcgggactacacttcagtctcactctgattggcagtgggcttctgtcgctcacttccagctttcactctgattggcagtgggcttctgtcgctcacttccagctctcactctgattggcagtgacctgggccctcctctcacttcagtctttagggtggttgacttaactcatctgggacaagacccttgaccctttcattcctcataaaccaagttcctctgcagcagagatttctgcctcggaacggggtgcctgcgcccaacatagataatggtttgatttaagggtctgtgcccactgctctcaagtagcattcagtttcacggaattcgacgtctcaggaaagcatgcacttgcctagaatttgagtggaaaccaaataattgagatgcaattcgcaatctttcagcatttgctgggattgaagactatcttgaacatcatggctgctgagaaacgtaaaagctgggaaggtggtggagtcgagtcagaggctcccggctttgcagcttcaatgtgctgcttgctctaagacttcctgtggctggaaggggtgatgtgcatctccctggggcggagggagttctgctgaggcagccccctgccacccgaaaatcagatatacattaaaaagtaacccttgctatgcagatgagcttccagaggttataaactgcaaaccattctagaaaatttagtttaaaaagtatagaatgcttgtgggtgccaaatgtgctttctttctttctccctagtatgaattcagtgtcatctttgatacaagccacctgtctggggaagaggaaattctcagcttcatcgtgactgctcagaggtaaaaagacttaaacagactttatttttccaaaaataaaaatcattatgggatggggaaaggacatgacttgggtgtccctgggatgtagaggatttggaaatggctacacagtgataaattccccaaagcactatagggatcagtctctgtggatgctcattaggtcctgctcactactgtgaccaaagaagaaagctcaagggaggaaggatttgtgttggctcatggataaaggggatacagtccaccgggcctgggaactcacagcagtgggcaggtgcttgctcacagctaagtggtccagtgatcagagagctgggagtgaagacagatgcctggacagtggtagtaccctcacagtcaggcccagaggtgtcttctgggtgatcataaacctactcaagcttagatgaaatccagttagaactgctgtccctggtcaccacttctaaccaagcctgggaggtctgaggatcagctcgtcacggggatgtctacaactgaggacaggcaggcctgatgaggtaacactctagttcaagatcatagaattaactggccagttcctgcttgaccatgttttccaaatcagacagacattctctgaggtttgtcaggctaggtcatctgatttgggggatacatgtttcacagagaagggaaagccacctacagactggggacttggtgaagctagttggcagaggcactcaaatagtgtacctagaaaagagaactgtcccagaagccaggtggacagacagcgaagggaaaggggccggggtggtaactccccttaggagtgtgtatagctgtgagtgcctgaactagcctgtgggtttatgaactacctccttgagccacaacctacacttgaattgaagcagcatcaaggtatcaaatagctagcctcacctgtgcaccaataaaggaagcaccattaggtcagtgagtacagacagacagacagactttgatgaagttcaggcaggtgtggatgggcactcaaaacagcatattcatttacattctagctatagggatggagagatggctcagtagttaccagagtatgctactcttgttgaggacttgatcttggttcccagcacccaggctggtcaatgtacaactgtctgtaggtcaggcttctgtggatctgacaccctcttatagctcacattcacacacacacactcacactcacacactcatgcatacatacactcacactcacacatactcaagcacatatatatatactcatacacacactcaaacatacaatactcatcacactcaaacacacacatacaaacacagactcaaacacaatacatacacattcagacacacacttatacacatacacacactaacacacacatacacacactcaaatacaatacacacatatacctatacacactcaaacacaatacacacaatactcacacacattcagacacatacatacaaacacatgctcaaacacaatacacatacatacaaacacattcagacacacactcatatacatacataacacactcaaatgcagtacacatacacacacacattcaaacacaatacacatatactcatacacacatattcagacacacacacatactcacacatacatacattcgcacacttacacacacaaacacacatactcaaacacacacatacttacacacactcaaacacaatacacatgcctacactcatacacacatacacattcacacactcaaatgcaggacacatacatacacacacatacacactcaaatacaatatacacatatacacacagacacacacactcacacacatatacacactcagacagacactcacagtacaacacatacacacatgtacacacactcaaacacagtacacatacttactctctctctctctctctctttctctctcatacacacacacactcacactttaagattttgaagtttctagttgaaaatatgttgccataactgtccaagagtcccatgtggtattaactcagccagtactgacatctgactcatggatttctcctttctttctggactttcttttcttgatcatctgaaaataagatgtagaaaccattcccctcaacccataaaggttccctccgaattccccaagaacaaagccacatgtgacggtcaaacttgggaacttcagccttggtgcatctgacccacagcctgtggtcgttacaccagttgtctcagtggtgtcttcccagacattgtccacggattagtcccatagtcaagagcagagaggaagggaggcatgcgtgctcacttgctaggctgtgttcatctggatttctccactcttacacagttcaaaacctcctgcctaaggaatgttgatgcccacagtgggctgagtcttcacacactactttaagacacgcacatacacggccccccctctacacacacacacactcacaggccaacacgatgtagactatcccttactgagacctttctaggtgagtctagggttgtgtctaaacttaaagctgacaggtgcactgacacaatgtaacaactcaacacatctcaagattgttgcttgaacacagnnnnnnnnnnnnnnnnnnnntagttgatattgttgttcttcctatgggttgcaaaccccttcagctccttcagtccttcccctaactcctccattggactcaatgattccaactaatgtacaagtccttgattctcccatgcatgccactgctcagtaaacacctgttaggtgcccactatttagcagttagctaaatgtaggttatatttttgaatgcatgctacctactaaagttaaaaaaaaaaaaaaaaacaactcacaaacattagtataagaatctccagttaaccccttagatcctaaatgctaaggagtgtgtataaccttttaaacatactggattatcccacatacttgcttctcttggagattttgtggaaatctggtctgcccgacccaaagagccctcctaacacttgactccctgccacaacaggcagatccctaaagctccttatctcgagtctgacagttaaaatatcagtcattcctctcttccatcgccaccctttgaagggctcttgcctacttagcgctttcagggaacatcaaactgagactaaacattgtttcctgagccctcatctccacatcagcagcccagccagccgggcagcccacttggagaagccccagcacattggagcttgagggatggccgaaagttgtttgatgtttggtctctttatctcagcttttcaacttggctcattccggagcccttacttgatgacagatcaaaccgttattgggtgcaagctgccagcagctcccaagtggctggacaaatgacagggcaagagatgcctcttccatcaagagtgagctactcagggatggaaggatgctgcatgtagggagggtggggaccagaattgtaccaactgcacctgacagggaagtcacctctggactgcccctggcaccgattccaaagcttagactactccctgggaaaggcatggtgaggaatctagtcatgtgggtacctgctcccactgtcatgggctgtggccaccttgtgagggactgatgtcatctcatgggaggaagacagatgtggctccaggggcagtggcagtggccctgcatggtcagagtcatgaagcaccattgtctcagaacaatgggagagagggggagggatgtgagagctattttagtactgttgccattcaacatttgctggtagaagaggaagacatcaggccaaggggaggacagcagagcagctgaggttagcagatgtttgggagcgacatctagaggagggggtaagacaagccctgtccaaacctcagagggtctgggacttcccagttccatccagagagggcaagcttcactttcagctaggaccccctgttcattccaagtgacagagccatggtaaatattaagtgttccattggtttagcaagtcatacccaagagccatgtctcctcccaaggcagccgcttgccctaagcatcccaggcccgactgaggactgaggtttaaagaactaatgagtcacagtgaggagagccctggcttggaatcccattgagctatctagaaggtcgactctctctggctcatatcgaggctgtacaatgtctgagctgttcctctaggtccagagtgctgatccctctgcctctgggctcatgctgagatgtccgtgcacctccttcctggaaaccatgtcctaactttgatggtcactgttcgggctggctagttttaacggtcaacttgccaccggagaatggagtctcagttgagggattcccttgatcagattagcctatgggcatgtccttgttgattgaagtgggatgagctagcccattgtgggcatagccttccctgggcaggcatcctgaaccatgtaagccaggagaaagctatgtgatagtgaacaggtaatgtgggtgcgttcagccttctggtcctcactgtgggtgtgataagttccaaccttgattccctcagtgatgggctgtaacctgaaagtgtgagccagataagcaccttgctcccctgagttgttcttgcttggggtgtcttatcccagcagtagaaatgtaactagagttctatttaggaagcaaacacttcaagagactccacctacaacagggtgttcacctgtagcccaccactgcatagtcaacaggaagagttaaatcatggctcctgctctaccccgacccctggttgtgtctttctctgatggaagcctactcgcctgtgtgaccgggaggtgccggagagtttctgtcctctctctcttccaccatagcagttctcaggggtctctatgccctcaggtgggacatccaagatacatgctctctctgtcctgattcccgaagtcctccccgatgagcctgagtcccagccgcatccagcatgcaccttcctgctgggtagcaagcctccagtggcttctcccctttcctggtctcttcattacctattggtgttttctggaatcacctcccatatgtgctccttgccctgccccctttgtacacacagaatggggacagattgggtgagtctgaaggatgtaaggattggcgtgcgccacagggcaggcataccagctgctaagcagcttgcactgaccactgccccatccttcctcttctctccccacacagtggcaacttggagcgctctgaagccctgcatgacaacactctcacactgacagtgcccctggtgcatgaagtggacacgtccatcactgggtaagtatccaggacacagagcaccttgcaatggaagtctactcagctcctaattcacgtgcgtcatagccaagaacaagtggccttgccacctccctgcctgccagcctgagaaagcaggaagaaagtttgtctgtggtagcccttagccacctcccatctgtttttcccttctgtcagccccagctacccaggcacatagctagtgcaggaacatgctgatacgttctctgatcttagtatgcacctattcctggctcctgatgcacactatcactccagactgctgtgtagcggcaggcgctgtggttacaggagtaaaataccagctaaaagctgcagtgctgaagactaccactgagtgttcctcgcacccctcctcacaggaaggccgcccttctgttcagctccatagttcctgcttgtcatatttctgtcacgtccttgagtacagccagaaagggctctgcctcacatctgtgatggtctggaatggacatggagccatcacaacaacaatggcaacctatccaagtggtgtgcacagccatccagtgccgctggtcttgttggtggtggtggtggtggtcttgttggaaagctgtgcctgcaggggggcaaagcaacctgagacagcttccagccagagcttagaaaactgagaatccagcccttgtctccagcttcagcaaacagattgtgtgtacctctctgatagcagcaaggctggggagaggggtggtggtgcggagggtagggggtgggtgtcatacagttggattagatcaaatgggaactcaaggaattcttagcccaaaggcaagctgaactctctgaaagttcagtttcttctgtctcagttttcaagggctctggatctaagccttggtccggaagagaaagttgctccgagagggaggggccgcccctgcagtagctggactctgctgggagccagcaaagtgagcaccctggattcctctttggcattctgtagcatggctcagtagacatgaggcgttggtggaatgaatctgcaaaatggcatacactgcctatgttcacagctctgctttaagtcccatgctttctttatccatcctgcctaagggatggtagaaaacgcccagaaccagccttgtccttaggggttacatagaaacacctcccacacacacttgatcatgttgtcaaggccttaggagacctcagtgtgaggcgctaactgtccccatgaagccatctgttaaacaagtgactgtgcctctgatctttccagggatgggaaattggggcgactttaaatttattatccataaaatgcctgtttcttcttaacttttattacatctattatgtgtgtttgtgtgcaagcatgaatgagcatgcacagggaccatggtatctggaggtcagaggtcaacttaagggagtgagctctctccttccaacatgtgggtcccagggattgaactcaggacaccaggctttgcggcaagcacccttagccatcttgcaagcccctgaaatgcccaatttctaataagcatgggagtctgacagatataaatatgccttaaaaatgaatttgttatggttccgcttgccaaatacataatttacttacatttatttctcaaaagcttcttatcagcataatctacagaaatgcctttcaaatgacaagcaaaacgtatgattttataattaagggatttttttttctttttgggggggagttgtgggggaggttagatttttgttttgtttttagtttctgaagcttttgaattttaaaactttgttttagaaacataattgggaagatggctggagagatggctctgtcagtaaagtccttgtgaaataaaagtgtgaagaactgagttctatccccagggcccctgggttggccatgaggatctgcagatccctaggcctcttgttcagtggcagtccctgcctcaggaactaaggtggagagaggagacaccggatgttgacctgtgacctccacacctaagtgttcacacatgagaaccagcagatacctatagacaaagaaatataacctcagcatgcagtgcttagtagcttattagtatggcctgaggtaagaagatatatgtgttaggaagtcagggcagctgtgtctattcatggaagagagaaatgaccatccagcgaggaagaatggcctgctggagacacacggtggaagagagatatttgagttcccagtccagcagtgacctggggggcctggtctcaggtaggatgacagatttcacgttttcctctttcagaattgtgtccccaacctccttcgtgtatggcgagtctgtggacgcatccaacttcattcagctggatgaccaggagtgtcatttccaaccagtcaacattactctccaggtaccgaccggcccggggtgtgaccgctcacgcgaggaccaactttgttttcagagggaactgttctggtccgttttcctggtgtgggggtggggtgggagtggggcagagatattgaggaggtgttaaccacacgcctgcagacctcggtgtttgtcaggatttagaacagccacatcaaagagcagcgctctcagccttcctaacactgtgaccctttaatacagttcctcatgctgtggtgaccccaaccatgtgttgctacttcataactgtaattttcctattgctatgagtcatatgtaaatatctgatacgcaggatatctgatatgcagaacatctgacattcacctctgtaggggttgggacccacgggttgaaaaccattgccaaacaagagcttcatcaggaaggcttatgctgcccatgatccctgttagtataagggctttaggagaccctccagggcactgccacataaatttcctccagaattttcatgctgactccaccaaagttttctcaccctgaggaccagtctttcagaagtacagttttctgagagcaaaaccctgtgagcccatgcgccttggaaagtgtgctgactcctcactgggctagggctggctcagcttaggttctaagcatcagctccacaggtctgctgggtgtgtgctctgtagacatccagaagaccatggttgcttcacttggaggttgcagactttttttctgaaacatccagaaagtaaccttttgagaccttgtgggctacactgtggcagctgtggtgctgtggagctgtagcaagaagagatactggtctttagctacagggaaagagatactggtctttagctatgcaccttcctttgcatgtatctcttataggccatggaatgttactctttaggtttttttccccagaaatttaatgatgtaactttcttagtttgctggataagagttagatacctggtcacatttggtctgtgaggcctagtttgccagcctttgctttaaaattctaaggacagcttctcaaaattggagtatgtgggcatgaagccaggagggtctcagcgttggctggtctgtgttctttaaggggaaagtatagagaaatgtggccccatgagaaaggatgtgcagggtgctcccagaactgggtgaagcaagcccgggccaggactggaaaacacaagaagaaatgactcctcttatttggtgaagtctacatctcacagtcctcggttctgcctcccaaagtgttccctagcctgcccattctcctccatggagacaatggtcttcctatgtgatattcactatgggggccaaataacaatgatcttccttacccgtgtttcctcctatgtggacataagagatgacagatgctggtgtggtgagggtgcaggggatggggctgaagctgatgtggtgagggtacagatgatgtggctgaagcattttgggactcacagaagccggtcttcctccattctgaatgttctctggccagaagagctctgaacctgtgatggataacacatgtttgcagcctagagaggatgggtccttgacttgctaagcccaactgtcacacccgcccttgatttacagaggagactgggaagagttcagtgacactgtggggtgacagctgtggtcacgcctccatgctgaggtgcctcaggcacctcacagggcctgctcgttgtttccctttgggtctctcggttggataggaaacaaacaccaggtagatttattttgtttttgtgatttatatcctttcttctcttgaaatacaggatgcagacaagagaattatttagaaaggttcaaatgacccagacagtgtcgtaaaaaaaataaagaaagaaggggcaagaggaatgcttgctatataaaatactagatttataacagatactaaatattagtgcctgctcagaggatagacggaaaatggatgggtggatagatgatgggtgggtgggtggatggatagatggttgggtggatagatagatggatggatagatcaataaatgggtggttgtattctgagagaatgcagcttattcttccagttggttttctgaagatatttttaaagggaacttagagtttggtgtctaagaatatagcttatttcacatgtgacccgaagcaaagaacccagctgtcagtgtccctggggaattcatggttggcatcatccttagataaaacactgagggagcttcagccatcagttcaagtttgaggcagtaagctgggtctgagagttgctagtgagcttcacattaggagagccactacacacacacacacacacacacacacacacacacacacacacacacgttagcaaaggctatgtttcctgaaaccgtattgactgactcacttttctggtgagaacagttgtccagctggaaggtcacagaaattggtaatgaccaggggtgaggctggtgtggtgtggggagaggcaaggaatatggagaaacctcttgagcatctccttgatcagcactatcattcctgaagcagaaacaagacttccccaagaagaggtccttctgcgtcttctattagtaggtctgccattcagtaagatacatgtgagctaaaagactccattgcagatgggaagagacagaaattctagtctaggctggctttctatgccagccttgtgagcagttttcccagaggagacacagaaggttgttgactgttaatagtaattggtttgatttggattaatctagtttgatttgtccaatcaggagtcaaaatgctccccccacctggagaattataaggagatacattatatatgtcacgcccacaccttcgcacagatgcagatgttaggatgttatatggcaggctattgttacttcagtttgttgggtttgtttttgtagctcactctgtagccctgtctagcctagaactcaaagacatccatctgccttgcccccaggagccatgtgacacacctggatgctttattgtttctctgagaccagctctcactgtgtgacccatgctagcctagaaccagcaactctcctgcttgtgcctcctaaattctgggaagataatgttaaaggtgaatctgatcttacaagctgcctctaagaagtaagagcaggcagcaggagccattctcctgttctcccatccatgccttcagtgggaatcccaggcgtgggatttgcatgtcgggcctctgcagttctgagctttgagtttttcttgaaatgagttgttttccatggtggctggatatatttctttttcttgtctgagggctgttgttgtaaatgctgacctttggaatcaagagttggcaacagcctctcctccagtcttatctttttttttttttaatctttcactgaagttaaacaacctaatgtgaaaaagaactaaaggcctagctttctagggaaaagctggctacaactagagctcacacctgcagttgtgtgtgaatgcactgttcgggtagttttgattgttgttggctctggtgccctagcctcagcttcagagatatgttaaatccctgaattttgtttctcagccccaggctgccaggcagggttcgctccctcctctctcccaggaatcccattctgatcatcttttttaactgacaaattaaaattccagcttagcatggtagagcatgcctgcagtcctagcttttgggagtcaggcaaaaagattaggaatccaaggtcagtgtggcccatagagtgggttccaaggcagcctgagtgctcagagagagagagagatcctttctcaaaacagaactgaaggaaacaaatctataagcttcactcatcctttttcattaagaaaaagaaatatttaatgacacacctcttacaccttgtctgtataaagtgtgcaggtcaatgattttagagtgttttaggacttagagttctatcacctcaaaataaagaattcacagttctcagttattggcgatatagacataccttgaaaatagttgaaattggtacaggattggctccagactccttcaataaagcaaacagaccaacaaagcaagtcatacgggtttttttttttaaaaaaatggtatttatactgtatgatagcacttaagtgtataacatagtttctagaaaaacaagactcgtgctttaattaagtggactgcattggtcagctgagcattgttttaacattgttgccaggagaagatgttgccccagtgaggatgcatgctggccagcctggctgttagctgtgaaggctgcagaatcgtggtccaaagttctgaggataacagggacagttagctcaatcagcgactcttgccctcatgaagagttcttgagaggatagggtgatacttgccattctacctacaggagaaacacttacaaaatcgaagtctgtcttctggtatcttccagggccttgctatccaagtttcggacatgttctaaatcccccagggtcagtttaacagcttcaccatatcttagccagtgcatcccatctcaagaaaacccttcttttaatgcctaagagacaactccccatccattaaagttttgttttaagatggcagaaatttgttcttatctccaggcttcatttctagactgtcccgccaaccccctcagctatgtagtgagctcctgcctagaagtctcagactctgcaaagtcatccataacagttggcatcaagggctggagagatggcgcagcggctaagagcactgactgctcttccagaggtcctgagttcaatttccagcaaccacaaagtggctcataaccatctgtaatgggatctgataccctcttctgctgtgtctgaagacagctgcagtgtactcacatacataaaaaaataaataaatcttaaaaaaaaaaaaagagttggcatcaaccccattcagacgcccatcacactgatgtctgaatgatcataaccattgatcataactgttctcagtggcaaacactttcttggctttcagactttccctgtggttagtttaatctaggcacagtcaagtcttagtgagtaatcgttggccattggatgtgtctgtagagaattatcttcattttaagtgacttggagaggcctgcccactctgggtggtatcattcccttggtagagggtcctggattgtatgagtagagaaaaggagctactagcttgtatgcattggttcatcaccctctgttcttgcctatagatgtgctaatgactagctgcttgcaaattcctgtatctttaacttttataagacaatttgctttaacttggagtgtgaactaaaacaatcaccacctcccttgatgtgttcctctaaagatagtttattgaagcaacagggacaggagcaaagacccatcaaaggagtcaggctttggcagctatagccttatgaaatataattctgtaacagtaagacttgaatgtcaaaatcagtcctctatccacgggctgcagacagagtgctatgcgcatgcgtgcaaacatcggtctcctgatacattccacagtgcatctctgttcacagcctgtttgcttagttattcatgtgttcatcagagtagcacttttaatttccttagagaatgtttcctctccattcgcaatttaattgaatggtgtgagagacatgcccactggagctcttaggtgcccaggtacaatgtaagagagcagtaatcttggaaggaatcttctcttgggaatagatcacaacaatgagtaaaacaaattgcaggtcaatcttggttactctgttgcagcacatgggctagctcaatcttggttactctgttgcagcacatgggctagcccagtcttggttactctgttgcagcacatgggctagctcaatcttggttattctgttgcagcacatgggctagcccagtcttggttactctgttgcagcacatgggctagctcaatcttggttattctgttgcagcacatgggctagcccagtcttggttactctgttgcagcacatgggcaagctcaatcttggttactctgttgcagaacatgggctagctcggtcttggttactctcttacagcacatgagctccagccccacttgtggatcattacaatgattttagaataatctaaaatattttatcccaccccaggcagccaatactgttctgttcctttaagttacccattctccaaataacccctcttaatctatttctattctgagtttgattggcaatctttgctctgtcatctcacccctttgggtctctttgtggcttctttctttcccctccttacttggctttgagatgaagtagagaagaaaagtggggtggggaggagtataaagttttaccctgatctgatacagaactcaagaagagctattcagatgtcatcaaactgccatcagaatgacctagagaacacatgtgacagccctttgtagggatcagaaaagttcattttgggaccagcccctctgtcactgaaggtcatcattatcccaaactgtgcaaagaataagtttggaccaggccactgggtctcagagatgactcctgggtgcaatgtatcctgggaaatgtcgatgtacacccccacccatcccacctgtttcgaaaacactggccctacccacaccaccctcctgtatttaattgtgccccctagattgttctgattttattctagagtgctgagaacccctgaacttcattttgatatctgggttcccaccaactatcatcaatgaatgaatttctaggtatgtaaaattaaatacaatttttagcaagaagcggataagaagatgcttagttttgttggacccccattatttagtgtttcatttcaaagtcagatctgagtgatgtagttctattccaattaaaagcatatctagatgaaataaaatcacattcataccatcacacttctgtgtatggctcagggactctttaggcatatgatgtatcacatgaccttaaggtcttgtgtgtcactgacacttgtcacgtgcattattccacaggtctacaacatgggtcccagcacccttcctgggtcatctgtcagcatctccttccccagccggctgtcacctggtggcgcagagatgtttcaggtccaggacatggtggtgagtcctccatttgtgtcctatgttggtttcagctttgaggtgcctgtttgaaatttgtatccacttaccctggaatcttctcaggaggttcaggaagtcaaggtgttttcacacttaggagacataccaggggaaccctgaagaaagacgttcgtctctatgttgaggcaatttggttgatgccacaagaccttggaagggatgaggaggggatggttgtaaattcatcccccagggtggcttgtggcccctctgaaaactcccaaagactatctatagtctctgtgtgtgtgcatttccttgagaagagcctcaacatatgtaaagattctcaaaggaaaccgatacccagggattaaagatcaatgaggtaagacatgcatgatgagactgaaacccaagttcatgtgcagaatatgaggccacctgatcctgtgtcacctgtcactgactttgtctgaagggacactttataagcatgtatggtcattgctacacacctgcttgaaagtgtactccgtacctccaaggattttctcccatcgactttcattcttatcttcccaactgctaatgggctcaggcccgccttattctatactccttccctggggctcagcaagacccagggaccaaaatctagcctgtgctgatgacagcaccagtttccctccagcccagaccccttccgggaatttcgggatctaccaaccaactgcatcagtgtctaatggacttaaactccagtgtcacccctctggtcagcttgttgttgttgttgttgttgttgtttacaatcctgttgctggggtagattataaagaaagtaggtttatcctgacttatggtactgaccacagtctaggggatatgtctcatatagtgaaaaccttcatgtcaacagtatcccaaggtggtacagatcaccatgtgacagaaagtttgtgcatgtatctttgtgtgtgtgtgtgtgtgtgtgtatgcatgtgtgtgtgtttctgtatgtatgtgtgtgtctgtgtgtggacatatctatgtgtcggtgtgtgtcttgtgtgtctgtgcttgtgtgtgcatgtgtctgtatgcatgagtgtgtgcatgtgtatctgtatgtgtgtgtgtgtgtgtctgtatgtgtatctgtgtgtgtgtgtgtgtgtgtgtgtgtgtgtgtgtgtgtgtgtgtgtatgtttcactaggctctgtttctccctttatgtagacaccagcaattgatcacaggacctacaccctggtgattttgcttaatcccagtcaccaccaaaggtcccctctttaagcactgtatactaagcactgccatattaaagatgggagattagcagcccgtgtgagcattagagagcaaaccacacccacgccatagcacctttggcccgtttctctacctcagcaagcagccagtctgtccttcagcccagggcaaggctgtacatcatccaaaattcctcttctcattcacttcacatgcagcatacaagcaaacctaacgtgagcccttcgtgaaaatcccactgttagcactgtttgtgactttgcttccagagccctagtttaaaggctgccatctgtcactcaggttgtggtaagtggcaccctccctggggttcctgcttttgcccttacagcccatccttggttgggtcttgacacacttctgtgtaaaacctgcccatgactctctttcccccataatgttcttagcagctttgctgtctactgtcacagcctcctcttccccagcctccttgctgtttgcagacgctgttctacctccagcactcagcctgcctctccttcccacgggactgctctctccccagatgtccatgtagctgcttccttcaggttctatcagtgatccccttcttcagcctctgtcttaacactcctcacacctcttgcctgctcacatgtcatgttgtcaccaagctgacaccctacatctatattcttattaggtcacttaagctgcctcctgtctgatccctctaatataaggataggaatcaatctctgtgtatgtgtgtgtgtgtgtgtgtgtgtgtgtgtgtgagtgtgtgtctgtgtgtgtgtgtctgtgtgtgtgtctgtgtgtgtctgtgtgtgtgtcattctgtctctctgtgtgtctgtctctttgtgtctatctgtctgtctctctttctgtttctctcccctctctctctccgacctaatgcaatgctcagactataatacagatgttcagaaaacatctatggaacatgagaacaattccatattctaaagcaattgctaactctatgacttcagagaaacactgacaacactctcaacagagcccctctgccgggtgacttgatttgtcattgagtgggtggtttaatctctagggagatggagtgtggggcatccacctctctctgaacctctggaaaggagactcagcagagtcagcacagaggaaagcacggcaagctgggtcgagaggatcaggaaagcatgggagggcaaggcagacagccagagagatgctctctgcatcatggtttgaaaagtgaaccagcaagcccatggcctgtgacacatttaagcctagagcctaaaggacactaccatggggtggaggtctgggaagctttgtgggaagctgccatggttttggcgttggcctccttgggtcacatgggccatagaccaaaatcctgtgagtgttagagtgctgagcaggtcctggtctctgaggagcctgctcggttgcctgcttacctcattctatgccacgtatgcctgtgtgccctgtgctgtgcccttgtctgtgggccctgctgagcccacacaagacaatcccctactagtgtgtaccaatggggtgacagtgcctgaccttagcttgagctcagcaaagcacacactcctatcttcttgctttttacctttggtgctgatgattgagcccatgcaaagcacattctaccactgcactgcccccactcctccccttcttagctgttattaactatagtaaccaaagccttgcattggcctcaatagctggatgaatagtgttttcattctattctatatagcacaacagtgttctgtaagagctgatcatatgaacagctatattatatatgttttatatatatatgtatatatgtgtcatatatacaatatatatgttataaggagacacaagccccatccacccccccacccccaccccatgagcagaagtaactatggaccaaatcagagctttaagtcacgtgaatattcaaggcatttaagagccatgtgatatgtactttttttcatctttcctgatctattatccatggatatgtgttaggttttccccagggttttcagagcagcttctctggtgtctatctggtgattctgaaactcccaagaagaaagaggagctggcttctgggttttgagttctcggaagcaaacccttcagggatttttcaaaaccatatttagggcttggtcagtcacagaattctcagtggctaaccccagtgaaaagactagccatgcgcattattagcatgagataggacagcaattcccagacagcaaatgttgaggcattgtgttcctgtgaagagccttcacagtgtgactggtgaggagcctggagacagtcacgtgggccgtatgatacagcagtgaacaaggattccagacacttgtctcagaagcctgcagctagctcacccttgcttagggtccctgttttctcaaagtgaaggtagtctgcagcccaacccagccctctcttgctctgtggagcctgagacccctcagcaggtcagttgtgactggctaagctcatgatgtttctaccgcatccttcacgactttgaatggaatacggatttcattcaaggaactcgggtcgtcttctagtttcctttcggctcctgggataaaaacaacccaaccaaaagcaacttgggtagaagaatgggtttatacttccaggtcacagtctatcactgaggaaattcaggatatgaagtcaagcaaggaccttgaaatagaaaccatgcagaaatgctgcttgctggctcacacccagattcacacttacctagctttcttatgcaacccaggaccagcatttctggaatggtgctgcccacgttgagctggaacctcttgcatcaattactaatcgggacagtcccccatacactgtacaatccctaactgagactcccttcgcaatcactccaggctgcatctagttaacaattaaagctaatgaggaccgtcagcttagtactaattaccttttaggagtacacttcttaggagtgttcattagtaaagcctccaagaccctttctagaagacttgcatcaagcacacaacctcctgcagaaggagaggacatggaaagggggaagaagaagaagaagaagaagaagaagaagaagaagaagaagaagaagaagaagaagaggaggaggaggaggaggaggaggagggagggggggcagaagaggagaagaagaacaacaagaacaagaaaaacaaggacaaaaagaataagaacaacaacaagggcaaagatggctcccaaaggtggaagttgtatacagaccattcagcaaatgatgtaaagggatttgggaagaagtcacagaaaacttgtacaatgcagaaaaaagaaaatgaattcaagctatatggttagtttttcttttaaaagcatgaaaaaagtactgaatattctcatagcctttggatgggaagcctatctcctaagccagtcacaaatccctgaagaaaggactgacagatatatcagtcacttttcttttgtgataaagccatggccaaaggcaacttaaggaagaaagaacttatttgggctccaaattttagtgtccataatggggcagcaggcaggggagcaggaagctgactcatcatatcctcaactgcaaacacaaagcagagagaacaggactggagcgaggctgcagactggcaaagccgccaagtctgcgccagcaacagaggtgagagctcaactacctgaacccgcgggagacacttctcattcagatacaatgtataaagatgataaccttttgtagcatcaaaatacttcacagacaaagctcaaaagtgtttgggaaaagatatttgcaacatagggaagtgaccaattatttgttttttcaaagtaacaaggaaaagccaaaaaagaaaagatcatacaaatgggggtggccagaaaatccacaggagaagtttaattgggaaatgagcaaaacccagcctccctgtaatgagagcatcgcaagctaacaatgaggtttaatctttgaacacgttgttggctaagatcaaaaacaatgagtgtgtccacaaatacggcaggtataaaagacagaaagggaaactgtcagaatttaaacatgagtcctaaccccacacttccgggaatctgttccaagagactgtaatctactcagcaaaaagtctccactttcggagaggagatttgcattatcacggtctcagcatcaccatcggcctttcctattctgatgaagcagaagggaacctcaaatattccattcctgttctgagagggggctgttagagtcaagataacaataaatactaagtttatattactaggaacttatcacaagctggggggtggctcagaaaagagagggacatccaaggtctgagttcataagaacctgggttggtagtcactcttgaccactggaccacacagccacctgccaggcctcatgacatcattctgtctgccaatcatgatgtcacccagctgcagcaacaccatctagaagacagactccagccacacctggacttctgactccaaatctacactcggacaagccctgcacagttcacgtgcacacccctgtttgagaagccctctctacattatcatatttcctcccgtgtgcttccgtgttcctgtcggtcacagttccctgtctgatgacagttgttgctatatttggctgtcaggaggatttggttttaagccacatgtcctgtcattcaacgagtgctttacacccagcacatgtcaagggctgggttacgacagagaataaaagacagaaagacagagccgtgatcattgccagcccgagtgtagcttaccttctggtaagagaatgcaaaaataaggaaagcccacagagcatcacttgtgccaatgctacggagacaaactgaggaagtagaagatggccgggagacagggagggtggtcagcaacatctctgcgtcttcctatcggggcagggaacaaagcatccccaggaaaatatggaacgagatctttctgcttggtggccttgatgtgtttacaaatgatctgtctgccttatcattccttggcttgatttttctctttaaaagtaccagcccccaaccctcgaggctactcctatgtggcgttcagatccgactcccagaagtctgtgtatgtacgctcatgaaagctcacgctggagttccctatcaccacgaatcactcactgttctgtcagtggctatccacggtgacattgaaaagtcctgggctttaggatttcgctgtcctcggatgctaattgcaacaagaagcctcctttgcagcgggcttctaggaagttgtgcctcttgtgttcatgtaccagcagataccacaaatcacaactgagcagctcggttttgccttaatctctgatactgtacccagcatggactcatgctgcttctcctccctcagctttcctcaggaggaactcaatggcttgtcctgatcctggctgagagggtcttcctagggagaatactaggcttaagcgtcccctgcccccagcagtgaaagatggatttactgcccagagtggcttgggggactacatgatctcgctctctatcttcgggcagaatgtggtcaagatgtcttttcagtacaacagaaccatatttccagcaagttctctctgctaagccatcgcagcatccctcaaatcccactgttatgactagccttggtctctcaagttcatttccctcttgaccttttcttagctaaaatggaaaacagttgcctcgttccctcgcagagaagttgagctattacctaatcaccctcacccccttcttttccaaaaaaaagatgagagctattttctctcttttctatcctggggcattgccttcgttttctccgtgggctccaaaaagtaagagcaaaaattcagaacgaaccggcatgtgctgtgatttctgctcagtctctcccaccaggagccatcattgcgccaacgatgagaatcttctgtgcagttggagaacttcatcaggccatgtttgcctctctgtgcaattccaagacactcttgagggtctctgtaaaaagatcaaacaggagggtccagtgatagacccttgcgattctgacgctagggaggcaaagacaggaagatctctggggtgtgctagccagccagtctagcctaactggatagctccagatttagtaagagactttagtatctcaagaaaatatggtagggagtgactgaggaagatagttagcatcaacctcgagcctacatgcacacacatacatatacactcatatatacatacatacatacacacacatacacacacatacactcacacatacatatacacaatacatacactcacacacacacacagacacaccaagaaggttgtattgggtcaaccacagggtctgaaatcctccatacatatcccaaacatattgtctggccatattgtttactaacccaccctgacttccctctggtttacctttcagctcactgaccctttaaggctgctgagcaagccaccgtgtacttcccttggcccctttccttgctcacagctccttctccttttccgctcaccccccccccgccccacccccaccccatatccagttcccaggccctctcttccatcatgccttcctgggtttcatgtagacgatgcttcagaatgtagatcctagtccagggcctgcactctcagggagtctgcccaggccaccagccccaaatctgtgaaccccactcttggttccatttcactgtggcatttcctttccagatttgtcactcactaaagtcagtatacttaatgtctgtcacctcctcacaggagaaccaaacgtcacaagagcaaaggacatggccctgtgctctgtatatgtccacactcagtgcctgggggaaaatataaactaggagaaataaaatttccactgcccacatcagctacaccgccaccagatataattccttctgccatgggcttggaagatagatccttagctatcaataaactctacaatgtatctacagggtgttccttatgtacaaaaagatctgaaaattttatagtcactgggaatccctacatagagccaattttgaaaaaaatgccactcacacaccagcaaaagttgccttcatttccatctgagaatcaaaaagaaggtgataatttcaaatcagatagaactgcctacactgccaaaagcttcaatgagaaatccacaaactttgggaatggttgttatggaatcatatttcttcatacctcaccctttacataccactgatcttgtcaatagctttaaaccactttttttttcttctttatgtacatgtatagatgtgagccacatagtaaagtttcataaatagggtcagggtaagatctgggtttttgttttttttttttctcaacaagagccaaatactttataaagagggggaaatgtttgcctgaattctgcagttaaagagagattattgaattgtggagtgatagttacatttctgggcatttgatctgagtgatcaaggcaaaattgtgtgtccctgagctgtgtctgtacaccattcatatgctctggaaggtagtgacaagccagccagggctgtatggacatcattcaagccagagtctgacctctgagctatgtggatatcaagagtaaatcaagccagcagtgccatctcctagctgactgagggtacccattcttatcacttggagcctgaatgtattgtgtcgcagctgccgtgactcctcgctgccattgggtgggccagttggaatgcagcttacgcgcaaggtgctttctggcccccaacatgaataggccttaaaagtgagagctaaccggttagcttcccttcagcccttaaaacaaacatgacccccagccttgctggtgtgggcataatgggatgttaaagaagtccatagcacaaatttcgctgaagataaacagagctcatcagccgctgctgagaaacacgtggttctcatttaacctgctgaggccaaactgagtgtgcctcagaaacataaaaaatgggaccagctttctcacatgcaccccaaattccttctgaccataaggcattgacttggcattaccagtccctaagaagtagtttggtcttcctggccactggggtcttaccctttgcctcttcttaaatttcctggatactagacctgaggcacacttcagacttccctgaggtccttgaaacctgagacccagggaatccactagcagcttcattttaagctgctctggtatgcacacaccgccaaaaaacaatctaaaaggatagatagagcatggtgggtagagatgccatccggatggctacagaccttttgatagaaggaggattctcaaataatatgcctgacgggtgcagagtgaattctgcaaatccacatggacctgaactttgttcttcactgtagcaggatccaagagcaaaaactagaatttaaacaaactaatacaattccaaggtctgtgctgtgtcccagtgggtgggggtggggtggcttgacaggttcattcattatccaaatcagtagaccatcgcgcctccagagcgtctcaccatctggggaaggcgagcatctcgggcctgcatgtcaagtgctcagataacgtatttacgcctccatctctcactgcgacaatccagccacatctggaaattcttcgctgtcacttcatctccaaaactacttcccttccatatcactctagctctggtaaaggccatccatgcctgcgaaatgggcctctctggggcccgcctttctctgattacatggaaatgaaattctcttttatggggagcctgatgtggcctgtactcttgactccctggcatattggctgattacccccaaaggggagaaaaaggggcccaggactgagggtgaaagccttgtgtcagccatccctagagctggtggaaacacaggcattcctctatagcataagcgagcaggctcacgggagacgccgcaccctgcttcctggagtgttgatatcaccgcttcatttctccctgtctctgtctttggtctcggtaacctcctgacctttcagacagaacccagctttcctccgtgtgacgagaagcggctgcacaaaaatatattttctttaggagatagttttcaattagaaagaaggcatcaaagccaaagctacaacgtcttcaggattttacatttactctcttggtacagcgaactggtcaaggttcctgtcaccgaaccacatacacaattaagtaaaagaatacagtatgctcagtgtcgctttctttctagaataaaaggacctaggctgtcctggtggctgtgctccgtccccagctctgcagatctcaagggagctgttactgtgaacagatgttttgtgcccttgtttatcctttccatttcaacaacaaaactctgtagttgaggtccttactgatatgaaaaactggtgcattgggaggtggggactaaacatagttatagccttctctgtgcttacctcatggagcttgggatgatgggaatgggtttcccctttggaattctatttgtgtgttggaacctctggctacatgtagaaataaacatgagaacttggggctggagatgtggtaccatcagtgaagtgctaggcacacaagcgtgagcaacacctaccaggcatggcagtgtgcaccaataatcccagaactaggtgggcagagacaagagaatccctggagcatgctggccaattcatcctaactgaaccaatgagtttcactgacatgctgcctctaaagaataaggagggaaaatgactgaggaagacacgcggccttgacctctgctgtgtgggctctcacacacatacatgtgcacacacactgacacacgtgtacatgtacacataaaaagagaggcagacagacagacagacagacagacagacaggtatcacaagccaaactgacaagcagggagtcttccacaatgcgtaagaattcttccctctttaggaggacacgcccacagacacctccaggagctctctgctgtctttaaatggtgggtcattgacacccagaagctgtgttctcggcctttcaaagcgtgggtcacataaagctaggtgcatcacagctgaggactcaccgggactgttatttccatttccggccttgtattaggcagccccacccctgctgggcacgcagaaccaatcaggagtgacccagagcgtctgcttctctgtgggtcggaagcaccacaggcttgaagtggacgctgaacatgcaacccttcctctgctttaggaaaatcacgtcatctgaccatccatcagacagtaccgagagacacctggtagccattcgcagccatgtaacttaatacaagatattaaagtgggaggcgaccaggaatggaaatgtagttcacatttcgctgaatggaacagaatggaattggctcatttatgttaggacaggtacggttaaccaagtggtatcaggtctcaggcattttaatgagtcccgaaatgaacgtccccacaactgctgtggaacacagcgagcaagcgccctacggtggaatggggatcgccctgtcttctgaccgctccactcccagagtaggtggttggtaattgaattagcagagctggcattcacaacattctcttggtatcccatctcaaagggcgtgtgaattcagagaattcagaagggcccagcagctaagtctcaggcccagtcatgtttacccacttgccgtcagctgtgcttaggtaacgtgatacataaaagtggcccagggaaatgacagggagcagaatgtgggctgacagggaaacaggagttaacgggaaacacatggtcttgacacaaatgaacctgtgctgcttcacccatcagctctgggctcgtttcaagtcaacttcccccaagggctgcattgagggagactccaagcagggctcctgagtggtgcagagttagttcaagtttccgcttacctgtctctcggactatgcaccagaggcgtggagtcaggcaaattttgatgaccttctctgtaaatgcccagccagtggggagtgatcaggagagtgggccaaagctgattaaagagccatccaggcctcagatatgctgttaaaatagaagtcaggagcagcgggacacattcaggaggcaggagcaggtgggtctttgtgagttcaaagccagcctggtctacacagtgagttctaagccagccaaagatatgtagaggcaaagaaagaaaagaaagtgctaagaataccacaggcctgagtagagttggttccttagttctgcagcaggttaatccaccgacctcaaacctcacatcctccaacttggttcgctggttccccccatccttctgcagaaacaccctgctcctaagatttgcttacaagacacttgctttgttgtgcaaaatggataacaaagtatggagcggaggttcatgtggcaggtggtataggaagccacaaagtcaaggggtgtggtgctggcacctcgtgcttgtccaaggttgaactcaaggccacagtgtgcaccttcaggcttcgctcttcctttctttctggattccatgccccctcctcaagatctgggggaggcctggtagctcccctgaatcgggaacacttcaaggctgtagtggtcagggtgtgtgaaaccagccgttaggacgccatctgtagagcctgggtgttcggcaggaagcgtggcagggattctcgctccctagccttgcagagccacaggcagaggttgcaaagtttgggtgacagctagagacctggtgtcaccgtgtgcccagaacacctctgatgtctctctgttctgtctgtctgtctgtctcttatatccaatcaactccccaactccaccctcagtccattttaacagtggagtattattcagccctaacaaaaaatgtcaccctgtcatttgtggcaacatgggtgaaaccggagggcattacatcaggtgaagttaaccagacatagaataaaaatacacatgttctcaacaagcagcaactagaaaaggtgacctcacagtcacatgtcagacagtgtccaccggagcccgggatgggtgggggaaaaaggggcttgggggggggatagtttaatacggatgaggtgcagtgaagaagctaacagagaaggtgctgaatatccccgatacagacagacagacagacatccaaggcgatagatgctccaggtacaggatggtatccttatacactgcattgacgttctgaaaactcacagcagggtgggcagtgcctgagaggagcacttactcactacacaaggtgttgcgagcatccaacgttatgtcttaccggatagcacagaagtgttgcaagggtccggtgtcagttccacctgttagaatactgcctcatggaaaatagaattatcttttacatctggactctgcttagagagggcccacaaacaactccactcagatcccaaggagatgggcttgagaagtggagctagaaaaacaagcttagcgtgatggtgccactaaccccaggcattgtctggaggctggagtaggagggctatagcaatccaaggctagcccaacagcacacagcttctccgggtcaataatggacaccgtgatcctgagcctcacacgtgggaacatcctggttcctctgacccctttttctgaccatagcctacaggactatctctttctcacctggggacagaggctgggagtgtccaaaggaaaagtcagttttccttgacagtgacattaccaggacaagagccacagttcaggcttcaaaccccatgactcatgaggtaagggcacttagagtaaatggaacactatcctctgacaccttagctgcatccagccactaccccaggatgactgtcctgccacaagatgtccatgtcatcttggactccacagtgtgagctcctgacagcctcccacaccaccaccctctcttggtttcagcttacacagtgttttctttggggtcaggtttggagagggcagataacaacagaacaccctcaataactatgctggcagaatccagcctcaacaatgtgccccatgccttcctgtccctggttgtggacttagtaagttcttttgtgcagattccaatagccacgggcctccctcaactcccaggggtcctgctgagaaccagccctgtcgtgggaagcatttgggctccagcagtctgggaaagtatgagagtgagtgggcagaggccacagggcccccagacagctgaagatgggactgttgaacagggcagtgtggtgtttggtgtgacatgggaagaggcctttatttcctcatgattttgagcaaagatgattaaagccaagttgaggagtattctagtttgctttattttgcttcaataaacatccatagccaaaagcaacttggggaggaaaggatttatatggcttacagcgtaaagtccatcgtgcaggaagccaaggcaggaacctggaggcaggaactgatgcagaggccatggagaaatcctgttactagcttcctagccagggctcactcagcctgattttttttatagcacccagggctatgagccctcccacatttatcactaataaagataattccccatgggctttcacaagactgatctgatagaggggtggtttttgttttgtcttgtttcaacaactgaagttctctagacaaaattaaccagcctgtggggtagggttttagcaatcgcttatctacagaatggaagatgaggacccctggctgggaacagtgccagctatgaagcctggggacctgagttggttcccaggacccacatggtaggaaagaactgaccctgacctccacacatgtgccatggcacgcatacctccctccattcacacagacacaagatgctctgtagaagctgcacatatggtcctgaagcgtgtgatccgctcctagaagtatccatgtaggccactgtactaattccatggataaggaaactgaggcccgggagactcaaattgtcatggttgtgaagaggtggagctgggctgcaggaggtaccacagagtattcaagagtgtaaccaggcatggtagcacacacctttactcccagcccttgggaggcagaggcaggcaaatctctgagttcgcggccagcctggtctacagagtgagttccaggacagccagggatacacagagaaaccctgtctcaaaaacagcccagaaaagtccatggggttggagagacagctcagtggattaatgtgctcaccttataaacatgaagactttcattcaatcaccaacacccacattaaaaggctaggggtcagggctcacgtttgtaaccctagtgctggagagctggggacaggaagatccttaggggtcaccagccaggctatctagtctatttggtaagttccaggccattgagaccatctcagagaaggaagatggtatctctggagctgacactcgaggttatcctcctgtctctgtgttggcatgtgcccatacacacaaacttggacacacatttttaaaagtataccacatgattcaccacagtcaagttataggtgctcatcagcagaggtataggtggtgtagtggatagacacagtaaggcttgttcaaccatagagaggagtgaactttgtcagacacaggacaagggtggaataggagaccatcatgttcaatgaaataagaggggaggggacagagcacaagagtggtgtctgggatagcgtctgctccctgggttcctcttactgggttaggctgctgataacaaccaaccacataaccttgggtaagtcaccaagcctaaggtctcaggtccttatctgacagccaaggccaaggactgcctgatctgggaactgctttccaaaaacaacattccagggtactctattccccttccaggcccagagacagcacagagtgacctgacctcccagcctgcaggtgctcatacctcccatgggctgtccagcggtcagctttttgttgggggctgagaggagacagtggtaaaatgggccaccatgaagaattctgggtaaaaagagggcggatggttgtcctcctctctgaccccaccacagtctgtccttgacccctggacctagtgctagggggtgtgtatggtgcatggcccacgctcaagagcacctctgtctgcacgcctgccttcttcttcttcttatctccttgtacctccatctttaaaatggctccagataccggcccggtcccacagagctgttgtgaagcaaatgtttaagtgtgaatggccctcagagctgatcctggatgttaccgtgaccatgacccgttcatcctctcagagaagtgcctccctgctgtgaccctggtcagggactgagtggctgaattttagctgcgccagatcagacaccctagagaccctgggagccttcagtctcctgcttaagcaggaccaccctgagcctcccagaaaagtgggttatttcctgtttaaaatgattcccatataaccacagtcaggagcgcagtggccaaggttttcatccaccaccgacttcagcttctgcttcctgccccacattccaccggggccagcctgtcataaggcatcagatgccctgaccatcacttccctgtactcacaccaccccagagacgccctgtggaagaagaaattagttctggctgtgactctgcccaccgaggcctggccgtttctcacacatattgctgttgctcctggcccctgcccctctctgctggcacctacggccaggtatcaccaccatcttctcacactgggggctcttgagcaagaccaactagggtgggttggcaaccaggtttccccccctgcctggaaagccagaacaccagttttcaggacgctgaggaactcttgatctgcctctgacttcagtgagagtcagcatgtctgtcctataagttctgaggctttctcggcaccaactgggtgttggtatgatgaccaagccttgcggaggtagggagtcttcactggaacttctgtgcagaagactgtcttctctgggcctgtcagcattgtcccctcaagggacaagccagggaaggggagtcccacatgcatgagaatgaaaggagacagacgatctgagagcaagagctcacagaaccaaacctcaggtacccaccatgtggttgatactacagttggaacaggaatgaagacccagagcaattctctcaaaaacagctcctaaggggttttacagcatcctggtgtgctccacagaaccttctagaaacttccaacagcgggccatacatgaagcccacttataagcttggacagacctaaggtcccagaagacctgggctccagaccagggcttttgactctgttagcacgtgacttgaatttctttttgcctcctaaacgcctgtctgaaaggagtgatataaatgagctttgaaatcaggaagcagaaggtttaagctgttcctcaaatctcatttgcatgccgtggtcatctcagctcagtttattgaagaacttaatagccacattttctgtcagaacttctgccttaaacacttcccagccagagctgtggtaagcctgtgggcctggctgctaggcaggaggatgtcttgaacccaggagttcaaggccatacctggaaacatagtcaataatttcataaaatgaaatgccctttgaccatttttgtcctctagagaatggaagcagggagcgtctatgctcagctgctgtgtcagatgcttatagatctaagaccgctggttctaacagctctctctctctctctctctctctctctctctctctctctctctctctctccaggtgagccaagagaagggtaactgctctctacaaagaaacccgaccccctgcatcatccctcaagaacaagagaacatcttccacaccatatttgctttcttctccaagtctggaagaaaagtgttggtaagaagtcacttggtgacgggagccatgatggtgggcctcacagggaaggcatgtcggagatgagaggccagtcttctacttggcgcttcttatttctcaaatccagttttcactggttaactcaaaaagccttgaggactataatcaatccctatttttcagcccagggtttccctcacaaatctatattccaaacgccattgcatgactaacagaaatcctaaacaacctgctgtcaggaagcaaacgatttcttctcctagaaggaatctacagtgcaatggggaaacctcctagcggtttctattaaaattaaacatgtatgtattacacaacccagaaaaatgtaccatttctgggtctatccccaagaagtgaatgcacgtattgttgaaagacacaggaatatttgaaacaattttagagtagccaaaaacagaacaattcagatagctatcaacagtacaacgaatagacgagcatatccatacacatgaatattatagaactacaaaaaataaatgtaactaatagtattccatacactatgcagcataagtaagtctcacagaaattacactaaatgaaagacgaataaagaacattctggaatgtgtgtaaggagttcagaagtagtaaagatggcaaaaagatagcatggtcaggttggttctccagtgaaaacatgaaagacatacatgaaacatacataatacctatgtaaaatatatcaatataatacttagaatttgttctttttactgtgtgtgtcctacctcatcagagctttttcagggtcccttttcctgcatcctgattactttcactgagggctttacttccacctaagcacaccccacactcacttgaacacctctcccgccccttggagagctcagctgcctgctattggagacttagatttttttttcacttgcatactgttttgctttgctttgtttgtttgtttgtttgtttgtttgtttgtttgcttgctatgacattataccctggcaaaagcaacttaggagagaaagagttgactttagcccacaattcctagggctcaattcatcactgtgcagaagtcaggagatacccagtcaccttgcatccacagtgaaaaaacagagagggtaaaattaagtcatttctgctgtgctcagctcactttctctattctcacacagttctggaccccctgcctagggaatggcgccacccacagtgagcaggtcttcccacatcaatcagtatagtggagatagcccctcacagaccaccctgatccctcattgagactgtcttcctaggattctagattatgtcaagctaaccagtggcccacatagcaaggatagcctatctttgtaaaggccctaggggacagttagatatagtgacatcggctgtgtcttccatacacgctgaaatgtcaagctgaaaatgtctcctgcgattgaagcttcatacaggtacacacacacacacacacacatatacgcacacatccatactttatatataagatacacttccaaacacaaaagaaaaattcctccttggtcattggaataaacttccccttggcggcgtatgcgtcaccgagtcatatagcttctttgttctttaagcacccacccctgccccacccactaaacaggagcatggtgtctgcctgccaaggcatggacccagaatccgctgtagttggaaagtcttcctgtttaaaaactcacgaaagtacacagggatatctaaatgtttcttttggagaagaattgattctcctggtgaaattcaactttttggtaggattaaccgcataaccaccttatgtctacttgtggactcccccaaacacaggagaccagagccctagtgttcaactaggccagaaaaaccttctaccgccctctgctggtgacagagcaaaattacatcttctttactttggtggggcagggtatgttagttatagtttggttttttttgtttttgtttttaaagctactccatatatcagtacaatttatatattaaataacagtaattgaactgggtgatatagttttaaacagaagaaatcatggaaataattcaggttacacaatccctccccccataccatatttgtttaaaaatcacttttctaaatccattgatgggacaggtgtgttcagtgaccgaacacacctaattcctattttactctgtattttggagctgggatggaatcctgggccccagacaagctgggcaggaagtctgacattagccactccacgggccccatctcttcctcctgattttgcctcagttaacataacagacactctgcactatagatggctttggatggtctctgtctcttaattccatctgggaatttttctcctcaggactgtgaaaagccagggagcttctgcctaacgttgcactgcaaccttagtgctcttccgaaagaggagagccgcaccatcaacctatacatgctactgaacacagagatactgaagaaggtgagtccccgggctgcgctctcagcggttacccagaatcccttggaatccgttcccagaacacacgggctgccccttatcaaactttcccagcatgcaccactggcgattcgtccatcagacgttgccaagaaacagtatcagaccctcagtgttcaccttaatccaaggactggcggtgtcaccgagagtatcctagcatctttaccgagttctagcatcttcagcttcccgggttctcatctgcccctccgcgctgttgctctttccttttccttgggctaagctgtagggcgccctgtggcggctgcgtgccttcaggtccaggcagaggtagacggatctctcagtttgaggacatcctctcgaaaaagcaaatatctccttgggcttataaaacctcagattcagtgggggatgaaacctgagatggtactgacaagcttataaatcctgctgatttggagaccatgttttgttctgattttgatcaaaggtcgcccttttctgtcatgggctagcaagaacagttttaggctttatgggccagaatcatgcgtggtcaggcctttgaccttgtggcttactgtggtcacctgtgacagacaggcttgagaggctcatcagctttcaaaaacaacacacaataaacaagttttaaacaggttgattttgtgttaggctgcccatgttcatagctacatgctacactgtagctatgctaacttaatcgtttgcaacagtttaactctgtcagcagccacagtgtggactatatccaaatgcagggcatgttcttaataaaactttatttacacaagcagacagagggccagatttgacccatgaagccttagtttgcctgatcacttgttcaaatgatccctcaaagcagttgggcccgtgaacctcagaacactttgctactgtgagtttatcaaatatggttccaaatctctcagtcagtcagcaaaccagtggcccttaataaaggtttgctctgatttgttttaagataagagcttgctggttcaagaggctgtgcgccacaggatgctatagaaatagttggatatgaaggtaaaaagaatatgcatgttagcctcagagttcctttttagttttatttgaaaagactaaacatgcaagacgtatacaaagccatcggggctgtccacaggtgagaagcgtcagcgctgtctcgtggtcagctttgaattagccccagcagtgatgcggcagcctgagaagatgcagttgttgaggggaggggtctgcttgttttccccgtctctctgtagctattacagtctccacacaccgtggaaagctggacaccatctggttccctagtttggaaactagtttggaggaagttgggctcccactcagggcttccctgttcttgatataggtcagcgttgttagcagaggccaggtgtgagcttcatctaccatcgcccttccacgagtccctccctgacgtggttcactaggagtcaacatactttctccctggtccatcttagccaatgctgctgacagctcatttcccatgaacttgctcatcactgcccccagagtgatggcactggttgtcctgcctctctgtctgtctgtctctctctctctctatccagtagtgacacttaaccaaggactccatcccagaaacattgttcccactggtcgggcaaaccagtggagccccaggcaaaagagggtgacatctctgggttgtcatacagcagaaacttaggcatagagtgtgccttgagtctgaagcactgtcaggcctggaccttataaggcatagcgcctttgggggttgaccagatggctccagggccattgggtctccctggggacttggatcaacatggaccttgtggctggcctccgcctagggttgtttattttcctttgacctcaaggtctggctccagacaagggaatctgaggttttattgttttaacctccactagttttcatgtagaatgttgggtctatttttttttttaattttcagaggataggatttctttggcagtgtccctaaggcctttttcacagccaccaggggcctactatacaccagcccttcatctccttggcctctaacctaaccgttattgtcactgttaatatctacggtggtaacaccgatgatttataataaaaatacagtatgagaggacagctctacagctcagtgggtaaaggggcttgctgccaagcctgactgacttactccatccccacaacccacatgatggaaggagaaaaaggaccgataaaaattgtctactgatctctcatgtaggctgtagcctgtacatgacccccaataattcccacactaaattaagtaattaattaagtgtaaaatcaatagaaggccagaggatacaggaaactaaaatttataaaactagtaaattgctggaagatttttatgaagcagaaatattcttttgaatgacagtcctcccagaagctttttaaagtatttttctattaaggaagagagtggttaaaaaaaaagaaaagaaaaaagaaaggaagaaaaggaaggaaggaaggaagatgggggagctggagagatgactcagcagttaagagcactgactgttcttccagaggaccagagttcaattcccagcaaccacatggtggctcacaactgcctgtaactccaaatccaggggctctgatgccctcttctggcctctgcgggcacctgcactcctgcacatactccccacacacaaatagcagacacacagaaatatatataattaccattaatatttttaataacaaagttcagtttgaccaatgcatatatagttctcaagttcaagtgggccttacacataggagcccagcactcccatgggtgtctggagatatcccactgcatctcattcctatggacaactgagagatgtttatgtttaaaactcttaagctgttgttaactggggtcttttgttgtttgtttgttttgttctgtttttaagaataatttgtacacaactcctatgtaaagtactacgtcaaggatgtccttgttccaacccagggtgggctctgtggtttcctgggtgatgagcaaggggtccccttataacttaacatctagagcaatgtttctcaacctgtgaaacacaaccccttttggagttaaacaaccctttcacaggagttgcctgaaaccatctgcatatcagatatttacattatgactcgtaacagtagcaaaagtatttaattagtaacagaaataaattccatggttggagtaaccacagcatgtgggactgccttacagggctgcagcgttgggaagggtgaggaccactgatttatatagagaggtctttgttgtttctgtgtgcattgggccactgtaggtcaaagctggccactgactgtgaagtctgtctcagtccattttctgtgtcccagggggcatgggaccaggaacgaacgtataaacgataaaagtgcctttgacttctccagactcaggcctggaggatgagaagttcaaggacagggtgcgaggattcagcctctggtgggagccttgagctacagggtagcacagcaggcctttctacttcttagaaaactgccaccacagcatcgtgcaacaacctcttcctggaacacacacacacacacaccacacacacctctggaaggaaatccacaacaaaccaaagtaatgattgggccaaagtttaacctggtgaaccagtgaatatttgttgtggttcctacagatgtatagatgtttggccacttacagtagccaagatgactccaaacagcattgatgaaaagcccatcccccgacccctaccatactctcccatacacacacccattcccctacccccttataggtgaccatccagactccagccctgagctctgagaaattcccctctgtaactcatctggtcagagtccccctccccccagcagctgctttcctaaagctgggaggggggttgggggggggggggtgccagaatctttctagtttcactttcccagactggtgacctctcctttacctcccgcgtcacataaaccttcgactccctcttggaagaaaagatttcaatcccaggaaatccataagacacatggacactccatccttctcacttgcctaacctgactggctaccagaagcctcccactgaatctcacagcacatgaccttagggaataaatttccagcacctgaattctagggatgtgtgcaaaccacactggcttcctggagtgacagaggaactcaggtgaaaacactaaggatacctggctggcagagcccagccatccctcagggacagcaaggacactccacaatcagcaacagccccatctgacactggcctttcctaatttttccaacccacatctttttccaatttctttttccacctctactttggagccacgttcctgttatctggatggtggctttgaaatagagcccacagcaaggctttcaaccggcttctgccaacagccacttcctgaggctaggaggtccccctctttgaccctcagacctgattaataaactagatgtttgtctctcccaccctaccccgacctgtcattgtgccctcagatgccttctttgactatttggccccaagacagcttcattcaagagcaaagaaagagttaataatagctaagctttcatggttttgagggctgtggtctgggcaagaagatgactagaaaatgggaatcagatgccttctggggatgccaggctgggatttgttgcacacaattaaacagcgttatttatcttccactcttcgtgaatatgcaatatgtcagtatccacctccagcgatctagccctcaccactcggaaaccacagcacaagggtgtgcatgtgttcattactggaaaatgcaatggtatctgccactctgcatcttccaccgtccaaaggaattctcaagagaaggcagcagtgtgtgcgctgtgggtaccagggatgggaaagctgctagttcagtgataagctctgcatggactcttcacagaaccctgagagttccgcttggcatagtccccctcgtgggcacgtcattctcaatgtcgtttgaaagcatctcgtggtgaattgtgtcatttcctccacaggacagctcctctgtcatccagttcatggctcgagccaaggtgaaggtggagcctgccctgagagtggtggagatagctaacgggaacccagaagagactctggtgagtcggctgccctggggcagctctcctcaggggacagggacctgggactgggatctgtgaggaaagactttctaagccaagatgaagggtttgtggtagacccaaagccatggctgccccagcttccagggccccctggaaggcctcgtggctctgttgttgcgttagcttggttcttaggattcctctggtatttgaaacttttcttgcagtgattggccaaaggaaaaactgtctggaagcgtcctcaacaggccttagatttccactctgaggccaaggctatttttatctctcttgagcccttctctcaaaacctctcctgcctgtattgtttcatggctgagcattggggcggggtgggtgtgagtggggcttaagaaaccactgcttggttgtcttaaagaggccatgtcaagctgccaagacctagaaccttctctttcactctctacctcttcccttgtcctccttgaagccgacaggcttcagagtgggcagtctgcctcatggcttagctgtccagtgagagaaagcctggacagaaaggcctttcttgttcctggggaaagaagggtcatccactgtgtgacaccctcctgtgttcagtccctggagtgtagacagggaagtcagccaatgagctgctctgcggagggactgtgctgaaacctgctgccctttcctggtccctcccacggatttttacctcctctctggggaggcttgcttgctctctctctctctctctttctctctctctctcattgattctgtgttgctttaacaaacttaggaagtgaattcaagaagaattatgtacatacacagaaaagggctgttaacttattttctaaccgcaacagagaccctgcctcttcatcatgctagtacgtgagaggctggactatggtgcttactggacaaagatgatgaattcgagttcagttcccagcacccacggaagaaaccatctgtggcagtccatgccggcaaccccaattctggggaattgcggagaggcagatagatcccagggggcttcatgggcagccagtccagccaaaatggttagctctagggtcaatggcatgccaatcccgttcctaatgtcagtaaatatcacgagaacatcagccagtctaggatggcagcattcacgaggggtcagccatcccacaatgggtgcagggatgcggtccggcctgacggctcttcacgtggagaagctacctagaatgaaactcaaggcctccgtactcagtttttctggcaggtcaaatatttggggttggcacttggctcttgtctctctgcattctggcagagagctgctacttggcagctggctcagcctttcacctggaaaggaagagaagggtggccttcgttcactgtcatggcatgggttaaagggcactataggatgaaacatgcccaaccccgaggtttaggatgctgtgataaaccatggtatcaacaccgaagcaccactagaaatgttgaaccgtgtgcagcagatgaagcctcttgcggttgcgggtggtgagagagcgctgggtgtgcggccgcaccctggcgtccagggaggcgctgtggagcactgtgttctggggctccaagtcattggctctcctgttttgagagctgtggtgatattttccccaccaagtggccagaagctgctgttgggtttttgttttgttttgttttgatttgattttcatgctcccaaagggagggaaggagggcacaaggagaatcccccaaagagggaaggctcctcccaccaccactaccaccccaccctccagcccctctcctgtcaaatccccaaagagccctctcggaaagctcctcccacccctggctttttggtccatgaactaagattcagttctgcaatgttttctcaactttcctagtaggggaaaaaatcttctctgagtagaaagacttctagtttaagaacaagcacaccccccaccccaccccaccccctgcatgattcttctgagtgcctggctccaatcgaacttccatctgaaggggaatttccacagaggccgggcagcaaacttaaatcaggtgaaatttcacagcctctcagattcggcaccaaattgtgtccttgaaccggtgaggagatgaatctgtgtctggtgtccagcagggcgtggtgaggaggctagcagttggatttttaaccataaatagcatgcatgctggtgaattaggacagcggacactttccctcctgcctttcacgcgtatgtgtgtgcgcgcacacacacacaccaagcgtggccttgaaggtgttagccaactcatctaccctgaggtccatcctcagcccgcatgtcttttatttttatgtcaggatacaagtaatgccttgcagaacatttgttagtgactagaaacatggagtcgactgttcgaggacttgctccttaaggtatccaccagagatatttactcttggtggctcttctattactgtgataagacattgcacccaaggcaactcataaaacagtttctttgtggcttacggtgccggagggtgggtccctgagcatcagggtagggagcgtagcggcaggtgagcaggcatggccctggagcagcagatcacagttcctcacctgacccacaagcccgaggcagagaatagcatagacttttaaaacctcaacgcgcacccccaacccctgtgacagacctcctccaacagggccacaccttctaatcctttcaagtagttccaacaactggggaccaagtattcaaatatatggggggggggggcattttcattcagaccaccacacttaccagaagaatgcaaggtcaacttcaatggtgcttatggggtttcatgcagtctcagacctgaagaccttagtgaggtctcgaaggccacagggtcaaaggttgtgaggagccaataatgtgttgactttcatattcaacccaatccaacttactactaagagtgagttaggggtaagtgagaaaagaggaaactgcatcctgggaaactgttttctgtcaggggaaggagttcacctcagaggttactctccaccgtttgttcttagtcaaccacagtctaaaatactagtacaaaattccagaaacaacccaaaggcactgttaacacaatactgttataatctaccgtatgagttattattgctagtctcttattgttagacattaaactctattactgctgtatagggttagcattggtggggtttatcactatccacagagatccactgaggtgttagagaatactttatctggaagagctagagtacagaatgaaaatggaaatatactccagagatttccaaccctatttgtgagccaggaaaaggcactaaaagatcccggggaatagagctctccctgccctgtgaattgactacaaaagtcaacaaccgagacaaaaacttatcacgtactctggggtgattaggtttcttttgtcagctcaacacacactcgagtcatctgggaaaggggaacctcaattgggaaaatgcttctcttggaccgacctttgggcaagcctatgttttctggttgatgactgatttgaaagagtctgtcccatcatgggcgttgctacccctgaggaggtgggcctggtactataagaaagcaggctgagcaagtcataggcgcacaccttgcggctccctgcttcagttcctgccctggggaagttccggctgtaaggggtaagatgaaataaatctttcccaacctgagttgctcctggccatgctcttctaccatcaatagaaaccaaactaagacatacccccatagtttttgaagatttattttatttttagttaagtgtgtatgtgtgtattccacatccacatggaaaacagaggcactggatcccccggggctggatttacaggcagttttgagctgtacagcgtagatgctaggatccaaacttgggtcttctgcaggggcagtacttgctcttcatcgctaagctctctctccagccccaatcacctccatagttttagggagtctagccaacaaagaaggctggagactcccccaatgtagactaagagattagagaattgttagttatggggccatcaccccaaactcccttcctctgcatcagaggctggtatgaattctcacttgtcatctcggtgtcagcataaactggcaggacgttggatgagctgtcagggtatgtgcacttgactgcccccttgaggtcagcagcagaaacctacctttttctgctttgccagaagcagagtgggctagacttccacatagctgagagttcaaggaattgcctggagaaccagagagggatgagaggagtcaagaaacgtgatgaaccggggccatgcggaatcctgccacagggagaactcaatgccctggactctggggctagctcccccgagtcctcatcacctctggcactggagtcaagacactggggaccaggtcactagtgctatcagctgctctggcaagcacagtcaagagcccatctttccctatgactcacacagcggatggttccacagcatggggaggagatctcacactgggccactgatagtgacagctgtccccttctgtgtgcttctggagtcatgaagggcagtggcaagttagccaagcttgcatctgagcacatagttcaaatgcttagatcaccttggtgggagcttcccgcacaggcaagcatcctaatgagagagcacgggagccttgtcctaagatggcaggtgagctgtgtgtgctttggtctctttcaagaatccatgtgagctagcgtggtgattcatacctgtagttccagcactttggaggcagatggaggccggtcttggccacatagcaagaacctgtctaaaaacgaaacaaaagaatgtgctgcagtgagccatgcttcctggctggtgtgataggaaatatatttggagcctttgccttctaccatggagccatgtgggaatgactactcctccacgtggggatatagatcactgattcacagaagaccctagaaaatccacggctcccttctctgtgtgagaaccactaagccctttctctcgggaaagaaggagtctgtgatacctcaagttacattgtagcatacggtttcattgccacccctcctcctcccgcaccatcagatggcttgtagctcttgctctttacccaccaccctgtgggagaaccgagctctgcccatcagaaactgaaaaaacaaaacaaaacaaaactccaagtgcgttgccaaacacacaaactctattttccatttagtcccttggtgaatacacctgaaggcttactaagagctaggtgctgtggtgggcactggggacagagtgagggaggaggtggccatagccatatcatccaccctggggccgactacaggaaaacaataataataacgtcagccaacaaagaaactgacaaggacgttgtttccagttgagccagcctcggcagaaccacctttttcggattgggggttaaggcctggaagctggagaggaagacagggagaacgctgtgtggagacctggtggcttggcctggcatgtctaagtcagcaaaagcagaggacaagattgagccaaagaagcagggagccccatccccgctctgcaacagtggcttccagtctccatcataattaccagcattactgtgttaaaggacagaactcatatccgcatagaaatgtgctttggttgaatcgggagcgggatatctgggactccccagagttcctggtccccaaggaaacctcacagctatggaggataatattttaaatgagtaagatgtccagtgtaccacactctttcactgaccactaattataccccttaaggtccccagagccccatctggatagatgcagatgtacacacggatgcacacacgtgtacacacgtgtactattgtagacaaatttgtctttctaagcagccaacaagaaactgtcagggtgatacacagctgaccctctctcttagaagcaacctgggtctgcggtggcctcgggtgcacaccacattcagatttagtggtcagttaattgcagaactcttccccttgtggtctggtctctccccagagccacaagtacgcagccaggagagttaagatagaaggatggagctaagcggtatactccttacctagtgtgtctagtaccctcacttcaatccccagccagaggccttctgagggtctctgtatagtggcaggcccttgtcccttaacaacgtcttatcccttccgagatatctgggaggctgctccataggttataagttaagatcgtcagtgaggatgaaggtaatttctacctgaccaaaaatatcaccccaaagtgatcactccatcatcctatggaggactggccggttctgagtctgatttactcaacacatttcatcactcatgcgcacgttaagcccactcatcacacatgtgcatgttaagcccactttaacctcctgctgattccataaatggttggtgtcttcaacctatactcacctgatatttgctcgagtcgtgttttaatttgttaaaatattgtgcatccaggtagaggcggctcggtggctaagagcactggcttctctttgaagggaactgggtttgattcccaggacccacatgaaagctcacggccacctataattccagttccaggggatccagtgccctctctgatctgcaaaggcacccagaaaacaaacggtatcagatatacatgcaggtaaaatacctatatgctaaaaataaatgaataaaaatttaaagctgtgcatcaggccagatgtggtagtttacacttataatcgcagcacttaaaagacagacacaggtggattgctgcgagccacacagtaaatccagaccagccttggctatggagtaagaccctatatcaaaaaataaatatatacttgtctacatacaagttcatagatacataaatacacatgcagacagatataatttatagaacaatttttctttgttgttgtttgggggttttgtttgtttgtttgtttttgttttaagtcagggtttctctatgtagccctagctgtcctggaacttgctctgtagatcaggctggcctggatctcaagagctcagcctgcctctgcctcccaagtgctgggattaaaggcgtggaaaaccacttccagctggtttttcattttcagtagcttgtgatgttctgttttgtggttaaccattatgtagttaatgttatgatctaagtgacagatgccataaagtcacaccatgtgacagatctcacattggaggtttaattggggacgggatatcctgcctctgggtgagggtggagggaaaaagaggagggagtggctttttataaggggatgtggccacatgagcaggggaggatgtgcaactcgtggtgacagtgggattgtgttgcatcttggcagctggcgatgatgtctgctgttgctgggtccctgggggcaggccgtggagacgcctggttactaaaagtttacctgttgtcctttcgttagatgcttacaatagttctgattctgtgtttgtgtgaataattctgcagtaagtaccttccacttcttttaaaaatctttaattgcattttatttcttttgtggccctatgtgcctctgtgtgtgtgtgcgtgtgcatgtgtgtgtgttgggcacccacatcgctcgtgtctggatggaagaagacaacttttagaactctgtttcttccttctaccatgtggacctcaggaactgaactaaggacgttgggtctggcagcaagcacctttacccactgggctgtctcgccagcccaacatctctgcgcataaaactttttttatagtttgcattttctgcctttgatcgtgttttcaagtacggaattgacaggtcaaacggcgtgagtgtatttaagaaagcagtcatggagtctgagacacgatcaggatggaagggcgttccagataacaaaaacaaagacagggacctcaggggagatgagagtaggtagctaggatgtgaatacatgacctgggaggggccacaaaggaaagacagcagactgctgaggctcagtgtcctgaattagatgttcccaatcgacagagtgagatactgatgacctgccaggacctacgttcttggagaacaaaatgaatgactgggggtgctgtgaggggctgacacagtgccacatgcgtgtgaaggctgggcctgaactggggcagtgacaggtgaggaagatgcttagagaggcatgagggcttgtctgggcccctggccccagtggtcagtaacttgtcactgcattacgtgtcttgtttgttccccatcagtatgtatgtcaccacattatgtgctccgtgtgctccccttcctgttttcgttcatgcaaatttttttatcatttgtttttaatctgtgctatggctttctcagcacactgcatggcgctcagatcattcacagatgaatttattgcagtcaggatataagagacagatctgccaaggcctagagcttacatccaagaggaccaaggacatctctgagaaaaaaatcagagacacaaagtagcattccagggacatgacagggcattcttacgaaattcgaaatttgccagactaaactgtagtggctactctcatctctgtgtccacaaaaccagacctccaacgtggcttttgccaagaggacacattccgtgtcctgggccttacagctaaccccacactgagttcagagctggctcagaactcttgtctgccagcaagtttggctgacttttgcctgaacctctagggagggcttgaagtgctcctgattcgcaggtctgaaaaaccaggctcagagaaaccggctggtgctgctgatggcaccaccccatcccccaaggcgcctgctgggtttcctaggctggtttctctaacttgtccctctgttggaagatctttttctgctccactgaagttcccttaagacaagttctggattcagggttctgcatgtgaaaccataaagcctgtctgtctgatgggttatatctatatatgactatttataccaccccacctcaacacacatcactcagctcccgtccctcgctccggaagtagagacaaggaactaaaaatggtcagattgtcttttgctttgtaagaaggaggctcagtgacacttggaatctgtaaaacccctctcccttccaacccatgggaccagaagtcagtcaaggagtgcagtcagtatgagctagagtggcaaaggcccaccctcctgcaagaggaaccctggcctgctcaccagtgctatgatgtgatatccccattgccatccatttcaaactgtcatcatgatgcctctagagttgggaagagatgcacagttaactcttgagagctgacctaggacaactccatgacaccaacaaatgaccttcaaagttgaggaatatgcctcagggggcaggagagatggctgggcagttgagagcacttgctgttcttagagagaacccacgcacccacaggaggcagctcacaaccttttgtaactccagcttcagggaatctgacatcttcatctagcctctgagggcacctacatgcatgtgacatatacacacacagatacacacatacatataaataaaaataaacaagtgtgcctcaatgagataagacttctgtcttagttattctgtgaagagacagcatgaccacagcaactcttaataaagaaaacatttcattggggctggcttacggttcagaggtttagtccatatcatcatggtcagaagcatggaggcctgcaggcagacacagagctggagacggagctgagagtcccacgtcttgagccgcaggcagcaggacgtgaactgctacatggggtatggcttgggcatctcagacgacaaagtctgcccacaatggtcacttcctcccacaagaccacacccacacccacaaggccacacccaccctcagaaggtcacacccactcccacaaggccacacccactcccacaaggtcatactttctaatagtgctaatccctgtgggcctctggggaccgtttcctttcaaaccctcatagcctccaattgcacatggctcagattagaaatgacaacatgttgtgagtgaattccttttaatagttctggcacagctgtgagccccgagacagcggcttaatccaagtaactccacactaagggacaaatatgtcactgcttgagaaccccagcgttctttctttcagagccgaatgcaagatagaagattatcctctaattcccagctttctctgccatgcttttgttcagtttgtgatatttgaagtcggggtcgtcatcattacagccctttcgggatacgaatctcggtttgacgctctcccctctgtggtacctcctaggtggtcttcgaggccttgcacaatctggaaccccgtggctacgttgtggggtggatcatcgccatcagtttgctggtggggatcctcatttttctgctgctggctgtgctcctgtggaaggtaagtctggggaccacaagtgccaactgatttcccactcgggacaccagctctcaggcctctccagggctggggaaccttgggagatgtttccctgcacagtgcaggggcaaaagaggtcagcgcccccttcaggtagaagatggaaccttgcctcctcttggaccacctttgagagagagaagggtcctcaattgccccctcgtctatcctcagagattaaacccatcctgacagtcactgccaccattgcttctcaggagatcaattgggtccccatgagatgattgctcgtacagggggagcgatctcacaatgggtggtacagtgcttttcctggagtccgaggtgactacagttaaagacagggctatctgtgacttcagcctgaggcgggaatgatggagtttaggttctgtggatttttaggtaggcattcattaagaggcaaccggagcctgacccagaggtaaggaggcacacacaatggggcggaggcggctggctttcaccccgttttgcgttatcttatgggcacaagtggatacctagtgctcttttgcaaagcaggttttaaatgctgttactggaacaacctctgagagtttcacaggtagatgacttaaatccaaatacttaatttctttgggattacaaaacagtatacatgcataatcaaatgcggtaacgctaataaagaaaatgtgtcatccggggttacatcttgggaaaagctgtggtgaacacggccttgtctccatcttgacctgttcctctgcatagatgtgcgggaggctttctcatgggccagctcactcacggacaatttgctagttaaattatccgcacatatacccagtgtatgttcagataaagcacttctagagcgggagtcatgggttcagttcctgtctgtgtatgttcacacagtcagcacatgtgttgtgtggatcagagggacaatgttcagccggtcctctcctgccatgaaggctacagaatgctgactgtcaggcttggtggcctgactgaatcaactcacctgcctcctctccttgttgtttttgctgctcttttgtttttgtttttaagatttataaatttatttatttatgacacaccagaagaaggcaccagacctgtgagctaatgggtgctgggaattgaactcaggacctctttggtgctcttaactgctgagccatctcgccagcccctctttagtttttgtttctgtttttgttttttaaagatttatttatttattatatgtaagtacactgtagctgtcttcagacacaccagaagagggcgtcagatctcattacggatggttgtgagccaccatgtggttgctgggatttgaactcaggacctgtggaagagcagtcagtgctcttacccactgagccatctcgccatccctgtttttgttttttttttttaatttatttttatttcatgtgcattggtgttttgttgtcatgtatatatgtgtgagggttttggatctcctggaactggagttacagacagttgtgagctgctatgtcagtgctgggaattgaacccaggccctctggaatagcattcagtgctcttaaccactgagccatcagcccttcacccttgtttttgagagacggtttctctttagcctggcatgggcagatgaggctaacatggctggccagggagcagtaggagcctgcttgtctctgcctacccagttgtaagccagggccggtgtgcttggtatcttttcacatgggttctgcagatcagaactcgggagccactcctctgcccctgcaggttcaactctccaatctcacatgtgtaaacagtctagagctcccagagaactgtgtgtttaacatccctgtcgcagcttgatggtcagctccactgctctagacccagtgctaccttacttgaaagagtgtctggagagtgaaggaaacacatggcgcatactatgtggaaatacgtctgtcttccacccccgcgcatgtcagatatccctgtgctacctggcagcctgttgttccctggcagctatactacaaacctctccccatgttgttaggagtccatttccagccacattctactgacagtgcctactctgtagtctgcagtccccctagccctagaatcaatattgtccctggctgagcacagcccataacaatgccagtgtgattgaacaaatcctccaccgtgtccttagagcgaaaccctagaaacggagtcatgaggagcatgtagttcacactgtaagctgccctcctgaaatgccaccccaagtcacagcaggtttagcaaagtgtgaattttcctgtctatttgccagccgcagatatttcctcttttttgaatcttccagtttgccatctggttaccctacatggccagataaactcttaactctcactgtcttcagctccttcctgctgagagggcctgtgggtggaaaacaaggctcagtgttagaagaggttgtcctctgatctccacatgtactctgtggtgtgcgcatgcgcacacatgagaacccaaacattaactacaagttttaaacatctccgtatagtcttcatgtgagagggttgtccaccatcaggcatggctctaaagcagtctggctcttacacaaaaagatactgagaagccatgaaaaggaaaaaaaaagaaaaaaggtcttggttgaagactaagtaacgagtctcaaggaagttagaaaaagcagtcgagatgatggattgtttttaaagacctgcattccctagaatattgggctgcaggcattttgtcacctctgattcctctatctatcacctacaaataatgcattatgggtatcaggtagcagtttaatatctcactgacggcacagcacagagaagccagctgaaatctggcttaagtccagtccgacatctggcttgtctgacctcaccagtttgggcttattaccatagtccatatgtaatcacctccactcctctccagggaagccactggctggcacctgccaccagctgggtgcagctggccaggaaacccataatgaatagatggccagaggtcaggtcctcttcctgtatggaaacctgtatttccttctactattgtttaatcttgtaaaatatttattttgtggggagttgggggagggcttgttggtctgagaacaacttgcaggaatgggtcctctcctgagactgaactcaggccagtcagacttagtggccagctcctctccccactgaaacatccaggagacctctgagttcccactcagagagcctctggcagctgtcgcctgtgcttggtcatctgtgtctcatacacatgagtggaaagccggctcggccggaacattcacagtagcacacaggcctgtgggtcttacatgcttctcactcacaggtagccgatgtcttccttcaacaggtagcattgggtccctgctaggtggcgtgctccaagtaactgggcagaggcaaacaacagacctcatactctcttgaaaccctgtgagaaaggtacttcagtggcagagaggagcaaatgtgattaggcctggttcactggcccctgccccttgtgacatgtgtcctgtagggttcctatctttgtgaaatagaagcccgactgggtcccacaaatgccttctccatgatgctaagccccagtcctcacccttgggctcagcctacccagcctccccctctacctctgccattactgctccccagaaccttcctgaaggacctgctcacagcccagtctctctcacgcttggctgcaaaaggacctggctctgacacaaaatccacagcaaggccccaagctcagcagagccctgaaatggagcctagtcaacctcctcagagctgcgccatcctcggacgctgggaaccgtaatttaaacttgatgtgcgaggattacagtagcctgccaaaccactgtgcaggaggaagactttgaaacatgaaactctttcaagggagaaaattcaaaagcattcactctcccttgcgccagctcatggccgggatggaagacaccccagcccggtgcctcttcctagaggcctgtttatgggaaggttcaatcgttcagagacacgatcgttcagagagcatggggtagcatgcctgaggaacaccctcagctcaatatgccagcctgagcctagagggagagagagactcggacatttgccctttaggagaaaagtgcttctctgcctgcnnnnnnnnnnnnnnnnnnnnnnnnnnnnnnnnnnnnnnnnnnnnnnnnnnnnnnnnnnnnnnnnnnnnnnnnnnnnnnnnnnnnnnnnnnnnnnnnnnnnnnnnnnnnnnnnnnnnnnnnnnnnnnnnnnnnnnnnnnnnnnnnnnnnnnnnnnnnnnnnnnnnnnnnnnnnnnnnnnnnnnnnnnnnnnnnnnnnnnnnnnnnnnnnnnnnnnnnnnnnnnnnnnnnnnnnnnnnnnnnnnnnnnnnnnnnnnnnnnnnnnnnnnnnnnnnnnnnnnnnntgagatcatctcttcctgtttgcagtttgccaggcacacgggccaccccctcagtgaaggacctcatcccctgccctcgaccacgaaccctccatctcttttcttttctgactgacactttttcaaggcaggatgatttaaaacagtgtaccattctttcaccaggaggacttgtcccgactggtcaagtgacaaagaggcagggtgtagaaagggtttgtctaccctccccaccccctgaagagagctactcagaggcctccatcagtcggaacccttcctagagcctggtattctcaagcttcctgagagagcatggtttttattggagagcatcacttgtaactctctcacatacaaaatgattggcaatggacatctgcggagtggcatagaaaatgtgtaaggtttggcaaccactccagaggccactggggtcaccatcttgcctccaaaccagacttcttaaaagagtgtatagacatgtgcacacacagatacacactcccacccacccacccccacacacacccattaaaaatcatgtgcctgaaatgtgcggagggagtggtttatatttggagataaatattggtctgatgctgtgtcctcagcatctcgagatggagacatgctatataaacagtcaagtaaccgagggcccataaacacaaggtccagagctagtccaaaggaagagtgtacccaaagtccttggagtagctgcccaaaaaacaccccaaaggccagcgcacagatgggcaccccaaagagactagatgccctgaagtagtctgtcaggcgcatcaccccaaagtggaccagaccacagtacctcaggcctgggttcgctctcatctctctctctggcgttattgactcacccgcacccacctaaccaagctgctcagggagaatccgctactttgtgggttctctggcaggcttggagactcatcctgttagtctgtgtggagctgctcttggcgggtgtggactctgtcaggaccagaagatattctgcctctcccggcctccagctgaacaaaccttaaaactaggcatgcctctccttcaaacaggataattataaacgaaacatctgaccccctccttggaagattccagaaaggacacaggaaaaataagtgactacattggtttgaaagtatggggtcgctatgggtacagggtatgcttttgttaatcatttcccagaaggctcagggtggaccgcccaagacttttaagaattttctcccaaatactcgaatagtactaacaagagcgggtatgtatgcccaagggaggcctgcaagggagaaaagttcatcagatctcaagttattgagcatctcagaatgtgctctgctctccagtgtatccatgctgtaacaggagattgaaagtgtctactgggtccttgaagtttgctagattaacactgaagctttcttaacccgcaaatgttaccatacgagcccatggctgagctctttagtctgatcactgtagacacttctcattggatacatgtatcaaaacatcatgtttaatactttagacatcctcttagatctgctccccaggccttatgcgaaaggaaaactctttgttacttattgctggagatcgactctaggacctgacccgtgccaaaagcagcagcccagcccaggaaacaatttttaaaactaaaacgtatcatgctactggtttgtcagctgttaataacagggtcagtttttacttagtatatcttcccttcaacatttgggttctcagccaggcaggtggatctctgtgagtctgcggccagcctggtctacatagtaaatactaggccagccagagttatatagtgatacactctcttaagatatatgtatgtgtttatgtatgtatatgcatatatatgtattatatacacacatacatgtacacatacacacatacatttgcacacacatgttgtatacacacgcatacactctcacacacacttgtgattctcaagagtttacctgaagactctgattatgacccttatgatctgtcatggtagactatctgtctaccagcctgttcaaataattttatggtgtaaagatgactaaaggaaaaaaggagagtgggattctgctcacatagatggatgaagtcctgatgcctccctcagatatttatctctggagtctgctaaatgcccaggcatctgaggctgagatcctggcagtaagagcaggtaggagtggccaagcagcattcatgacacataataggttgaagggtgggctggtgagatggctcagcgagtaagagtactagctactcttccgaaagtcctgagttcaattcccagcaaccacatggtggctcacaaccattcatactgagatctgacgccctcttctggtgtgtctgaagtcagctacagtgtacttatttataataacaaataaatctttggaccggagtaagcagaggtcctaaattcaattcccagtaaccacatgaaggctcacaaccacctgtacagctacagtaaacacgtatacataaaataaataaatctttttaaaaaataggttgaagggtcttgctgccctccctgggaatatgtgaagagtgataattaaggcacgtgtctcaagcacaggacctagcactatttggcacaaggtaccatacagtgtggtggccatacaaactaatattcatgtattcactcattcattcatccatccattcattctttgtgtgtgtgtgtgtgtgtgtgtgtgtgtgtgtgtgtgttgctaggaacagaagccaaggccctgtgcacagtaggctggtactacatcactaaattgttcccaaatcttcccttttgttctcgataccttttacttcatctgcctgaaaatctgggtttgttagaataagaccctctactgccatctgttgggaagtggtccttgtaaacttctctatggcatctggtaacccccattccacttgtgcatggctcacccacactgccacactcagcctcccctgcacataatcacccataggttgaccatcgggatcttagagcctggggctctggagatgagagtggagtttgcaagggtgtctgtgtgggcagctgggatgattccttgagaggaaagaacttgctctggtgtctgcaggaggagacagcacattggctttgttggtgacaaggatgctatccataatgacatggacatgtgagtgtcaccattgcatcagctgttctaagtcctttcagcacggtgtctgcatttggcctatgaaatgcatatggtgcacattgcatccatgtgggcaagacactttatgcacataaaaataagtatttttttaaaaagatgggcctctctacaccaatcagttgaatcaagatcaccctccttccccataaattatgcccagaggcccatctcccaggtgactctgcattctgtcaggttgaaaattggtgctgaccacgacaggctacaaaaagttgcataaacactggacattgtaatgactctgtaaaataacccactcatcctaccatgtatgaaaagcttttggccaaactcagcttctgggctggaatagagaagtcttctgagtactgagctggagaaaactgccagcctgggtcaggatgcagagccaaccctagaggaacccaggctgctagctccagcatagatataccatgaatgcacaaatatgaaagttctagatgacaaggaggattaggatcctgtggatacttgaaaggtttgttctgtgagagcaatatttgtcagatggggtccacagatggctgctgtctctcaggacattagtaacttcatataaggattcaggacatagctcagttggtaaagtgcttgctacacaagtataaggacctgtgcccatcccaacacctatataaagccaggcctaaacttgctagcctagtgttggggaggtagacacagtcagatccctggagcttcctggccagcctgacctacttgacatggtccaggccactgagagattcatttcaaatatccaagtgttcccaaggaacagcccctgattctgacctccacacataaatacacacacacacacacatgcacacaagcatgcacatatacacaaacacaaacatataaacacatatatataagcacacagatatacacacatatatacataaacatatgcacatccatatacatatgtgcttatatacatgaatacatatacaaataaacacacatatatacatatacacataaacaaatacacacataagcatacacacatgtacacataaacatgcaaacatataaacacatatgcacatatataaacacacataaatatatatacatatatacacataaatatatgtatatacatatatatatatatatatatatatatatatatacatacacacatatacatacacatacacacacacatatgcaggagaaaaaacagcaattcggcttaaaaaatggtggcttctcccatggctggtcaggtcctttgctgtactacagtctatcacagatttctagaagaacgcagcttctccagaattcactgactgtgacatgtttatctttttcactgctccaaatacctttgaataacctgcagtaagtgatgttttccagcacccagtgctgtggtaacactgttcctgcgtactgaatggcttgctgggagatagactttaggaagtcagtgtggtgacctgagacatccttctagcatccccagccctgggaagggctaggtcctgcctccccatagctcagtctgccttggcacacagatccagtcctaacgcagagcgtcttctgtctttcagatgggcttcttccgcagaaggtacaaagagatcattgaagctgagaaaaaccggaaagagaatgaagatggttgggactgggtccagaaaaaccagtgacccaccgtgccagtcatgtgatgccctcatgtccccatcaccagcctgtggtccttgatctttgtatctttcatatttggaagaaagaaatcttctccagatttttcggaggccccactgatgctgttctcttcctcatcccgtcaagcccggtgccgacctgagatggccacccctccagccaggtcacatgactggggccaccaccactccccttctcaagatgaacttagaactttggaaaggcaagctacagagcaaagcaatatttatggatgcaacattgcgtggtcaaccctcaggggaaaactgttacctaaaagtattttttataaatgtaagccttttatattgatcatgtctttatatttgtatcaatgttttattatttctattaaatagttctataattcactcaagcactgaaatcttggaaatacatgtccctgcatacaaattttaaaagagaaggaacttattctactttggaacttgttgttagggaagaaaaaaaaaacttgcagataaaacaaactgaagaaacctcatgaaatgaatccaccaagctggaggcactgggaaagcacaaaggacatggcaaggccgcctaagacatttattccccattgttaccacccggagttaagttcagagagcttgaagtatcggtgttttctcttatggacctctcactgggagattctcagcaggaactgggatggaaagcttggtttcctctcagcagttgctctgtaccacactgatacatgcagcaggcactaaaccctcttctggagtcagcaagtgctggatggacaactggtcaacctcagaataacatctcatcctaaacaacatgtgtcagagttcagagcccaggaccgaagctgtgctctctcagcaaaggcctgttttctctgtgtgtaagctgttaccttgtggtataatgttaacacaagactctccatttcctctgtcactcttgctgtccccaactggtggtgctgcagatacctccccagagaggatcaccccacatggtttgtgtttatgtcttaggtggaattctcaagagtcgaaccctgaaataggacttgggtgtaaataatttattgaggaagtcttcccagaaggtaacagtgaggaagttgagaatacaagacaggagagtacagggagccaggcaacagtgtcctttcaggggacaacccacgaggtggcttcaaaccagttggatctaatgagcaagtcagactcaggaacctggacttttgtgatgccacgcctgcaggggatataaactttctgcccttaggtcttgctgacaagatgactctgtcctctagaggagaactttggggggcaccctcaagtaaggagatccacaaatcatgcaaagaactctgagccaagagctttagtgctcccctcccccacacaagtgaatgctaccttcagctttgtgtagccaaaaaagccatgagtctaagctggtcctaggagtcaaacattacatctgacccatgaccaagtcaaactcactacaaggaaggggcagcccccccaaaaaaaaaaacagtgcacacccagctcttttaagttttatcaaaagaaagaagaaagaagtcttggctttaccagccatgtacatcctgatctgtagtcaggcactatcctggtggatcccctgagaacacagtcccctcgtgcctcagggtggtaagcctcccacaataggtgcagagtgtggattcttcatgaaccccatttgcagctgtcctgtgatgatcgtgaattgtgtcatggtttcctttaataaatcatttgagagtctcaggtggtgagaccactacagaaccatctgcagttatactcaaaatgcatttgtccccactggcttacttcctgcagagggtatgactgcatcaatggagaaggatgcataactcagctagccagcagagctgcacctgagaaagtgtggaaggcaggaagggcagactcagctagaatctggccactcagctggatctcaaatggtgaaccgccatgactagtcacatgctcagatgtcgatacaacttcaggaggcagattttaaggaaactatatggttgctcaggaagcaaatcctaaaaggcaccataggggagaggaggcctctttgcctatctgataatgttgagagctaggggtgtggctgcctggcacagaggcagggaaaggggtggagcattgtcttggaattctctcagctgagttgttcaatgtctccatcccagtctccctccagggatcaggaaaagtgggcaggtggattgatgtgcctgtgttagctctttctagaacattctttttaaaagcccactgtgtcgcctgttgtagccttcctctgcctctgagttcattctgcagacgttctccagggcgctatcaatagcctgcttgtttttcagttgtgtcttctgtgggtttaaccagctcaagaaagactagagcatccccaaagtgaaccctgccacagaaaggctatgacgtagacaaacaagaacaccagcaagaggggctggtcgattgactagcgcacaccctgtgtcctgccactgtggtctcaggcaatgatttgggaaagcacctcggggcccagcggtttgacaggctgcatgaagttgtctgtccgagtcccccatccatctatccttgtgctctaccactcaaccccctacccaacccacccccacgcaccaaatatcacatgacctactaaagccaaaggcaagggaaagtctcaataaacagcatgctgttgggacaccccggggaccagtgacccttgtggtgtggtcaagccccagtgtggagggtgtggaaatgttattcacatttatttaaggatgacacatacgtgatcatatatacctgattaccctggaaacataaacctagagaaggggtgcccagtgtcaacttcctgagatttagcggcactgcaaagcactggcgtttgatgagtggcgtaggatgcagctcagtcacagtgcttgcccgacacaggggaggcatcatttgggggacctgtcccattgataaacaaaaggcagaaactgaatattctcagaatgacttccccgagaacacagaattttagtcgatgtgggtttgggtagaggggtatgtgttctatgataatgactgaagggaggcggcagagcccctggggccaagggagccttctagaacaacttctgggttttcagcatgagggaagtgatgagaaaatctcccccccccccgggtgtggcgtggtgctctctatagccgatctgcttttcagtctattaaagtgtttggtttgctgtgtttgatcctgatgtacacagtgtgattggtggtgtgagtttaagctttctgggtggtttgttgcatggcaggcacctctgctctctgcatgtctgcagctttactgaggtgcacacacacacacacacacacacacacacacacacacacactgcccgagaggatttggagtgggagggctgcccttcctcactgtgtcttgtgaattcatgtctatttctgcagtcacttctgaatcacttgcactgtttgggaaatgccaggtttacaaaaaataagtttagaataaaacaaaatctggcttcaaatgatcccagcgtgtctgactgtgatttctttgctgctaagaactctgtaagggcctgaagagggaattccaatataatgcaatatgagcgctaaagagcacaccaagggctgccgactcccatgggggcaccccacgtgatggggctgaacctgcccttaagacataatttggacactaccatctatgtgtattgcctgcccgcctggggctggacctggtgtctatctgtttacagcccaatgaaatgggcgtgttccttatcacaagcagacctcttccacatgtatgtaatgtaagtcactaagcatttgcccaggcaaatttgttgtatagccaaggatagcccaaattttaatatttctgcctctacctctagagtactaggattaaaggtgtgcagcagcacatccggttttttgaaggcgggaatctcattctaagcaggattcctccggctgcactgacgtgctcagcccctctgtaagctctctgccggccctctcccacatctacagacacttcattttcttagattttaaatctctatttgctaattacagcctcattcttatcacacatacttttaatatatgaattttttttcttttttccctagatattactaacaaaggtctacctaatatgttgcttgtcttcaaaaataagcctctggctctcttatgtctgggtttggctttctcgttcatcagtcacaacttccaggtgtacgaatatgttctctatagccgtcgctgttaacttcacccaagggctggcgggccagtttggcagttaagcactctctctctctctctctctctctctctctctctctctctctctctctctgtctctctctctctctctctctctcacacacacacacacacacacacatgctggctgctctttttttcctctaacgactctcattcatgggcccatgcatctcattagttatttatttaccgtgggccagtggctggtgacttcctttagaaagttctttgtggtaattctttgaagcctaggatgacatctgttcctgcagagagcctttgccttcacctctgccaggctcccatctgggatcaggccttggagttttaatggaccacccatggattgggcacagaaaatccactccaaggacagccgtgcccttcctttctctacagggtgggattcacacatgcccccgcacacggccctgtgctctgcaacacacctcacaccattccacaaagagccttggtcctggagagtactggccaggggcagaatgcctacttctgattggctcttccatctgttcattcattcattcattcattcatgattccggatttggctatgtagcctggactgggctggcactggaatccctctgcctcgacctgtaataaaatcagttgtgtgcctccatgcctgtcactttataggccatggatccctacaaggccatgaaagctgaacttctgttttgtatgtgtgtgtgggtatgtgcaacatttttactgtgaaacaacaacagcaaaggaaaactaagcatgcaggaaagtagaaagaattttaagtaaacaccaagccctgggcatctagatttacacccgcattttattacatgtagtttgtcatttctccaccaatcgtctttccgcacactcacgtttcatgctatccaatggaacttatagctgcaacccattctactctggatgtcagtagattttctgtttgaccggtaaccatatttttcacctatgatgtctatttgactcttttggaaatctgcttgggtggtttctagtctttttttttttaaattttcatctatataagcacactcatcattcatttctttaaacatacaaagctttcgtgatgcacacgccactcctgagagctgaggtctctgttgccgtttgctctgctgtttttgaactcgggtctattccctcatattttttttaaccttaaaccatttctcgtcttccttagaaggtatctgttggaacttgaagtggtttccccatagaacgtttccatttgcttctgcaggaagtccaagagactcaataactggtactgttttaaattaaatcctcgaggttcccggcccacccagctggtgagcagtcatcttcagagcagtctcttctcctgtccaatgccagagttctggttctgcacttgcctggtgtcctttggagggcagcaagagatgacttgtgactccaccgtgccacccttgctttcctgtctcagacgtatagaaaggagaccctccagattcctccccttgcctgatccagggctatccccactgcctgtgctccctggtgaaacagacactaaaagtcaaggtggcctggtgtggtgatgtgtccagagcagaactgggctttagcagtctgcttgtcaatcaccctctccaggggctttatagtcttgccatttcatcagtaatttacaaatacaatgtttcaactttttaaagattacacttgttaacttatttagtatctgtgtgtgcatacatgtatgccagctagcagacgcgtagaccacagcattcatgtggaagtcatccggtcaagtcacagaaacttttcactcctaccatgtgggctccagggatggaactctggttgtcaggcttggccgcaagcctctctacctactgagccctctcagcagccctcagtgtctcgtctttcattttctatatatctgcatttgccccaattaatctaattgggggctggagagatggctcaaggtgaagtatgtgtgctactcttacagaggggctgaatgtggttctgaacacagaagtctcaggactgcctggaattccagttccagaggtttgtgccttctgctggccttgcacgcatgcacacacacacaaacacacacacacacacacatctctaatgccagcagtcaggaaactgagacaggaggatagccttgagtatgggaccaatctgaactatataaaaacacagacacgtacatacacattcacacacacacacacagaagggaaagcctgaaagcaaaaggctgttatagcacgtgtacaccagggtaacatttgtgaacattatttattccctctgggttttccattcaccagagatgccttttggttttattaatgatgatgctacagatgtcgctactggcagtcactctgtatagtgtaaaacttgtttgatgtaatgatcaagactagttgtatgccagacctcatgtgatccagcagaccaggaagggaggtcgtcttgagttagtgcgtgtttaatgtcagctgcagtcattattggggttcatttcaatgctgcccaggtagacacaacatgtattacaagccctgactccctggaagtgtatatggaggatgggatctgtcacacaactccgacagatgtgatctgcccctatcgggctgagaaagctcactgcttaccaatgacatcatcacagcactggcgatttgtggatttgaagattttacaacttgacaatccacaggattcagacactgacctttggcagtctctgtcctgcggctgggaggcagactctctcaaccaccacgccaagagtctcatttcctgaacttgctctgaacccagaatgtacatccagctccaagttcctcctcattaaattgtccacagcaatcagaaatgaccaggtactccgtacccttcagttcctggcactgtccctagagtcaggacgaaagctattccgcatctccgtaactatgccttcttcgtgctagcatgcccgattctgaaatccggccatgggctgctggagtacccgcttacttctccacagatcctgtgtcagttcttttccttatgccaaaacaaaattcccgacaagaacaactgaaggcctggtttatttgggctcattatttaagggtacagcctgtcatggtgggataggcacaacagagggagctgggggcagctggtcacattgtacctgcaatcaggaagcagagagagagagaaaggctggcggtgctcagctctcgtctccatctttattcagctgggaccctggcccatgggatgttgctgtccacacttagggtgggtcattaatgaactagaaacccccttagagacattcctgctttgtctgtaaggtggctgaggactctgtcaggttgagagtcaggattagccaccacaggggccctctagctaagtgctgagttccctttgaaactaactccactcacgagggccatcatgagttaatcgactctcaaagcactcacctccaaatcctggggggtggatccagcttggtcacagggacaaatcgtagagcatgaacactctagccatagaactcacggacaagtgtcaattacagggaaaccctaaactgaacagagaaggaaatacaagcacagcccactgcacagttgagcgatgagcacatttatgtagtcatagtaaacactgcgtatcaaaccaaattactcttatcattagaacaagagggaatacctgggcatgatggccaaagattcaggcaattgaagcaagcagatctctgtgagttcgaggccaacctgatctacataaggtgtttgaggccagcaagggtgacatggtcagaacctgtctcagaatatatttaataaataaacaaatgggacaggaagtaggggctcagtagcccaggattccagaaatgaattagctcttcctcttctgggccagagagatggctctgcggttaagagcactgactgctcttccataagttctgagttcaattcccagcacccacatggtggctcacaaccatctgtaatggggatccgatgccttcttctggcgtctaaagacaacgacagagtactcacacacatggaataataaataaatgaataaataaataaataaataagtaaaatcttcctcttctactaaaggtagaatttcacctgaaatatcaagataaaagtgattgatacttgtaaagtagacagaagtcacatgcagtggtgcacacccatcatctgtcattccagcacctggaagcagagacagaaggtcatgagttcaaaactagcccagactacatagtgagtacttatcttaaaaaacaaagtgagatgacgacagcaaaatggagggctggagaggaagcataatggttaagaagaagagaagcataatggctgtgctttcagacgaccctgcacccacgtggtagttgactcacaaccgcctgtaactcctattctaggccagcactctctcctggcttccacaggcaggcatacgtggtaacagacattgatgcagatagcatacccctacacataatttttttaaatagctgtggcacgtgactatcattccaatacttaagaagtagaagaagaagaatcaggaactcaaggtcagcatgaggtacagtgaaaattcatctcagagagaggggtgggggaagagagagagagagagaatacacacacacattgcttatacaaacaagtaacggatgtgggccctgggagatgtaagcttctgccatactttatagagttacttaattatttaaattatgtgctttgtagttttcatatgagtgaaggcatcatttgtaacagatgctgtctgtgcttgaagagattataaaatgtaaggatttatctagggcagtctgcagtgtgtcggggaaactttatggagacatcgaatggactcgggacacacaggatgacagtagattgccccatcagagaacctgaggcagaggtttatacgcaaatgctttatcgggagtacagccacaggcgtgcaaaggcaagagtgtgaaggatgggaagcaaacaaaggcggggccacacacaggaggtcacagctgagctgcccgcttgcccaccctggggaatgtctgcaccagccagcctaggcaagcaagggcatgccattaactattagcccatctcttggacaccccaccccacctctgcaatggtcaaatgtgccttgctgtaaccaccctgtggggcacacggattgtgccacctgagaaactggcttggaactctgctgaggtggaaagtgttcagacccttaaaatttcaaaacctgagatttaaatctcatcccaagagcagcaggagggggactaaccccctctctatttccatgcctgcctcagaagtttgtcacctggggaccccaaccaggtggtcacaggtggtcagccacctggaattcttcctcatgcaaatagagcattgccagcaccttagcctccacccccaaaatcccgtcccgttcccaaggttcaaatagtccctgtccacatggaataaataacacaagctatttcaccaatgatcgtctgaaactgggtgtttttacagaggtgtaacacttctaggaggactacatactccaagcactcagggttggaccgctggacctgcctgcctggccatactcccctccctcttagaggctcacatcagagcagggccgaccatgctgttgccagtgtagccaccacggcgggactcaggacccaggacctgagccggccaggccaccagaacctctgtgctcctttcctaagagctgtgagggacataattctggcattccagctagcctggagttctgtggacgctattctccagaaggagaagcagaccacggaccccaccggttcaggagccagagagaggcagaacccggaaccacctcaccccacacttctcaacgactgcctgggagtcagctcctacacactgttttatgctacacactgttttatgaagcttagtccaagcgtggtaggagcagccgatagcaggcaagaccctccacggtgtctctgagggacacgatagaaccaacagagacgagctggctacactaggagccaaggcccgagtttgcacctggggagtccaccctgagaggtcatctgatgcacgctccttaactactggagttccaaactcacaatcctatggtggccgcagagccatctagccacaggccccccccatccagcgttcaaggccagtacagaactgttgacagtcgtagggagtttctcaccactgagagggctaagagcttcctgagtaacgttccaatacctcggtaaattgcaacaatgctggaaaatagagtctggtttgtactgacagattagtcaaattctcccaaatactaactagcctctctgtctcacttcaaaggtctgaatccctaaagggggccccagccctgagttggtcaatcaagaaagccgtctcccagctgccctctggcgatcagaatgcgtcactgcagttcttctttgatgtgtgtgggtgtttccaggaactcaactgaacttaactttccaaaaaccagtcagtgaaatagtgccaggggaacagcggtaatcaagaaattaagttaagcaattagggagagcaacgagaaatcaaaggttttgttttcgtttttgtttttttaaataaaatactccaaccataagcttacaaaatctaatttcaaataagacatttgtttctagctgcagaagtctgaagaaatagtgaaaagccccaaggtgaagtggggctgtcctctgctctgattcctggctgttccccaactccaaagttaaagacaccgcactgagagggtccctgaagtggaagatttgctacgatttcatcacaactacaaaaaatgttaaccttaaagatcccacataatcccaacagaggcgctctttgattctgaaatatagatggacgtcatgccgtgtttaatatagattacatgtgttcaaagatgtttaggtggtacccagagnnnnnnnnnnnnnnnnnnnntgtgtgtggtgtgtgtgccacatctgtggattcatgcacat

SEQ ID NO: 553 - DNA, 4700 bp, Mus musculus
cgcggaccggcgccggagggctccgcgcgctgctgctggcgctggtggccgcgggggtcccggccggcgcctacaacctggacgcgcagcgcccggtacgcttccagggcccctcaggctccttcttcggctacgcggtgctggagcacttccacgacaacacgcgctgggtcctcgtgggtgcaccgaaggcagattctaaatatagcacttcagtaaagtctcctggagctgtgtttaagtgtcgtgtccataccaaccctgaccggagatgcaccgagctggacatggctcgagggaggactcgtggtgcgccctgtgggaagacctgcaggggagaccgggatgacgagtggatgggggtgagcctggcccggcagcccagagcagatggccgtgttttggcctgtgcccatcgttggaagaacatctactacgaagcagaccacatcctgccccatggattctgctacctcatcccttccaacctccaggccaaaggcaaggtgctgattccctgctacgaagagtataagaagaagtatggggaagaacatggctcctgccaggccggaatagcaggcttcttcacagaggaactggtggtcatgggtgccccaggctcgttttattgggctgggacactcaaggtgctgaacctcacggacaacacatattttaagttgaacgatgaagcgattatgaacagacggtatacttatctgggctatgcagtgacggctggccacttctctcatccatccatcactgatgtggtagggggtgccccacaggatgaaggcattggaaaggtttatatatttagagctgaccgaagatcagggaccttaataaagatctttcaggcatcaggaaaaaagatgggctcttacttcggctcctccttgtgtgcagtcgacctgaacatggacggcctctctgacttgctcgtgggggctcccatgttttctgagatcagagatgaggggcaggtcaccgtctacctcaaccaaggacatggagccctcgaggaacagctgaccctgactggagatgccgcctacaacgcgcactttggggagagcatcgccaacctgggcgacattgatgatgacgggttcccagatgtggctgtcggggcacctaaggaggaggactttgctggcgcagtctacatctatcatggtgatgccaatgggattgtccccaagtactcaatgaagctgtctgggaggaggctaaacccgaccctgcggatgtttgggcagtccatatcagggggcattgatatggatggaaatggctatcctgatgtcaccatcggagccttcctgtccgacagcgtggttctcctcagggccagaccggtcatcacggtggatgtctccatcttcctgccaggctccatcaacatcacagcacctcagtgtcacgatggacaacagcctgtgaactgcctgaatgtcaccgtgtgcttccggttccatggcaagaatgtaccaggagaaatcggtctgaactacaatctgacggctgatgtggcacagaaggagaagggccagctgcccagagtctattttgtgttgtttggagagacggcagggcaggtctcagaaaggctgcagctgtcccacatggacgaagtgtgtcatcactacgtggcccacgtcaagcggagagtccaggatgtcatcagccccattgtgtttgaagccgcctacagcctggatgagcatgtgatgggtgaggaagaccgggagctgccagacctgacaccagtgcttcgctggaagaagggacaaaggatctcccagaagaatcagacagtttttgaaaggaattgccaatctgaggactgtgctgccgacctgcagcttcgggggaaactcctgctttccagtgttgacgagaaaaccccacacctggctttgggggctgtgaagaatatctctctaaacatctccatctccaaccttggagacgacgcctatgatgccaacgtgtcctttaatgtctccagggaactcttcttcatcaacatgtggcagaaggaggagatgggcatttcctgtgagctgctggaatcagacttcctcaagtgcagtgtgggatttcctttcatgaggtcaaagtctaagtatgaattcagtgtcatctttgatacaagccacctgtctggggaagaggaaattctcagcttcatcgtgactgctcagagtggcaacttggagcgctctgaagccctgcatgacaacactctcacactgacagtgcccctggtgcatgaagtggacacgtccatcactggaattgtgtccccaacctccttcgtgtatggcgagtctgtggacgcatccaacttcattcagctggatgaccaggagtgtcatttccaaccagtcaacattactctccaggtctacaacatgggtcccagcacccttcctgggtcatctgtcagcatctccttccccagccggctgtcacctggtggcgcagagatgtttcaggtccaggacatggtggtgagccaagagaagggtaactgctctctacaaagaaacccgaccccctgcatcatccctcaagaacaagagaacatcttccacaccatatttgctttcttctccaagtctggaagaaaagtgttggactgtgaaaagccagggagcttctgcctaacgttgcactgcaaccttagtgctcttccgaaagaggagagccgcaccatcaacctatacatgctactgaacacagagatactgaagaaggacagctcctctgtcatccagttcatggctcgagccaaggtgaaggtggagcctgccctgagagtggtggagatagctaacgggaacccagaagagactctggtggtcttcgaggccttgcacaatctggaaccccgtggctacgttgtggggtggatcatcgccatcagtttgctggtggggatcctcatttttctgctgctggctgtgctcctgtggaagatgggcttcttccgcagaaggtacaaagagatcattgaagctgagaaaaaccggaaagagaatgaagatggttgggactgggtccagaaaaaccagtgacccaccgtgccagtcatgtgatgccctcatgtccccatcaccagcctgtggtccttgatctttgtatctttcatatttggaagaaagaaatcttctccagatttttcggaggccccactgatgctgttctcttcctcatcccgtcaagcccggtgccgacctgagatggccacccctccagccaggtcacatgactggggccaccaccactccccttctcaagatgaacttagaactttggaaaggcaagctacagagcaaagcaatatttatggatgcaacattgcgtggtcaaccctcaggggaaaactgttacctaaaagtattttttataaatgtaagccttttatattgatcatgtctttatatttgtatcaatgttttattatttctattaaatagttctataattcactcaagcactgaaatcttggaaatacatgtccctgcatacaaattttaaaagagaaggaacttattctactttggaacttgttgttagggaagaaaaaaaaaacttgcagataaaacaaactgaagaaacctcatgaaatgaatccaccaagctggaggcactgggaaagcacaaaggacatggcaaggccgcctaagacatttattccccattgttaccacccggagttaagttcagagagcttgaagtatcggtgttttctcttatggacctctcactgggagattctcagcaggaactgggatggaaagcttggtttcctctcagcagttgctctgtaccacactgatacatgcagcaggcactaaaccctcttctggagtcagcaagtgctggatggacaactggtcaacctcagaataacatctcatcctaaacaacatgtgtcagagttcagagcccaggaccgaagctgtgctctctcagcaaaggcctgttttctctgtgtgtaagctgttaccttgtggtataatgttaacacaagactctccatttcctctgtcactcttgctgtccccaactggtggtgctgcagatacctccccagagaggatcaccccacatggtttgtgtttatgtcttaggtggaattctcaagagtcgaaccctgaaataggacttgggtgtaaataatttattgaggaagtcttcccagaaggtaacagtgaggaagttgagaatacaagacaggagagtacagggagccaggcaacagtgtcctttcaggggacaacccacgaggtggcttcaaaccagttggatctaatgagcaagtcagactcaggaacctggacttttgtgatgccacgcctgcaggggatataaactttctgcccttaggtcttgctgacaagatgactctgtcctctagaggagaactttggggggcaccctcaagtaaggagatccacaaatcatgcaaagaactctgagccaagagctttagtgctcccctcccccacacaagtgaatgctaccttcagctttgtgtagccaaaaaagccatgagtctaagctggtcctaggagtcaaacattacatctgacccatgaccaagtcaaactcactacaaggaaggggcagcccccccaaaaaaaaaaacagtgcacacccagctcttttaagttttatca

SEQ ID NO: 554 - protein, 1021 aa, Mus musculus
RTGAGGLRALLLALVAAGVPAGAYNLDAQRPVRFQGPSGSFFGYAVLEHFHDNTRWVLVGAPKADSKYSTSVKSPGAVFKCRVHTNPDRRCTELDMRRTRGAPCGKTCRGDRDDEWMGVSLARQPRADGRVLACAHRWKNIYYEADHILPHGFCYLIPSNLQAKGKVLIPCYEEYKKKYGEEHGSCQAGIAGFFTEELVVMGAPGSFYWAGTLKVLNLTDNTYFKLNDEAIMNRRYTYLGYAVTAGHFSHPSITDVVGGAPQDEGIGKVYIFRADRRSGTLIKIFQASGKKMGSYFGSSLCAVDLNMDGLSDLLVGAPMFSEIRDEGQVTVYLNQGHGALEEQLTLTGDAAYNAHFGESIANLGDIDDDGFPDVAVGAPKEEDFAGAVYIYHGDANGIVPKYSMKLSGRRLNPTLRMFGQSISGGIDMDGNGYPDVTIGAFLSDSVVLLRARPVITVDVSIFLPGSINITAPQCHDGQQPVNCLNVTVCFRFHGKNVPGEIQYNLTADVAQKEKGQLPRVYFVLFGETAGQVSLQLSHMDEVCHHYVAHVKRRVQDVISPIVFEAAYSLDEHVMGEEDRELPDLTPVLRWKKGQRISQKNQTVFERNCQSEDCAADLQLRGKLLLSSVDEKTPHLALGAVKNISLNISISNLGDDAYDANVSFNVSRELFFINMWQKEEMGISCELLESDFLKCSVGFPFMRSKSKYEFSVIFDTSHLSGEEEILSFIVTAQSGNLERSEALHDNTLTLTVPLVHEVDTSITGIVSPTSFVYGESVDNFIQLDDQECHFQPVNITLQVYNMGPSTLPGSSVSISFPSRLSPGGAEMFQVQDMVVSQEKGNCSLQRNPTPCIIPQEQENIFHTIFAFFSKSGRKVLDCEKPGSFCLTLHCNLSALPKEESRTINLYMLLNTEILKKDSSSVIQFMARAKVKVEPALRVVEIANGNPEETLVVFEALHNLEPRGYVVGWIIAISLLVGILIFLLLAVLLWKMGFFRRRYKEIIEAEKNRKENEDGWDWVQKNQ

SEQ ID NO: 555 - DNA, 388939 bp, Homo sapiens
gacatttcctgccatttgcgtacacatcccagcatagcattggggctcccctcaccccttcttgccccgccagggctgtgagtattctgtgtcgtttcccatgtgtgagaccctgtgtgtggatcccacaggcagattaggtcagaagaggattctgggaaaagaaaagtcaacctgtcattagagatcatggacagtgggctgagtccagcacaggactctgagagggaggcggggcaggaaggcagtccattcttaacatacttatgtagtcacttttctgtcttgaggcacacaaaaaaaacaaggtcatatcttttaatgtctcagtaaaacagcttgagccctccccttatcaccttgagaaacgcctcaggccttcctccaaggaaagacccccaggatgcttagtcatatccaaaatgtcaatccctgtcctttccaccttgcctttgcagtcagaacctccacccaaggccagaggatgccccaatgtcatgtgcactctatctaccccactggcatcccaggcagtgtgatcagggcttagtgtcctgcttctgccacctccgcaactgctggcacagaccttttcatagttgcagcagaccctggggcatgtggagggaggacccatcttcgactccccattgcactcagcagatgtggccaccttccagtatcactgactcagacacacgcacccagcccttgcccagggtgcaagcctgccttcaggaaggatgactgcacccaggctggctgtctcagctcctggactcagaatcactattacctcctcaaccccaacttcctgcaggagctagttcacctgttttttatgtcagggaccttggggccttccctgtcactggatttgattcggagtcatcccaatctcacaacatattatttattccccccttcatgtctttgaataaaattgatgcacccagaaggtataacatgtatatcttgcagcttcaagtacaagaggtcctaggcttcaacttaaaaactttctgggggaaggcataagaaggcttttcttgtgggagcgtgttaagcagcagaaggggtcccaaaacgtgtttagtgtttacccttccctaaagacatttgcttagagtttggagtacactgaggctgcctgaaagaagacagggaagaagctagaactgcccttccatttcctgcaaaatttcatctcctgccccactcccctactcgtaactctcctttagacacactcctctatggcagacaacttctgatacattcaattccaggtactcattttttggtgaatgttccattgcatctgaatgatattgaagtgaacttctcttacctgcatgtgtgtgcacacacacgcacacacacgcacgcacacacacacacgtgcgctcacatgcacatgcgcacacacacgcacatgcacacacgcacgcatgtgcatacacatgcacacacgcacatgtacacatacacacacacacatgcacccaaggtcaacaccttaaaatcccactgcatttaaaccatgagtgggtgggaccttgaggaaatcaccaaagatgtttcaggagtctccctctgatggcccacatctgggaagccctggagagatgtggatttgacaatttacgaaagctaaggtagagagggccctgaaaaaggagctggctagccggccgctgatgtgagagtgaggtcatgggtgcttgggttgtgactcacctctccagcccttcacagggcacctgaagcacctgggggtttgagggcttgaacacttagacaaaggaaggctctaaaatggcccactgaaacatgcagacaccttgagaaaagtgttttgagtttttcttttactccaaataaaaatagctattttaaaagagtggaataaatgacataataataatggcactaaattgctaacatgtaccagttgcttccctcatgctgcgatgtgcagagtggctcattacatttaatcctcacaacaaacctttgggtatgattccctgtaacaaatggggagagctcaaataacttctcagggccacatacctgatgctgtggactgaatgcatgtatcctccaaaattcttatgttgaagccctaacccccaattcgcctgtatttggaatatgaaagtaattgaggtcataagggtggggttctgatctgatagaattagtgtcctctctcttgctctcgctctcccctccctccgcctctctgcaagcacgaagaggtcatgtgagtccatagcaagaaggggaccatctgcaacccaaaggaagagccctcaccagacaccaactctgctgcccttgatcttggactttcagtctccagaactgtgagaaaataaatttatgttatttaagccacccagtctgtggtatttttttatggcagccctagaagactaatatatctgacaagccactacattgggattacgagcaccacagccctcactgttactcatcaccctaaactgcctccaacaaatatcatcattttaatattttatgttttgctaagccataggctagctttaatatttcaattgaagtgagaagtgtttttaaaacttggcattatgttgtacagctgtattctaacactgatggttgttgcttaaagccgtttcactaaatttagatctctggaaaaaaatttgtttgagcatggaaacaggttggaaatattgcacccaataataacagtttaacttttggcttatgaaatacttcagtgggaaagtatttgctcaaatctctgcctgctattatagttgaaggcttggcgatagtatttgcccttcctctgaactttctggatatcaaagccacgtggaagtatagcttgtcttatgtatgaaaaacagggcaaggcaacttttgaagaattgccgttaagaggtgcatttagctgtgtcaatcatttagacaacgattatctggtatgtgaatgatccaaaccctttttatttttttctgcctcttttgaaaatactgtgaggagccatctggctattgaccacttcttccttccacatgatggctggtctacctacctcagttggcaaagtcccctcaacagaggccagggccagagggcagggcttgttaatagatgggaatgagagctgcccttggctcctctttctttctctgttgtgtgaaggtcaagttgtctcctcatttggagatcagatagctgtgtgtgcacagctcttgatccacttccctatttctaactttgattagtgactttggctttacggaggtagcatcttctacatccactgctggatgtagacatccactgtgtctctgtagacaattcaagcagtactaaaggagtgatagatagacgatagatagatagatagatagatagatagatagatagatagatagataggcaagaatagcccataatctcaaccataatcattattaacatttagggtaaacttccaaatctctttctttgtgcatatatacatacagatgcatagaaatttacatataccagattatagtaggcatgtccttaaggaacttgagttattacccttgttatgctgcagggattgttccttgtcagtgtgtaaagttgcatgccaaccttttgtaacaggctgtgtaaggtgctgattcaaccaaatagtggatagtataggctggattgtgcattgttaagaaccaagtggctaagttctttagggctaactccaaagaaaacccgacagttggcattagatgccatgtgccccaagaatgagagaggatgaactgactttatgggccttgctcttttggagggattagaactacagagatcacttttggggggagtgcagtgttcatgggctggttatgtaataaacggtatattatcttgtaatatatggggtgtgatgctgtcttctcttctaaactgaaaaaacttgattgcagaaacacatttggccctaagagttttggacaaggattgtgaacccatcatatggtcagtcctcatttcacatggttctatggtaactgagataaaatctcagactgcatcttcccaactggatcactgtgaggtttacataagataaagtgatctataacatgcttagtgcagtgtgagacacatagtgagtgagccttccttgctgctagcagtcctatcaccttacagcagcatctgctctgctcgagtgtctgtacccgtcaggtctctgcaaaccgggctctcataatcagtggggagtgtctaaacctccatttagggtcctcctacggtacactcacacagaccccagaaatgcaagcagtcccttgggggagacaaggaggatgttagagagttatggttgggaagctttgtcagggagaaattagcatttcccatcggagaccatgggaagggcactctagaaaaaagagcacaggaaaaagtatggctcaatacagggtccagaaatactcacctggaggaactatgtgtatttcctgctatagtaatatagcatagtatttgtaatgaaaaattgtattctaaacctaaagattactaagccaattggcttgtattaagagccttagatatctacctagctttgacctagtagttaagcatttaggaaataatgagaggcagataaaaatctacaaatgtataagcaaaaagaaaaaaaaagatattagagaaaggaaggattaaaaagactaattaatcttaagagtttttcctttttcttttctttctagagacaaggtctcactgtgtcatccaggctagagcatagtggtggaatcatagctcactgtagcctccatctcctgggctcaagtgatcctcccatctcagcctcccaagaagttaggactacaggtgcataccaccatgtccggtcacttttttcgccctagagatgaggtctcactatgttgtctcaaactctggcctcaagcaatcttcccatcttggctttccagaagttgggattacaggcatgagcaactgtgtctggcctccaagacttttttgaggcttctgaaaagccaatgttgttttcaccccaacatttaatcattccaatattcctctctgcagtgaggcaggagggagcagagcagtataaccatcacttcttttgcattgttacagtagcagtaacaattcaacaaagtatgtatgtaactgtttaattgtttaacaatgtaactgtttaacaaagtaactgtggagagcaattttgcacagcttatagaaaacgccaatgctaggtgagctgatagagcatgctgttcagtttgcagccactaaggctaatggaaaaccttcagattccttcttgaagtgagagcataaaggaatggagggcatttggttgccatttccgttgggaaattggacaagaggttcagtttttcaaaagtctccattccataaagcaaatctacattttgcatggccaggtttgaaatagtatgcctctcccctccagctggtgaccctggagacacgcccttcaggtcaagtctctgtaaaacagcttattctggcaactaggaaattgagctcactcttgagctcagattatacgaataactaatacatgtttagcgttttatggttaggaaatgctgtcctgagaagctcatcaataggtttattagttattggtatccttgttttattgatttactaaaattacacagttgttcgggcctgggagttaaattctcttcaccagatgccaaatcctacgtttttcttaccacatcatggtgccacaggttaaggaatacagtgcagggttctgaatctctctcctgtaggacagtgcttcccaagcctggctacttgacaaatctcccaagaggtgttggaaatgcagattcctgggccttgcccctagattctgacctagagtgttattagtaaatctgtatttttaaatagttgcctggtggtctaatatacagtcaggattgacagctactgtttagttaaatcaaacaccaatgctataatttttaaccgatatcatttttagggtttggtttccaaagttggaaatcagtgtgttttagatcagtggtttcctgtcttctaaaacctaccttacctttaaagaatctgttgaaatctgtggatctttccctaagaaacacacaaacacacacatacacacttttatatataattctagagggctatattagtttcctgcttctgctataacaaatggtcacaagcatagcggcttaaaacaacaacatttattatcttacagttctggatgtcagaagtgggacaggagtctcactggattaaactcaaggtgttgcctttctggaggctctaggagataatccattttattgtctcttccatcttctagaagctgcctgtattacttggctcatgggtcccttcttttatctccaaagccaacaatgtggcatctctctgaccccacttccacttcacatctctttctcgtgctacagccaaggaaaggttctctgcttttaaggattcacataattagactgtgcccagccagataatcctggaaaatctttccatctcaagacccttaaccttaatcacatttgcagtccttttttgccatataaggtgacatattcacaggttccagggattaggagggggactattagtctaccaaccacaggggatcttaggacctctgaagcaacatggaaaatgagtgaactctaggttaggagcatctgttctagattccattcattctagatgttaaatcaacaagaaattctgcttgcctacaaataacagaatccctaaaagcagtggctcttataaattaggtgtttactttttttcaggtagtaagaagtccccaggaaggcatcccatgtcaggtgcagcagttctagcatgtgacagctgaagtctctgcaattctcctggcctttcctttgaggtggccctcaaaacagctgctgcatctccagccatgacctctgtgcttcatgcaagaggggcaagggcacaggacaaaagccataagtcagctgagttgcctctcctttaagaaacctcctgagaagcctaccacccaaataacatgctcatatctcattggccagacactgcacatggccactctgtctgcaaaagagactgggaaacatagttttatttatttttaaagctaggcatattaacactccactaactctgggctttgttagtaaggaaaatgggaagtataaatattgggaagatactagtgctctctaccacagatgaaaacttcagccaggcacagtggctcatggctgtaatcccagcactttgggaggccaaggcaggtggatcacttgagctcaggagtttgacaccagcctagacaacatggcaaaacctcgtttctaccaaaagtataaaaattagccgggcatggtggtacatgtctgtggtcccagctacttgggaggctgaggtgggaggattgctggagcctgggaggtcgaggctgcagtgaacagtgattgcaccactgcactccaacctgggggacaggagcgagacactgtctcaaaaacaacaacaaaaccaaaaaaagaaaaacaaaagaaaaccttgtgttttgtgttctacaacgagaattgatcatttttcactctcacacaaccaaaacatgaagaaagttaaaagtctccttcaaaatctcccccatagtgcctcatcctcttactaagcttgcttttctttaagcaggtcattctttttttttttcatttttcttgagatggattcttactctgtcacccaggctggagtgcagtggcacgatctcggctcactgtaacctccgcctcacaggtaaaagcagttctcctgcctcaacctcccaagtagctgagataacaggcgtgcggcatctcgtctggctaatcttcttatttttaatagagatggggtttcaccatgttgaccatggttggccaggctggtctcgaactcctgacctcaggtgatctgcccgctttggcctcccaaagtgctgggattaaaggcatgagccaccgtgcccagctattctttttctttcttttcttttttttttttttttcagatggagtcttgctcagtcacccaggttggaatgcagtggcgcactgtcggctcactgcaagctcgacccctcagcttcaagcgattctcctgcctcagcctcccaagtagctggaattacaggcatgtgccaccatgcttggctaattttttgtatttttagtagaaacaaggtttcactgtgttggccaggctggtcttgaactcctgacctcaatccacccacctcagcctccccaaagtgctgtgattacaggagtgagccactgcgcccagccagttcattctttcaacaatgtttaagcatctacctaagcctggcactgagctgggccttgggggctacaaagatatctaagacttttttctccttagagagctataccgtctatggagagggacagagagcccccaaaatgatgaacatgttctaagtgttgagatagaggcatgtgaacactctttggcagcccagaaaagaaaggggaagaggaaatggcacagaaagggtgaggcaagaactggcctggaagtctaggatggataggattttgccagttgaagaggggtaggcacatttcaggaagaaagaacagcgttggagaaggcacagatgtgtgtgaaaacccctgttggacacgttcaggggacagctagaagttgtgtgtggatacattgtagggtttgtgggaagtgagtcaggaaaggggcataaaatggggctggaaagagagatggagcctccatgtgaagttatgctaaggagatcgggctccatcctataggcaggagtaggtggtggggggcaacgggaagttttcaaccattatccaaactctgttgtagaattaaaaagtggaaagaagagaacacaggcagggaaaccataatagtgtggtcagacttcaacatgatagcagtcaattcagtaggaatcttgaatttgagtagtcaagttcatagagacagaaggtaggaaggtggttgccagaggctgggggtggggatgggggtagggttagggggaaagaggagttattgtttagggtataaagtttgttttccaagatgaagagttgtggagatggatggtggtgaaggttgcataacatgcatatacttaatcccccgaactgcacagttacaaatggttaagatggtaaactttctgttatgcatatttacaattacacacacacacacacacacacccttcagtgcacgcaaaccctgctggactccaaccttcagagcttccgatttagcagggctgagtgggacctgaggatttgcattttctgacaagttcccagatgacgttgatgctgctggtccggagaccacacttcgggaatcactggtgtacgagaccaagtgactagaatatggaggggtgctctgctcgcttccacgtggctactattgttatgaacaacaacagccggcgtttactgagcactgctcctacagcttatctcacaactgggtgaaggagcagaggatgcgcagggctagaacctggagtctaaactcgtccttcacccgggttgctctggatcttactggttgtgagacagggagggaaagagagacaaaggcagggagacaggcccagcagggccggcagagcctgtagtgacggaggggagcagccttatctccgggaacccgagcgccccgtgcgcggcggggagggggcagttcggggcgccccggcgggtcccaggggctgactcccgcccgggaagtgcgcgcagggctcacggcccgcagggggcgctgccgcgccgtccagccgccgccgcccgggccgcccacctcgcgggcgcgcccctccgcagaccagcgccgcccggcccgggacccgctcgcgcagacttctcgggcggactgaggacgccgccgctcggggccgcccctgtgctcgccttcagcgcccgctcagcccgccgtccgcgccccggtggcgggcccgacgcccgcattccgcccgtgtccaggcgcagagctcccgccccggggagcttcctggccgtcggcgggccccgcggcccgcgcgctcggcgccctgctcgccgggcagaggggaaggcggcggccggctggggatgggcggcccggctgcgccgaggggcgccgggaggctccgcgcgctgctgctggcgctggtggtcgcggggatccccgcgggcgcctacaacctcgacccgcagcgccccgtgcacttccagggccccgctgactcgttcttcggctacgcagttctggagcatttccacgacaacacgcgctggtgagtgcccgcccgactccgcgaccctggcccgcgcggccaccgccccggcccccaggccagcgccgccgccgcctttccggtctcttccacgccgccgtcccgagggggcgatttaaatgtctccgttgcgcgcggctcggccgccgggggacggcgggagaagggaggacgccgtccggggcccgctaaggtcggggtcggcgcctggaggcgggcgggggcgtccgggtgcctccctggggtcccagcccagagcgtggggggagagccgctagagttgtctcctccgccgcccagctagactcggcttcactctctgaatcgaaaagtaacttggctcctctgcctccgggcggccgccgctggcccagcgagcctcctgaacctcgcagggcctggaggagtcggggcactggagctgcacccctccccggttttggggaacccctgaggaaggagtatagcctctccagcgccgctgcgcggggtggggctccccaggggcagggtgtctgggatccactggggcgcactggagcccagagccccggcgccccccccccccccagctcctacaagaccctgggtggaagtggagcggagaagctcctaggatatagggaagaggaaggtgagggagcacttcccagtgacaccgccggtggggcaggtagttatctcttgggagagcctgagtctcatctcatatgggccattcgacccggagaccttcaccagaagccttaagagagagacgtgtttctatagtggccaaggggtccagttgtcccctgagtccggaggggtgggcctaagaagggggcagctctcccccattaagcaccataagccgagtggtacagagcttgtgcccaaccccagcagagaagcactaagggggggttggtgccctccttggccacatcctctggaccagagggtataaacagccacacagtggtcacttcttgataggagagagagttaggctgcgggaagttcccccgttcaaggtcgtgcctcatgggggcccaggtgacagccaggccggggttgattttattgtgtattcaccagcctgagcgtccttaggggtggcaggcagggaggtcgaggtcactgatgctggtgctctcagcatgtagttatgcaggagagtcactgctctgtattggacagaggctgatggaaaagggtggtttgtggatcgcagtactcaagcattcctggaaaaggggactctgagaccagcccactaagaatcatgctgttcaggagatcagccttcaagagaaccagttttcaaagccctcacatagctctcgcccagctccacatctccctctctcacttactccagttgctgggtataagaccgagtgtgtctgttcttaacacttgtcaaattccccttttaaagcggagcaggctgaacatttttctgtgtcctgcagactcagggtctgaggttgaagaacacatcccagatccccacactaggcaccaggcacgcgggaagcactgtcaaaaatgggagggctgctgtggacagcgggctgctgagaaagggcgggcagctgagcaggcagccaagccagccggagcattgtgtgtgatctgcaggctgaggctggctcaactgccttggagctctttgacagctagagggagagaggccaggccactgtcactgtggatttgcatgggccacaggtcaaagccacactgcctgggaaaggaatgggtagagacgagagcagatctgacagagaaaaggtgttcagcctacttggatttaaaacggggatgaagaaaagctgtgtgacatgagcagatttggccagtgtgggaaaagacagtctggccttcagcttggtacccagggtaaatggtagggagtgggtgtggagcagtaatgctgtgcatattcttgttgccagttgagatgtgggactggtatttcaggggtccatgggaacccatgtgtctgggctgctgagctcaaaagtgccctctcttgttctgatacaagctggctactctttgtattggagtgcttgtccccatagctgttcaggcaccaacttaactctactgaaatctttttaaaataatgcttctttttcctccctcacccaccatattgacttaattttttcttagattgtgttctccccttgatttctgttctcatgctgttgttttcaagtattttcctccccatccttttttctctttccctttttcccagtattctttgtcttagaccttgaatgtattttttgctgtatgtatgcttgaatgtgttttttacccaggcttggtaaactatggcctttggagcaagtgacttccaacatcttctttctcctttttctttcctctagaggctagacttattgtgcaaggctgctgaaacttaagccaaaggattcttgcttgcataggcccctattaatgccttgtccccaattttataattttatgttaattttcttaaagttagtcaccctaaatttgtaagatcaggtcctgtgaattctggatctgtcctaagtctgtaccttaacttcaactgtggggttggttgattgacttggtaactgattgttggtcgcttactcctaagcagtacctgagccctggatcttctagtcctgcttgagggacatgtcagtcattttcaattattcgtgattgcaaacagcagcaggggtaaacaacctttaacgaaacccttgaggacaatcttaattatttcctttgaataaattcctgggcttagaattgctgggtcagagaggatggaagcttcaaggcattctttatgtattaccaaagtgccagtgaagtgtgtgtactttagaaaaatacattaatttattcagacactggaggcttgggagtagttttgcaaagggctgctctagtgcactgaaagagtatagaacctacatgggggtgacttaaaaggatcacaaatactcgtcaaaatgagtgaggaaggtaaaatatagacatgaaagggaaaagcagtatagcaaaactttgaaaggaaaagaagacatgttaattaagccttgtatcttacgtctctcttctcgaagaaattattctttgttacttaattcaatattttgcagtctaagatatttgcttcatgctaattaactacctgttttacaggtgaaaagatgtgttgtctctagggaaagggagggagaagaatgtgctggaagtggtagggggagagcacagaccccaaagtcagcacggactctgcaggcggcagagtagagcgttcccatgttgagggacctgcgggtgtacatctcaaagcatgtgaatgtgctctgttggtggaactagcacttctctaatcccataactgagcatttctctcaattattttgtagaccaaaattgtcactaatcggaggatcctagatccctgtgtaagtgtgggggtgatcttgcttttcccagccctggtgactgaacccagctctgtagccatatcacactgagcacagagccccagacccagcttctctcagagtacttgcttgagtggtcccgctgtcactgtgctctgggcagtgagaactgtccccatggctagatggaccagaatatcctggacaatgttccagatgacgtttgtatcagctaggatacaaacatgcaagggactcaattttctttttttctaataacacccagagtgtctgcctgcccagagccagcttcctctcctatagctcccactccctgagtcttctggcgtcctttgaacaacaacagtaagtgccagggaacatggacaaagccgatttctgtccccttcctttagacatggaccggttactcagctgcagggctgacaactgtaacaccctgtgatataaataaatgctgcctggctggcgtgcagcctccagagcggacgtctttcacaccccaccccgtcccctcctccttctctgccccagacgccctggagtccaaagtggttgggtgcactggcttcctttctggagacgtgcttcctgctccctctcctgggacacatcaagacggctgtgcttaggcacagagcgagtgctcggaaatggaagatgtgctgggctttttgctttgttaaagttgtcagagtgttgttcagtgaggaataggaggcaattccaagccaaggagaacatatccttgatttgcatgaaggttgagaattaaaagaacaagctagatagttctggtgagctgtctgatgtagtcaccactagccagatatattggtatgtaaattaactaaaaataaaatttaaaatgcagcttctcagttgcacttgccacatttcaagtactcagtagccacatggggctagtagctactgcattggacacaacacagagagaacattttcatcatcacggaaagttctactgggcagtgtgggtttagagcaatgatgtaagtcttaaagggctagacaaggatcaaaaggagaggtaagaaaaagaaaaagaaaaaaaatcaacccatagcatatgtgagtactaaaaccgaaacgggtgcttacatctaactaaaaattattgcctgctgaagaggttgaattgtctttctactcataaaacaccgcagggcctgatctatatttagggctgggggttcaacaatgaaaactttttgctcacaatctgacaggtgagaaaattgtggggttctagttgtgtgtctcaaatgaaatttaagatctaggctctgatgggggagaggcttgtcctcaggcaggcatgagttgttcagaggggcagaagagaaactcctgtgaagggaaaacatttagaaggggagccctgggatcataggacctgctgcccctggccctgcccgtcttgctgaggaaacacccagaaatggtggtgggagccctgccttctcataacctcagtggtgagcatctttgcagagttcctctgtcctgtgccagactctaggggaaggtgtaggtccgcttcctcatttgaatttttctagggaaatggcattttcagacattgttcctggtcctcactcaccctacagagcctgctttctcaagctctcaagaaggaacaacacatatatgaggcctgagttccaaggggatccaaaaagcatcttctcggggtttctgggaaatttctctgaagatctggagaagctggcaagggtgctgttttctgagctagtgctgaatgctggctgggggcagagacagctgtcttgcccagtggagaaccttccagggcaagaagacagtcttgtctcaaccagtcattaacggccctgagtgtgagagtgtgaagggccgggccccagccagctctgattccctggtgacatgctgctgttcaggaaatggtctcctgataacttctattgtgatttgttcagggaaaatgttgtttttacatttgttaaaagcagccatggtgttctctgaaattccttgctttcaaggggttgcatggaattttaacaaccaaaatgaatttcgtcagatagtatctacaagaagtcagatgctttcacaggcataatattctttagttgagtctttgtaacatcctggtgagtggtttccagtttgctatttggggaactgaggcttacagagttacacgccttgttcaaggcccaccccagcctgagagatcaatgcacattcactgggggcttgtgtcagtttgcatcctttaggaagcagatgctaggacagagataggagtgtgagagaattgttgggggcgggtattgcctgtgaaagacaaatggggaagttggatgggacagagagagcctctgactctatgcagatctgattaaagtctcagtcaactcaacagagatcactgggcagaaatagctgtcctctgccagggtcaggtattggctggagctgtctgggaagagcacagcctcagctggaatcctgcagcagatcccaagaaagctgcagctggaggctgtcagctgacattccgccttgcagctgaacagcatgaagtgacccacacctctgtggctgccctggagcctgccacgcgtgaatcactgtgttgggagggtgtgagatgtgctccttggcctgcagtgtggctggggatcatctttgctcatacctctgtaatcagtgtgtggagcgtcaggactgacagtagggccattgggactggcccagaaacagaatcctgagcaatcttgccaccagctgactcacaaggtgcctctttctgatgtcagagaagtcacaggtgatggatttcagaagaaaggagctctgctttacgctgagccaccgagttctctgaactgcaaatccttttagccaagtggatttggcgatcaaccaaagcagaataaaatgttttatcccaaccttcctttttgccagaaggagtcctaggaagccgatgtaagtccaagattgggaaaaatctacagtctttgaaaccacgggctcacttggtccaccaatgtctgttctgaccaaaaaggacttctgtgttgagtttaaattagcaacagtagcaacaataacaccaaaagcagcaacaatgtatctgaatattcagtagatgtcaagtgctatctacattggtactcataccagctcatttaatgttcccaacagtcctttcagctggtagccatttgggctgccataacaaactgttataggttgggttgcttataaatgacagaatttatttctcacagatctagagccttggaagtccaagatcagggccccagcagatttgctgtctggtaagcacctgtttcttggttcatagatagtggtgttctcactctaagctcacacagtgaaagggatgagggagctctctggggccacatttataagggcactaactcattcataggttatatcctcatgacctaatcacctcccaaagtccccacctccaaataacattaccttggggtgaagatttcaacatatacattttgagggaacacaagcattcagtctgtagcagctggctatcattttatccccattcatggaggggaagctgaggtacagaggcattattgcccaagttacatggctaatgagttgtcgagcacaggcctgtgcctttgcccacccaggctgactgcctgtcaggaagtcaagaatccgagtttgggggcttcagggcgctcaaacatctgtcttgtgaagttctgttctgcctgctttcctggaaaagttattgaattgcaatagcagtagcttctctgcggcaccctttggggatgcttattcatgacccactggctactcttggggggatgctagggttctgttttctggagatgtttgatcactgagtgaacagggacccaatgattctgccagggacatttgaagggcctcttctcacaccaaggctgtctagcattaagacagaagtgtcccaggaaagatggagtactctgcaatattccatgtatccctctaacctcctggggctgctttgttactatccccccatccactctgagttctactggctcccaccacttatttaggaatctctgaattggggaaggtagccatggtggccagtgtttcagaatcactcctgggtttgtaactttattaaagaaacccacacagagtcaaacttctgcaccagtgaccaacaatatgtgagaggatgatttgtatcctcaaatatttgaacacttaataaaaggcatgaatgggtacaaaaaattagaaagaatgagtaagaatgagtaagaactagtatttgatagcacaacaaaatgacaatagtcaacaataatttgattgtagtttaaaaataactaaaagagtataattgaatcacttgtaacataaaggataaacgcttcaggtgatggataccccatttaccctgctgtggttattacatattacatgcctgtaacaaaatatctcatgtacctcataaatatgtacctactgtgtgcccaaatcttttttttttttttttttttgagatggagtcttgctctgtcacccaggctggagtgcagtggtgcgatctcggctcactgcgagctccaccttctgggttcacgccattctcctgcctcagcctcccgagtagctgggactacaggtgccccccaccacacccggctaattttttgtatttttagtagagagtgggtttcactgtgttgggcagaatagtctcgatctcctgacctcgtgatctgcccactttggcctcccgaagtgctgggattacaggcgtgagccaccgcacccggactatgtgcccaaatttttaagaaaaataaaaaatcacggaacaaatttcctccatcttagctgatctgttggtgtgttaaggccacctgggagatggcctttcctaccccttcctatctagtgtccaagtgctgtgatgtatgtggatcccagagtaaacttggtgttgtgcagtacacaccagtaggcagcattgcagagggtcttggcacctcttttgcaccaggatgggtcctagagggtggatgttccagattcagctgagtagtgttcctgtctctaccttcattgaatccctggttccacagcaacaaccagatccacgatttttgtgccataaaagggggcactgctgagatgcacaagtgcctggtggccaagagagtgggctccagcattagccctgccctcagcctgccttactcagctctctgcttaggagctgtgtgatcttgaccaattacttcagctgtttgaacctcagtttccttttctgtaaagagtaataagggtacatccctcattaggttggtgggggcattaaatgagatgatatctgcaaagcccagagcacaacacggcacacagtaagcccttgatagatgctcgtagttatttctcttgttacttgatctgatttatgaaaccaatggtctttttcatcctgacttgagatgctgagttttctttcagtatttttgttgattcattcatttattcatcagactttgagtgttgacactcaacactgaaatgaatgagatattctaacatagacacactcttcattatgtgtggcctctaacatttttgttatgctctacataaatctgcatttttgtgcattcatttacaccctgtctgcttccaaaaaggatctgagatggctactttaaatggagatctttgggattgtaaatcctagaattttgcctgcctgtttcttctctgtgctcttggaaagccaaggagcagatgggaggccacccttgttatggggagctccagctcccaccccaggctccagataagtctgggaggtagatctacagttccaggatgggatacttttttaaaaagtaaatgtaaatgtattgccatatttctcttgaaaaaaaattatcacaagaaaccaacaagaagatatcaaggctttttcttagatctgccagaagtctgtaatttgctctatcccttggattttagtgttcacttgctgctttcagatgtggaaggaaaacctcagtccttttgccttgcctccttctccagttgcctcccctcagtgtgtctgccaagacctgagccccaggccagggcagcagcctctgacctttcactccctaacacacaagctggggaccaatgtcactccaaggttggaccctgcccccgtgcctctgcttttcccagttgggcatggactccaccaatttcattctctgacttagcgttatgtggtgtggattgtactgctctccctccatttactgtaacctaggctctccaggataaaaattattattgccaaccttttatgaatactttctatatgccagaaccactgtgttcatagttccctttatgcagagcaggctaccactcccgaagcacagagaagccaagtcacttgtccaaggttacccagcaagtaagtaaattacagagttgtgctttgaaccaaggtgggactgatttaatgctaaactgactgttctcagggttagccatgctaccctccctacctccacctccatcaaggccctgtccaaggtatcaggtttctaaggaaaaaggagaagggccctgaaaggaaaagggcttcttcggagggcatttgtgtctgctcttggccttgcagataaaataccataatctactcttgcaaatcaggccatcctggggtgcatggtcccccaaacactttcatctgccttttccttttgtgcctcatcactgccttgggagggggatcatgcatttgttattatccttgttttacagaaaaggaaaggaagggtcagagtggccaggggacttgtctaaagtcacatagctgtagctggcacactcctgggtgtgacttcggatacactctttagggcctattctactactccaccatgcctgtcccatctcagggccttcagtaaaagtctgtggtcctggttggtgatgagattcctttgagggagggaaaggagaccaggtagctagaggagccatagcaatagttgtcagctgcatagttggataattggtttggacttagcgggaattagtgggcgatggaattaccacggtccagattccgtcagaagtggcatgccttagcttgatgacgtatctgttttctatcaccacaatattgctgcatccctaacaaaccaccccaaaacttagtggcttaaatcaaccaccacctgtagcttattctctggttggcagcttaggttgggttcagctgggtggttcttctgttctctccaggactcactcatgcatctgtggtcaacttctgggttagctggttggctggctggcaaaggatggcttcagctgggagggcttatttttgctccatatgtatttcatcctcttgcaggctagcctgggcttgtacacatggtggttgggtagggtaccaacagaacaatcagaggcttgcatgatttcttgaagcctaagctcagaagtcaaaccatgcccctctgccacattcttttggccaatgtaagtcacaggtccagactacatcaagaggaggcagaaacacatttcatctcttgacaagagaagctgcaaagtcacactgaaaagagcagggatacaggaaggatggggaattgtggccactttgtaatatattactggtggtgaaagcatcctggctgtccctgaattactgtgacagtctgaataaattcctgcccagcgcaccagaaaagggaacaaggttctattaacctaaatagcaaacacagagagaggctctctaaaagaaaatgtttactcaggaatagggcattgcagtgggaatacatgtgtcacagtaatctgcatgaatattcagggaggtaaaggaaaacaaaggcttttaaaggaaaaatgaggattacttaattgttttgagataattatctttggatacaaggatcagtgacaagggtggcaccagtttgaggttggatagagagttgctaggtagatttcctcacagaaggtgtgagtgtgtgtgtgtgtgtgtgtgtgtgtgtgtgtgtgtaaggttgtgatggcctttgtgcaagattgtgtttttgcagatttttttgtgctagttcttgttatcagttgtttatgcatgaaaacctttccttcatggcgtcccacagctctatttgtcagggttttttttttttttttaaacataagtgactccattttgattctgacaacttttgcaattctaaggatctatgagctcttgggtgctgccaggagttagaactgggatgagttgagtgtcaaggtgtttgacctactactgcccagcagtctaacatttctttgaacacctactttgtagcaggcactatgatgggtgttttataaacattcttttgcttaaaccttacaagaaaccttcttaggtacacttttattcctcctgttttacagaagaggaaaactgaggcttggagtgtttaagacacttgtctaagagacacagcttgtcagcagtagaggcaggacttaaaccctatgttactgcctgtgcttcttacactttatcaccatgcataactttcccataaagcttagaagccaggtagaactactggcttaaaaccctagaaagcagtcagtatccactgcttaaataccaggagcctcagtttccccaaatataagaagagcttatgaggcctttcaggtcccatggctccattgggcaagcattggtccctagtgagtcccctccctctggaaatgaagggtttggtgtggtcagaggtggctatcctggcaccagctcttcctttactcaagcctgggctgctttctgcccagtaagggatgcggacaattcctggggtttccccgtggtggacacacagtgaagaatttgactcatgtaaccaaaacgtgggtccctggggaagctttggctttgggatcaaatgctgaaagcaaacctaatgggtttaaagtttttaatccccagttgctgtccttgatctggctataattttgcctgtggaatcgctgctgtggtgtttgtggggagggagggaatctttgagacactgtcagttctcagtcctgcccagggaggcagctgcggctcagtccttctctgtcacccgctctccagagaatttacctgcagattaccctcaaaacatgagacaggttcagagcgaggtgggcggctggaatggagccttcacagacagcttgaccacacacagggagctcaggaagcagctttgttggaaaaatgcagggcacttaaactgccacaccaggagggggtttggagaggctggaaagagcatgccattggacacagacactctgggttcaaatcccagctctgccacttactggtggtgtgacccaacatctctgaatggaaaacacatgagaggctgcctgacaggatggccatgagcaagaaagcacccttgtgagcataaccagtgttggtgcatgaaccgatgcacccacactgcttattaagagaggcaaacctctggttaacaccatgacagcagtgtcaatgctttggaaaagcaaggtgattgaagttcaccttttgagtcacctgagcctgatggggaggggaaggtcttttctcttccaaaccccagcatgccctttgacatgacggagctttcacatcagagttctcacttcagagctgccctcaaaggctcactggggcttgctcaggtggggattacatatgtgagtagctggcaccagagggggcactgggtacctgttggttcccttttcctcctttcaggctgatgtggggtgggtagaatagggcacgggtgatgtatttgactactggggtgcgtgctacagcttggcatcttaacatgaataaccatcttaacctcctctggccacctgcttccctatctgtaaaatggggataatattagtacctcccgtagggttgctgtgaagagtaaatttgatcctgcccgcaatgagcctaacccagcacctgcacactctatgtgcctgctacatgctggttgccctaattagaagtttagagtcctgcattgatgagaggacctaaaaggcttatgaggccaggcatagtggctcaggcttgtaatcccaacactttgggaggctgaggcaggtggatcacctgaggtcagaagttcaagaccggccttaccaatatggtgaaaccccatctctactaaaaatataaaaattagcggggcgtggtggcgtgtgcctgtggtacccagctactagggaggctgagacaagagaattgcttgaacccgggaggtggaggttgcagtgagcggagatcgccgcactgcactccagcctgggtaacagagcaagacaccatctcaaaaaaaaaaaaaaaaaaaaaaaaaaaaaaagggcctttgagtttgtggcatctttaactggggatgggataggaggagagagccttgcttctcaagggcaatctcttctactggctccaaatgaacataattatttgtaatcagtttagatagttacatagtacttcttaaactatcaatcacctggagagcttgttaaaatgcattctgatttaatgggctggggcctaagattctgcatttccgacaagtgccaggtgttccccatgctgctggtctgaggaccacacttgaagtagcaagcaaagcagagaagtagcttgatgctttgttgatggcagcctgttggtggggacactcaggcccttttatgtggtaaccatagcagaaaggaacatagtcttgttgagagtaccaggagagttggggcgatgtttgaagtggctaggatgtctttttataacttagcagatggcatcttttcagtggcttgttctgaactctgggccatggtaatctctgtatcccttgggatcagcctggtaaacagccagctgaattaacttcagaaaagacccactcatgggctggcctgcggtagtcttgctggatggtggcctaggtacagagcagtgctgggctgcggaggaagccacgatgttctgtaaacacatagatacaagcacattcccgcgtgccacctcgtgagtgtcatgcatgtgtgtgcatgcccccttatctctagcctgattttccattgcacaggatttgggaaaaacctttcatctgaccagctgatcagaagttttgaactgaaaggttgttatcagggtttgaatcagctattgttgttagaaccattgagtaccttgggcttggaaggaaataataattcagcaggttcctttccactttagattttggtgtaaactttgtccctgtcagtcttggctctaggctggaggaagcagtgcctgggaataagctctccagggtcccctcctgcttagataacctatgaatctgtgtctgtgaatttggagccatggcattatctgaaatttccagggttccaatgccagtttgggagacacagtggaggaagaacctgttgtttcttgcagccttttcccttccctcggacgtgatgaattctcactcttgtgaatttttttgtgatttttgtaaaataaattacaagtggcaattagtcactgtgctgatgtaaatttggagttggtgggaatttttggactctgctgtgtggccctggggtttttgagtggaagaggtattttatgctccccaggtcttagaacctgacctgtggaaaggctgaggatgtttcagcagtttagacagggcaaactgctaattcttctcacctgtgaaaacagctggtcttatgaagcgcaatatgtgacttaccccagtggctctaaagctcagccgctacagcaagggggaaaattgatcccttaatgtggctttcttctcactggagttttgttttgtacgtcattgtgcatttgagttacagcagacaagggccagccaaactgctcttgtgtgggtgagggaggcaatgtgatctgtttgggaaagtgcttgctttgatttccaaagggctgtgggttccagccctgcttctgcttgggaattctgcagttgtgcccagcaaacacctggggaggtgcatcccagggcattattgaggagccgcagggcagcctgggtacctgcaccattgggagtcttgcttctctcactccccagcagggcatcttcctcatggaatcagatacagaccctccaagactgacctggaaggagacactccagtgaggggtgggtctccctggctctttgtaccctccaattcttcaggttctaggtgttgagctcagggcagtgggaattaagatgggacccacacacattcccatgaaccttaacaccatgtctctgagccaggttagtgacgatgtcctttgtgatatctgccagcctttgctggagtcccctttgagggcctcagacttctgttgtatgatgtagaggccttgtttgtctgcccctttgcctagctggagtgttgcaggaggagcagcagcattccaagaccagggtgcagtgaatgactgagatcccaagatgaaggtggctttcagggcagagggaagggagcctgggtcagctttctacatccccaggaaagctgtccagggtcatcctaacctctgctaaacaccttttccacaaatacataatatgtaatgcactctattccaaggcatgtgggagatgatctatttcatgatacagaagaaacccttgtgaggtgaattccctctcttttctaggctgctggagataaggaacaacgcctgttctcactaagaagtggcttggcattttctactctttgaacatcagtgtggattttgtttgaagtctcattgtccaagaccttttccaaatggctcgtagctcagcacaaaccgtgcctgattagtgttgtttggtattctttgctatagatcttctgttgactgctttccggaaacaatgcataaaactgtaggtcagaattatttttgtaacatctggaggggagcttactgccatttcccccgtgttctgcactcacacaggcccaaacctgcctcttctgtcttctgggtgggtcttgcccctttcctgtagccgggggatgctcctgctggggatggcccaccctaggcagcttttcagttcaagatggaggatacagaggttcattcttgctcctgtttgcatgcaaactgttctatttctgttttgcagtgggagagaggatacggtttataattccgcactgctgctattttttttcctatttgcccctaaatgtccatgctgtgtgtgtggtgggtggtaggaggaggagagggagacagaagagaaatagcgtttctaaattttctatttgttactgaaatgtaacacatccaggaaagtgtccatatcatatacagttatcacaaatttgtataatgtcactgaggttgaatgacaacattatccgcacccccagcaattcccctccctaattgcaaccctgctttctcctctccagaggtaaccattatcctgccttctaacactatagttaaatttcacctgcttttgaactttagataaatggaatcagactgtgagtatgctattgtatctggcatcttttgttcagtattgtatttgtgcagttcatctctgtggttgcagttgaatgctgttcatttgttttcattgctgcatagaactctttttttgttttgttttgtttttgagacagagtctcactctgttgcccagactggagtgcagtggcatgatctcagctcactgtaacctctgcctcttgggttcaagcgattctcctgcctcagcctctcaagcagctgggattacaggcacctgccaccatgcccagctaattttttgtatttttagtagagacagggtttcaccatgttgcccagactggtcttgaactcctaagctcaggcagtctgcccacctcggcctcccagtgctgcatagaattctgttgtattgctgtaccatgatttacctgtccactctagcactgatgggcctttaggtttcttcttgtttttttttttttttttttgatattacatatgcagctttgaacattttgcatgtctcctggtagaaatgtatgcatctctattaggtatagtcctagaaatggaattactgggtcaaagggtaggtgcatgttcagctttattaggaactgttgaatagttttcccagtggttttaatggtttatactgccactagcagtgtatgaaggttctagttactctatatccttgccagcacttgggattttcagtctttttggtttgagccttctggttggtatgaagttgagtttctctgataactaacatagttgagcaccttttcatgcatttattggccatttggctatcttcttttgtgaagtatctatgcttgtctttggcctattctgttgacttgtcttttcttattaatcaatgaggagtttttaaaatagattttggataggaaccttttgttggttgtacgtgttcccacccatccatcgcagtctcctgggtaggtgggactaaaagcgtgcgctgccttgcctggccatttttttttgtgaagatgggatttgccatgtcacccaggctggcctggaattcctgggctcaagcgatccacccgcctcggcctctcaaaatgctaggattacaggcatgagccaccacattcagcctccttaagctttaatatgcctgggaaagatctaacaggtttcactttaggacctctcccccaagcccacacagaaaagtataataatatgattttcaaagtgagcactcagagagcccacccgtggttgggtgaatacttagccatctgcctcctattttcttatcgtaggttgtgacagaatgcctttttctcttgctgcagggtccttgtgggcgcaccaaaggcagattccaaatacagcccttcagtgaagtctcctggggctgtgtttaagtgccgtgttcacaccaaccctgaccggagatgcaccgaactggacatggctcgaggtgggtgaccattactgctgtggtggaaatgggttctgtacccttataccttgctcttcttcttcccaggatggcctgatcattcactcacccatccatccttccctccttccctccctccttctctccaacaagcatgtattgagtacgtaatagttattaagcactgggatacaccagtgaacaaaaaaaacaaggatgctgccatccctagtcccataaattagtgggcaaaagagatattaagacaagtaattgagagagaaaagaccagagggaaggtgagtatttgatttaatctagataggagggtcaagaaaggtctgggacctttcgacatgattagaaggatgcgtagtcgttagctgggcaggtgcaggaagcacagccttcaagcagaggtgccatttggaagcacagagcgaggttgtgcagctggagagggagccaggagagtggagcacaggagggcagcaaggcaggctggggccaggccacgtggggcctagcaggccagggcaatgtgctggaattttattctgtgtgtgagtggggaggccactgaaatcaattttgggtattacattttaactagggaaagatatgatcagatggatgtttttaaaagctcactttgcgctgggcatggtggctcatgactgtaatcccatcactttgggaggctgaggtgggcacattgcttgagcccagaagttcaagaccagcctgtgcaacatggtgaaagcctatctctactaaaaatacaaatattagctgaacgtggtgatgcatgcctgtagtcccagctactcaggaggccgaggcaggaggatcacttgaacccaggaggtcaagggtgcagtgagctgagattgtgccactgcactccagcctgggtgacagaactgagactcttgtctccaaaaagataaaaaaataaaataaaagctcactttgatctagcagaaaatataagatctttggaatcagatggttctgactgcattcaaagcccagctgggactgattgggaatgtcctatagcttcttgggcctcagttccctcaccttcaagatcaagactaatatacctacctcgcaaggatggtcttgagaagattaagtgagataatacaggtgagtacacagaactgtgcttggcacatcagtacaaaggaggtattttgttataatcatgactgcaagcatttctttctccaaagtctttttgcataaagattttctaatttttttgttgttttttgtttgtttgtttgtttttgagacagagtcttgctgtgtcacccaggctagagtgcaatggtacaatctctgctcactgcaacctctgcctcccaggttcaagcgattctcctgcctcagcctcccgagtagctgggattacagtgtatgaccatcttcggctaatttttgtgtttttagtggagacggggtttcgccatgttggccaggctggtctcgaacttctggcctcaagtgaaccgcccacctcagcctcccaaagtgctgggattacaggtgtgagccaccatgcctggccaagatcttctaattattttttaaataaagagttattgtgattttctttagcagaaaaagaggtttgtgaactgtttgttactggtgcataacaaattaaggagcttacttcagaacataaatcaaggccctgcctctttccatgagaaagtcttgccatgtggttgggtgcagtggcttatgcctataaccccagcacttcgggaggttggggtgggcggatcacttgaggttaggagtttgagaccagcctggacaacatggtgaaaacccatctctgctaaaaatatgaacattagtgggatgtggtggcgcacacctgtaatcccagctacttgggaggctgaggcagggcaatcgcttgaacctgggaggcagaggttgcaatgagctgagatcgtgccactgcactccagcctggacgacagagagagactgtctcaaaaaaaaaaaaaaaaaaaaaaaaagaaagaaaaagaaagccttgctatgtaaaaaaacagttgtctggattaaacagtatagtacatagtgatggagttgatttacattttgtggaaagttccttatttcctcatagggctgtggaccaccctttgaaagcagccagcagaacatcactcctcaacccaagtctggctcttctcctctttctccagggaagaatcggggcacgtcctgcggaaagacctgccgggaagaccgcgatgatgagtggatgggggtgagcctggcccgacagcccaaggctgatggccgtgtgttggtaagtccctcctgggggtgctgtgggaagggggtggcactctgagaatgaatgatctgttaggaaggctggatggcatggtgacaagtgcatggctttgaggttgcttattctggactactgcttagacaaatgacttatcttcttattttctttatctgtcaaatgtgaataatgtctgtcccaaggtgctgagatgtgactattgaaaaataaaacatatgtgaaaagtgctttgtacatctcattcattacataggtatttgtgtgtgtgtgtcttaaattgaggtataatttacagtacacaaatcttaagattacagtcttgattttcacaattgtacacacctgtgtaaccatatgcccactgagatatagaatatttccatcgtcccaaaagtctccgatgtccctttccagccaactcctctcacctgagacaaaccacagctgtgatttgtataatacattacttttgctttttctagaatttcatataaatggaatcctacagtatgtgctcttttatataagacttctttcactcaaaataatattttctgaaattaatccccattgtacgtatcagtagttcattcctgtttatctctacataatattacattttatgaaataaatgttatttttaactagttatttatcggacctccaaagcacctatgctgtattttgatccgtaggtgctttgagggagatagaaagaaaagtctttgcatttgagactcctgagatcctggagttgtgctgtgcagtaaggtggccaccagccctgtgtccttatttaaacttaaatttatccaaattaaactagaaattcaggtttttagtcatattagccacatttaagtggctcaataatcacaaatggttactggctactctattggaaagcagagagagagaatattttcatcatcacagaaagttttattagactcaacacgaaaggaatttctaacactgcagaggttttgtttttgtcaatttttcctttaagcttttctatgaggtataatactaaagcacttaacacacccagctgtgagtgcacagcccgatgggttttcacgcatgtacacttatgcatccccattgccagtactccggaaggacccctgcaccctttcccagtcagttcctctgcccttggtgagtgaacaactattctgacataggctttctcttgcccttgacttttatcagaagctgtacgaagatttttgttataaaagcgtaagctcaagaggggaaagtaatactagctgccgcttatggagggcttcatttgggtcacatgctgcaaagctgagggtttcgtgtgtattttatcccagggaaacaggttttccttaaggcactaggcaaagtgtttttgtcccctctctaaggagcccacttttgtgttaaacttcttcatggcataagctgttaatctgaattccgtcctcagcacaattaagcatctcccccttgtcgggccccttgggagaggaggaagcagctggatgctgtcgccagcatggtgggggcctccctcctggaagccgttgtaggtcctgcacaggctccctgagcccgctgtttgccttggtttccagtcctttcatcactgtcatggctggccctggaccctctccaaacttccacattcctccaggcatggtggcctgaccctgactggacaaatgggccccagaggggctgaacccttgtctgccattctggggaaagaaagggaagaagctgactcatctgtaaatcaaagggtagcccaaggtcctgattcagaacaaaaaggaggtggtggccccgtggcagcataacacaagatgctcttaagggcatcgagcctagagtcagagtttgctcctgtgaaaatatttcctctctgcaaggaaggataacctctctgtggctgagggcttgtttccagaggggcaagacagaattctgtgttaccacagatcagtatcacaaaggagtcatttctggggacagtgaacagcaatgaggaccacagggaagatttagcaaagggagccaagaaggcagcactagagcatttgtggataatggtgccatggatagtcctgtctaattaattgcatgcaggactatttttttaatgttttatgaagttattgcatcatccactcagtaagccactgtatatgggtgctgggcaaagaggagcatctgacaccatctgctttccttgtgccttttgtttgtttttctaattgtggccaaacacatgacataaaacttaccaccttaaccattttgagtgtacagtagtggtaaatgtatggcacattgttgtacaacaaacctttaaactttatcttgcaaaacttacatccattgaacaacactctcctttttctccttcccgtggttcctggcaacattgtatttctattaagagtttgactactttagatcttatgtgagtggagtgtggtgttcgtccttttgtgacgaacttacttcatttagcataatgtcctcaaggttcatcatgttgtagcatgtgaccggatctccttcctttttaaaggcagaataatatttcattgtatgaattcaccatgttttctttattcatctattgacggacatttaggttggttctatctcctggctgccgtgatgaatgctgctataaatgtgtaccaatatctctttgagatcttgttttcagttctttggggtatacacccggaagtgggattactggatcaaatggtacttctatttttaatttttaagaaacctccatactattttcccaaatggctgcagcattttaagttctcaccaacagtgcacaagggtttcaatggctccacgtccttgccaacatttattgttttcctttttttttttaaatagtggccctcctaatgggtgtgagataatattttattgtgattttggtttgcatctccctgatgattagtaacattgagcattgtttcatcatctgcttgttggtcattttatatcttttttggagaaatgtttaggtcctttgcccaattttaaattggattgtttggtttttattgttgttgagttatcctcatggcattttgcacatgggcagtcttgctaggaaaggcttgtcctaagtcccctctgcccctgccccactctgtcctcggcacttctctttcttcccctgtatgggctctgcctccttcgtgaagcctgttaagggttttctggaacaagctgagcatcttttgtgtcattaggaactcaacatcatcttattacttatattgtgtgtataatttattttgtggccatatgtccccttttatggaagccacttggggatagagaccaaatctacccactttcattctcagcatctggaggacatctctctaaggaatggcatctgaaagtgtgtttgaataatacagggactgagggtcaatgttaaaacaattagaaaccaaattagttgccatcttttcttggtggctgattctaagtggctgaaggaaacaccaggaaacattctgtaaaatgttccttggaaatggcaggcaaaaacaagatacagtgagtgtccctatttacatttggaggtctcatagccatttgcttttttctttaatgtttcaaccctacctgtcagagctttctgggaggcaagtatttacttttaaattaaaaatgggaaggatatgtgttgttcaggtgcattttgagaacttgagaagtgcctgggggtgtaggcaagagaccagtatccccaaggagcacaatattggattccaaggttgggtttgaagagggagaggtgggctagctcttttgaaagtggtgtctggtgctgatagaaaacctaagaacaaatggagaatttgaaagctgcaatggggcgtgaaatgtctcagtgaccaaaggcattatgtggaccatggacccagcaaccagctctggcaaggaccagattgtcaggctggtctggcaggttgaccttggcttagtgcctgcccatctcagctccatggacactgttgcacctcccaggttttccccagaaacaaatgatactggatgtaaagatagcatcaggattagaggcaagccccttcccttctcactctctcatcctgagcttcctgtgtgcagacgacattttaagaaatgagcggggaggggaatcacttcttgaaataaccactgaacaaactctgtataggcactgactgctgctcagactttggaggacaactcaaaatgttcaagtctaatgtcgccccttttcatcagacttgccaaggctcagacaacaaataatttaagcttctagattatttttgtgcagaagcagtattctctggttctctttgtcatttcctttctaattatcagggctgtccttatctgttcagtgcttcccatctgtccatttttttttttcaaagccacagggtacatttttgcatttacttctgttgctctgtttcctgattttttttaaagtgaactttttattgagctgtaacacacatgcagaaaaaggtataaatcatcaatgtatacctcaataaattttcattaggtgaacgtcctcagaataacattttcacaccccagcagccccttcccaatgcccctcctggccacttcctcctcggttggggagcttcttaggggagtctcatggcatctcagcctctctgtgatcctgctccccaccacacaccattcttagcagccaggcccagttgtggccgtgcactgtggacctggatgcatgacaaaggctttggccatctctatggcaggtgcgaatgtaggagggttggcagggactgatgtgcctttgtggccgaagcacccggaaagtgccattacccacctctaggagggatgtgttgtttccatacaacaaaaaaggcctttgaaataaagtgtttattttctttctctttttcctcttttgggaggaagagcaatccttataccttgaaatgtgtcagattctaatatttggagtgggacaaggccctccttcccctttcttatgattagttgaaatctgagtttgagcaagtcttgctgttttcagagaatgctctccttctcctgttcttccctcacagccgaactcatttggagagattgatggagttactaatgctttggagacagtccctaggaatttttttaaaatgtagtggtcagattgacatgtgtgtatatataatgataatcaaggctaaacacagtcttctctttctgtaatttatattcagagacactttgcattgttttcctacatgaatccttcctttgacactttgatctctgacctcccagaatgcttttagtttagtatgaaatgcaatatttggatcttctaggaattttccaagatcaccccttaaatagtttatggcacttaaaaaatgagacaatacaccagacattaagtacagcaaagccttcctataagtgtcagtgtgcagctggctatcagacagcaccatgataaacatccgcctcttttcacagcccctccaactcagaaatacaataaaacatggtcaacccttgaagccaagggctttgctaagtccaaaaacttagcaaaaccaaaacataactgatttacccacaaattagataacaataagtgattcaagtttgcgagccataagaattgagtcagaactttaaaaatcaattatttagcagtatggagtgattatttacttagtgatatattttttatagttctctgcctcatatcatttcagtctatttagaaacctgctattttagcacaaaacaatatcaaggagaggagtgaatgtggtttgcagcagaaaaaataacaatagattgttttctgtagtttaatgtcatacgacaagaggcagaatgtgggcaagctcaggttttgagagtcattctgagtgtgtcctcttttgccattgggcagagagtggccttgtccagggccttggtggcagtggcttgaaggatgaagagcagagagcttagaaggctgtgatcttatcatagaatgatgtcagggagaaccaggccccaagagccccctcactcactcggtgacgtggggcattccattcgaccccagagtggttatttcacatgtcctgggacatgtggcaggggggctgtaaagaggataaagtcaccaggcctgccccagggggtgggttttgatggcctctcaggtaggaatgagaagttttaagatggaaaatgcttcatagtgaaacaaggaagactcagaattcctggattccagtgctgtttgcagcacttactagctctgccacttaggcaaagcactctttgatacatggtgctcttgtacagaaaatgggaattctaaagacacctctgctcaccttccaggattgcagaagaggtcagaggtaggccataagaacgctaaatgttatcacttacgaaaacaatgcgtttgagggaggcaaaccaagatgttaaaaactgattattttcaaaagcaatattttaagaaaatgcattcactggctggggtgaagtgaactgatatcagaagtgagtagtgaatgcccaggagaagtggaacgggctgggcagggtagagtgtgtgcctctgagtaagcagctcggctcttcatcagcacagcagtgacatctggatgtgcagagacatgcacgggaactggggccactgtcatgtccaagcagaaggcaggggcatgtttagtgtggcagaaggacgatccaggcctgcatcctggctgctggcactgctccagtgtctgttagcagagctgccctgcctcatggtgtcttgcgtggcttcgaccctagtgctgagaggctcctctggagagctggccaatgcatctgtccatcttcttcgccagtatgcggagctctcatgcaccccaagacccttggccatgaaccttccttcagctttctcctcagagaggccttccttgacctgcctggcaaaaccagccactccctggcatgagggaactttctggtgagatggagatgttctgtgtcttgctagggccttggtgacatgagtgtgtacatttgtcaaagctcatttgtgcattttgctgtatgtaagtttccataaaaaaacaactctccacacacatttacttctagttaatgagatgcatgctgaagtgtttctgtgggtagaaacatggttgaatatcagccattcctcccttccctgctgtctccacatcggttcagtcccttgggcctgtcagctctgaagccacccccgtcgcccatctccactgcccctcctggtccagacctgcatcatctctcacctggtgttcatttgcacttttgccctcctgcagtctccaccaagcagccaaatggtctttccaaactgtcacttggatcatgcttctcaactgtgtaagactctccaccacttcccattgcagatctgctgaagtcacagccattcctacgtccccctgtggtccaaccttggccgcctctttgatcttatctccttcccaccatggtcactccagaccggcctttctttctcttgagcctctgagcctttctcacgatgtatcctttacattctgctatcctttgaatcctcccagaaccctcttcccctcatgcttcaggccttcccgacctctggtggaaactatccttcccactcccagattctctattctataaccttgtttctttccttcccaatgctcaggactagctacaattctcatttgttgatatatttatttcctgtctcctagtaggctcccagtggcttgttcctgttcatgcagttttctgatgcccagaaaagtgcctgttatgaaggtgtggctttctggtccctctgctcctctcttctcccacagaaagaaacatctggcactgacaggagtctgctttgtgatcttttggggccaactttcctgctctcaactgctctctatccctttaggcctgtgctcatcgctggaagaacatctactatgaagccgaccacatcctaccccatggcttctgctacatcatcccctccaacctccaggccaaaggcaggacgctgatcccttgctatgaaggtgagcatggattgatttttcctcatccccctacccacctcatgccctaagcccgccttcccacctctatgcaccaccagctgaacatttccccagctttccacatgctcatgatagggcagcactgtttgctcccagatggtctcttggtccccaaggccctgcccagagaagaggcaggtacagagggggcagcagtcccaggcctttccaaccctcacctgacttggctgcagagcccacggtgcttaccaagcattatgaagtctcagggaccgaaattcaccaagcctcagccaagtgacctaacagctgccttggttttctggtaatgccaggtgctgtgttgccttgggaaacttaccttctctctctggacctcagtttccttgtccgaatattcagtggttggcccagatgatctctacagccccaggcagctccaagtcagtcattaggctcccacacagcttctggctgcactgtggacagatgtcctgaggctggggggagaggagacccaggattcataaagcaacagctggacagaaacctgacactctgaactttcagcatttcatgacatttgaggtctgactttccttcccatgtggtcctgcagcccaggcagatgctggagaattgggcgcatcctgaatgtggttttaagagctcctcgccaaggggcacttggaaggaaaatgtatcctctcagacttagaaccttcaaatgcctgggcatcgaggacagtcactaatagtgattgagtcagtcactatttagcccagtcgaatctgagctttaagcgttcagaaaacacggttattttcttcagtttgatagctcgtagtttcaagttttctcagcctaattttgggtaagctggaacctgctccttctgtaagtgctggactatttatttcttaattcccctcctactttatttggacagaagtctcactggcttatgtccacattgcctttgggcctccctgggttttcctaggtttcaaattttgtggacactaaaaaggattcatgagaaacactatatggacactgggacccttctgggtactgaggtgacacaggtagggtgctctgggaaacgtcccccacagaagagccagcaagatctctgcaggaggcacaaaccctctcccctatagagtgagccttcctttggtttttctttctcctctgtatcagcatttgatcagctctggctgggccatgtagggaaatgaaactctggccctgtttatatctgtattgtcccaaacagaagaagaacaaacttcatcttaaaaatagaggatgatataatcaatcaagagtggagggatcgttggtttcagaaacgcaaagcatgtgtcaagcctgggtttccactgccccagtttactcctcctttttcctaaggaagaaaaaggaaaagcctctggaacaaccggtggggcagctcttcaggctgagaaggagcgatgggctcagcagggtgatggaggcagtgattgttgaaccatactagttatgcataggaccagtactttggttttcccagaagatgacatgttgtgacagggacacatgatggtccctgatgattcctctatatataccacaagcacaaggacagccctctgaagagggaggtggagttcaatgtccatgtgtacgcaggtccacgaggctcataattctgcattactttctattaagtagctgtggatcatcagtaggccagtgttgatctgaggtctttacacattctctcatctaatcttcccagaagctgtgaaaaatgtttgtttcttttttttcttgggtctgattacaggtattttattttggaaattgttctagaagacaccagtgaggcagggggaagtaagaatgggaagggaaggcagcccatggaagatgtactcctcagcacgttacctgggcgagtgggtgcagtctctggggtgggtgctggggccagtgtggagcacacatctagagtcctcctgcctgagggctgaggggaaggggcttcctccacctggcatcctgtcctgccatgtgtgtgggctgggaaagcctccaggacagaggtgctggcaggtggcagtcaggccacatcataggaacggtggtaggagctggggggagacaggtgggatgcccaaaggccagcttctgtgttgtcattctcctgtgacaggagtaagtggagactcagagtgtatgtgaattgccccaggtcactcaaacaataaatggtggagcaggattttgaagctggcctctgtctgactcagcaaaccattttgtgtcctggtaattaatggtaatttctgttagtttgttttttagggtttctaatttaaatgagaagtaaaagccagtcaacaaccctcacaaagcaagaaagggtgactgaactatcccaaaaatacaatggacttaatgatggttaaatggaactggtgaagaaattagcaaaatgattatgcccctgcccaatcttccttcccatgggcgcacacacacttttatatgctaacccattcattggcccagggtgggaaataagggatggatggggctggcatgtggagtattggggtgtaagagcagccccttagaaaaatgggggactaaattgaaagtttctgtagttcttggccctgtaagaggagaggggtagaagatgctgagtatttttctagaagactggactggacgggtggggctgggaggatgccggccgtagtgagagggctcttgtctgtgctctgttggctttaggcatctccacctccctgttttgtggtttaaactagacctactatggcttttaaggccaccattatttcctcaatgtggagaaactcagtaatgcaagttctctgttccacgttaggggtcacattatggttaaagacaatgggaagattttagagtttgacaggacctttcagataccacctagaacagcctcctgtctttcatgaggtccagagaggtgatggcctgagtttttctttctaatctgttattcacatgccacacaatggagaggcagagtagcttggtggccaatgcacagattctggacacagactgccggagttcaagtcccggctctgctacttcctcttattaacagtgtaatctcagatgggttatttaagttctctgtgcctaaccaacctcaagggtctatgaagaggactgagttaatgcttctaagtccttagaacagtgtctggcatatacttgctaatatatgctaagcatatatatactaatatgccatgtacaacatactgtattctgagcaagtgtttgttaatcatcatagggtgactgacttgtgtaccgggaatagaatccacttaatcttaagtacttgttagttgccagatagacaaaacccaagtgacacagttccagctaccaagaagctccccatctacaggggaaaacagagaggggacagggtgttttaaaagtgggagggccgtgtggagagagaatttcctgccagtgtgtactgctggagcccgtccccaagggcttgagctgcatccaagtgcaaggtggcattatttcattttacaattggaaaaactgaaacccacttaaagtctgcaggctgttgagactatggaagagagggatggtggaaattcgagactggtcatggtggtgggaacagggcaagggaggagggggacggctgcctctaaacccacttcttgtgggatggtggaaagaccgtgggaggggctgtgggttgaggacggctctgctgcacttctgcccctttagcctcaggcctgtcacttggcctctcagtgggagtcgatgctgtgatgcctccactgcatttaccgctttgggttatggtgaggagctcccgagaaaactcaggtgaaagtgctcagcaaggccacccattgttctataactgtggcctcatggtaagtctccatatgggccagctgtgctcctttacaacattggaaggtcggtttggttgcagagactctaaatatgtggggatctctccaaaatgtctcaagcttttgaattcttaaaaaattggtctctggtttggcactaggacatggcttctcaggtgcttcctgtttctggttggatgggaaaagctaccagaatatcctgttggaaccaggaaaaacagaggaaatgggaaataaaaatgaatttaggacataaactcatggagcatatccttcagtcagtttagtttgtgtttgtctgatgtgagaacatcattacctaccatatgttctttggttttatcagaatgtgtgagaaaacgagagctttggtgggacgatgtatagggaaaactacttgtaaattaaagggcaagcactataaaacattaattactattaaccaagctatgatattttaggactccgaaatgttaagtcaatgcatgtgataaaatcaagtacagagatttctttcatcctttgcccttgagaccactgaggcaagaagccggaacttagcaggagtgagactgcaaacaagttgtctttttattgtgaccgaaaaacctgatgagtgtggaatagtttgggagcagcatggcaaattaacaaagcctgttcaagattaaactctgagaaagaaatgcaagaggtaattatgatgccatggtatgttagacctaaattgtggaatctggctttactactcacttattgctatgattaaacctatatgctcctactttctgacttagtgaccttaggcaagctccatgagcctggtgccctcatctataaaatggggagattaagatctacttaagaggtatgtgaggtataaagtgcctaccacagtgctcagtcgagagtgaatgctgctcattgccttcaattagaaaatgtaaattttctaattaattttcaagcaacataatagtattcttaaatattctcagaaggtgtctaacatatcctgttttagtgactagataatgaagggtagaaagctggatattcctaaaatgattttaagagcccttggcaagttataatttctcaaatactgttgaagatcatattggcacaatttggttggtaagtgttccttccctctttttgtagatgacctaaaactttaactcatgccatgtttaaatgttcttaaatttgggattgttgaagtctgaattttactgtgctttaaaattgtgatggaaaaacttcctatggattccaaagatttctgtaccactctattatcagggaatgactggcttttatttctagtgtgtgtttgcatttcctaggacagtgatcatttccagggaaggaaatagattacccattcaaaggtgaagatttttttcccctttaatgttaaaagtggtctccacaagggataaaaatcaacgaaggtccatttacaaatgaaaaggaattggggttttgttgtatttttgttttgtttttgttttggagagaaccataaaaggctaagttgatccatttaaaaattcaagaacaagcctcataaatttttattaaataaagacctctacatttacataggattttatggtttccaaggagctttaataaacatatcttatttaaataaatagagcaaattaaagagaagaggatgcagttgtacattatggccagttaaacagagagggattctgagggggaggaagggagggaggccccagaggacagccatggctgtaaggaggaggccagaggtctccagcagggcctctctggggctttccaggtttccttggagccaagaattttaatcttgggcaaacctgtctcctatacttcaaacgtgtttccatgtattacgtggaattatagactacctaaactgcatcttttgtttctctcagaaaaattcacagattcagattcacctaatatttattgagcacctacctggtgccaggggttgtgctaggtacttaacatttttgatcttactgagtaatcacatcattctcagataagtattcttatccttgttatacagatgagaaaactgaggcccagggagcttgatgaaggtcacaggcttattagtcagaggaggggttgacggcttttaagtgtgtagtaggtttctttgtagctacctgttctgttgggatcctggttttcttggtgattactgagtgctgtggcctatcacagaaaaaaaagtcatattttttttcaatggcataattttatgaatttttgggacactacactatagacttgttaagctatgtttcagttttgcaattatagatacactctgtagacaagtcccagtaggtacagagggcagacgtgggtcctcagactgataaaatgtagccaggagaccaatctgctctagtctggagtggctgcttactgggaacatttggtttcagtatctgcacagcagtttgtctgtccatgctttggtgccagttatttcatgagtctttttatttttattttttggttatatagatcagaggtttccgtgttgcccaggctggcctcgaacgtctagcctcgccttcttatgcgccaggacaacaggcctgagccactgcagctccctatttcatgagtcttttagctttggtcccaaaattgaattctgctcagttctgagctggggttctcactgaaatgtgactgtcccatgttcagggtcacttttttttttctgagagtagagcatgacataatgcatagtaagttgcatgtctatatatacattattatgtgcctgtattattacttgctgctgaagtagggagttggcaaaatgggttgctaagttctaggtaaagggaacgctttaaagattacaaaactccttttttggtaatattaaaaaattattggccaggcgtggtggctcatacctgtaatcccagcactttgggaggctgagactggcagatcacctgaagtcaggagttcgagaccagcctgaccaacatggtgaaaccctgcctctactaaaaaatacaaaaattacctgggcatggtggggtgcatctgtaatcccagctacttgggagggtgaggcacgagaatcactggaacctgggaggcggcggttgtggtgagccaggattgcatcactgcactccagtctgggtgacagaatgagactctgtctcaaaaaaaaaaaaaatattgtaaaaaataaataacataaaaattaccattttaaccatttttaagtgtacagttctgtagcattatgtacattcacactgccatgccattatcaccaccatccatccccagaacttttgcatcatcccaaactaaagctctgtacccattaaacatgaactcctcattccctgcttcccctagtccctggcaactgccattctactttgtctctgaatttggatactctagacacctcatgtaagttgaatcatacagtatgtgcccttttgtgactggcttgtttcacttagcataatgtcctcaaggtgtatccatattgtagcatctgtcagaattttcttcctttttaaaggaaggaatatttaataatattccattgtatgtgtgtgccccacatttatctattcatctgtttataaaacattttctttggatgataagaatgttttcactggaaatgtgctttgtgaagcataagggagtggcagaagcagatcagaagttgggagccttgctcttgggtcctgatgctgaggctaatcagcagtgtagctttaaacaaaccacttgctctttctgagcaaaaatattccatttgtaaataaatggacagagttagagttattaggcattccctaaagatcttttccccttttaaaatctttctttcatttaattctaagtttctggctttatgcactttgtgtttcatgcacaccatagcttagtcatcagttattttcataaaatgttctcgcttcctctttaacctagctgtttaatttatttacattttttcccccatttatatggtggtcccttgtaaactgagggtagttttattctctcttcatttttctgtataattgcccttttttttttttttttttactagagctgtgtctgcccaaatgcattgtttcctgtattgtacaattatcagttatttagatttgccactctgttagaaacaaaatgcttgttcctcagtgccacaatgaaatagcacttgaacataaatttaattttctcagcaaggcaatttttacttctactgaagcgtgcgacttgtggatggagtaatggtgagagcacacctggacaggggaggggcaggggttcttattcctgttgcaggtagcccctactgctgtgtcgttcccctatttcctggggttcaactgcatagtctgagctaattccaactggctgttttaaagagagcagactacgatcctgagtggcggggtgagtagtttggtgggaagggtggttacagaacaggtgactcaggatgatttgggtcagagcaagtgaccaggggtgactcaagatggagcaggtaaccagggtgacttaggttaaagcaggtgaccaggggaacagatctgaactactgattagaactggcgggaaagttgtttactgaaactagaggcaagggggccaaagagaaccaggaagttaaactttaaaatggaaaatcaaagaataagagagctgaacatattgacatactgattctttgaagagaaacttggaattcgctataacaactccttggtgaaattcagaataaagactggcaagctatttttcccccagtattttatttcagagctaagctaaggaactacagaaaaataattgtaaaattgatgtgttaaaaagctttgaaagacagaactttctcaaatgggtaatatgaagggagattattaggaagaatatatgttatgctgtatgtgaatcttgatctttctgtggaatggttttatcctggtcttttggaaagggtacaggaagtgaccccacccgattggtggtctgcttgaattacattcattaatgtaggctccatgcattgagttgcggattgtgaacatttggaaaccagtattttttttcctctctgaattgccttctgtttagacagggcttaataaaaccagcagctaaaccaaggaaaatactcccatttttagaatggaggagccatacgacttaatgaattaaagcatgtaatgcaggccaagtaattcaaacccacccatggcaggaagagttccacaacctggttccagctcctctaagtgacttctaagtccccttgttcaaccctatcttttgggtctcagatttggcttcccccccgctttttttttttttttttttgagaccgaatctggctctgttgcccaggctggagtgcagcggcatgatcgtggctcactgcaacctctgcctcccagactcaagccatcctcccacctcagcctcctgagtagctgggactacaggtgtgcaccaccgcatccagctaatttttgtatttttgtagagatgggggtctcactttgttccccaggctgattttcaactcctggactcaagtgatctgcctgcctcggcctcccaaagtgctgggattacaggtgtcagccaccgtgctggccagcttccccaaatgtaagggttaggtttgttacagtgcctgtgagctgctgtcaggcaaagcctgcttttcccctgcttctttgaggtggataaatgttttgttcagtagtggagagggcactagctattgtagtcctctctgcagggccatgtccctgggggcatttggagaccaagtagacatgcccaggagcagccaactgctgggccccacggcctttgtgtttgtgcaggaaaagttcttcctgggaacacaggagactggaggtcacccccaccccttcccaggtccctccaccctgcacttcctggacttgtcaatggagggagggtgtgtgacccaggcttgttggggatgttgtttgtggggcagccccttgcctctctctgcgcctacctcacttcccatagctttgtgatataggctgtcctgccatctcaggtctagacaagcaaaatcaagttgtatttttaagttttttagatacgagtatggtagaataaccctatgtacatactctttggggaagaaaggctcgtacatgaacatttagaagatggattagggagaaacctaaacctgccctcttgacatatatatgaaggaatcaggttaaaataatagtagtgcccttaactcacagaaatagcattcaaaggagtgaaaacaatggaaagcatgcttgtggcctaggctgtggaaggtgtggaatgtgaaactgtctaatccaataacacccactaactttcctagactagagttgccaggccccacaactgcccccaaagtgtgtgtggcagggatcggataggtggtagaaggattagaactggattctactctaccttgaagggattaatgacagtcacagaagtttctgggaggctgggacatggcctgctctctgatctagatttgattataggagccagtcaggggcccccattgtttgattccttgccctagagcatcctgagaaggcagcttagactttgggtttcagaaacatgaaagtcagtgatggtaccgacttccatgtgtgtcccaggccctcagacctctggtggggcagtcccagcttgggaaggcggaggctggcctgaaaacagtgcttcatgctgcctgaaacaggggtgcctttaagggcttccccttgctggccttcagcctgggccagaagtggggtattcttagctcccagtgaggctgtcaccacctcggaaacccgaggtcctgctcccaacatagaccacaccaagtacagtttggggaggaggcactgaagttctcaaatctcccattttttggagaccttgtcataaagagaccttgagactgctttaaaagatgaaagagtcccacacaattcctattcatgtcagaaatttatgaggctgaactggtggtgtgtcttgcactatagtttcattcagctcatggggtctgaatttcctttttatgtttcattttttcaagagttacaattgggtgtttagtctctagagtcagtgggatggatatgctttttgccagacttttcacatttaatatgtaactgtttgtttaggttgagacattttgatcctttttgccgttgtgctatttgatgcaggatttattattaatttgtattatttcttgctattatgaaatttgatgcaggatttgttcattgctttgcactagtctcactcgcagccctggtgcaagattctgcagggaacaaacaagttccttttgtcactggactgctttctggcaggtctagcagttgtccttataataaccggacaaggcgggagaactgattttatcctgcatggaagaggagtaactcaattgacattctttgtcatttagcagtcagttaatggccacttactggaaaatgttactaggctctgtggtgagtgttgttagaaactgaattactctgtatatttccccagggccctttttccccttgcctggagtagacactcagaacggcaggaagtggcactgtgttgcaatcatagtttcattgttcctttgtattttgcatttcaaaaataatgatattgcttttaatggtaccagagacttgccaggagcccagggggtggtacagggtcactggggtagccccagcctgagggtgcccaggagtggtctgtggaaggtctccagcaatgtcagcctcacatgtgattaatttgagtcactgtgaacatctctccacctccttgactttacccatgaaatgatttccaacatccagtcactttcctgggtatttttagtcactcactttgcagaacctttgatggtctacagaagtgaaggaatgggtttctaagtccaagctgaggtagaatcctggcattgccatttactagagctgtgtgaccttagacaattcacttaacctctctgagcctcaatattcttacctgttaacaagtggggatatgggttcccagggatgagggaccggtgaaatgatatgcctggagacagctaacacaatgcctggaaaatgctaagcacttgtcaaaagtttcctacccctcttccttgccagcttaaaattataactgcagcagcagaacgcccccatttgttgggtagcagtgttgtgagctgagggggtggaggagaaaagcttatctgttagttttctttccacctggagagatcttccccctttccttccacacagcaatagtgtaaccgaatgccagagcagtcccttcttcttgcggtcctctgtggacggcttgtttctttttggatggtaggaggcatccaaagcctcttttagggaaggttggtcttcttccaggagactccacactgggatggccacatcattccatttctgggtcacgttttcagctccttgggcctgcaagggatctctgtcccttctggagtaaatgaaataattgtcactagcctcccacttaatgactgtggctattgctcctctttctcgcacacgaggggaggaagtctgctggggcactgggcagcctcccttcccgatggcaccagagcctggatttttgaggtctggtggattcctgagactttccttcctcaccccagtctggacagcatccctgggcccagcctgccgcggcactcgtgggaagtggctggctggctctgctggctccacgcacagctggcatacactgacatggctgtggtttgcttctctctccttccttgcccctagagtataagaagaagtacggagaggaacacggctcctgccaggctgggatagcgggcttcttcaccgaggtgggtgtctgctgtctgggcatttctgttctcttgtgggtgttcatttccttgcttatatgattttggcaacccttagaggtgggacttctggagtcccagatacttgagcctcgagggagcagattctggtcctcacaccagaggaggctatttctacctgccaggagggcaccagctggccagagaccactgggcagaggaggtggggtggctcatctcgaggctacccctatttgatgatttttgtaggagtctgcttgactctgagacctggggaaggagtcgatttggggatgtgtgagtgagatgacattcagtcaggttgtgccccatcattggcgactgtgcagatacatgaagcgtgtgagcatcccctcctagcagccttctctccttagtggagagacttgtttgtttttcgagacagagtcttgctatgtcactcaagctggagtgcagtggcgtgatctcggctcactgcaatctccgcctcctgggttcaagcaattctcttgccttagcctcccggttataggcgcccaccgccacacctgtatttttagtagagacggggtttcgccatgttggccaggctggtcttgaacacctgacctcaggtgatctgccagtctcggcttcccaaagtgctgggattacaggctgagccaccacacccggcctgagagacttggttttacacacaactctaaccattccttttcccagattcagaaggacaggacacctgcatgcttatgtgcccgtgtggtagtagcatgacttttggctggtagtacatttttagggactgttttcttgtgtcattcttacttactgtaagtttgcccttcgtatcagttcctcctctctcaaacactttcatgactgcctgctggcactgtctatccatgtggttgctcaggccaaaaaaagagtactttttacttctaattcatctgcagtcctgttgttttagcctccaaaacacatcccaaatatgacagcttttattactattacaatcacctccattatcaccatcatgcttctagaaaggccaccaccatcacctggaggtacactggccctgattggtcttcttatgtctattatgcttttttaaaaattgtggtaaaagatgcataatataaaagtcaccactttaaagtgtgattcagtggcattagtgcattcacagtgttgtgcacccatcaccatgggctaggttagaacactttatcacccagcctgcatccattctgacctgtgaagtgtgctttctgcatactagccccagggtccttcaaatgaaacccatccttctgactccgaggcttcccagtccatggaggattacaatgtaaagctcctcatcctggcccctggacttggctccctgaggccacctctctcttttcctcactccaggagagcagagagctggggaagggcatgggacatggggggtggagggaggatgaagggtgctctctggcttccaaagtgagggcccctcctgagtcaggagcaagactgcctaccttcctttcagaaactgctgtttaaatccaaagagaacatagacagttggcaatatagtgtctgatccagaaagcaagaaagaaaaggcagaaagtctgaagttttattttcactctcaaaccaataaataggagatgctaccctccaacccccattccgcaccctcagtgattcttacctcgctggagaatcatttttatgacagtcgacagagttctatgccctgggaatggcaccgccaatcatcctaaccattgaggccgaatttaaagattgttctctcacctcactctcctacttctaagccaccttgcaagtcccaccacctcctatgccctcaaaacctctaacaatgacatccattgccctccacatcctctgccaccctacaaatctaagccatagttgtcttgcttccaacccactgcggaatccttctgccgtcttgcttccacccttgcctctggacagactggtccccatgtagcagccagaaccaccttttacaaacaggaaaaatatcatggtgctcccttgctcaggactttctggtgtcttctcatcctacttagaatgaaatgcaaatgccttcccttggcctcccagccttcatacctttccaggctcatctcctacctcacccactacatggtattttcagctgctgctaggacatgccggactcccactggtggcattgcactggagatccattcacgtggctccttgtacacaagtgtttctttagaagagacactaatggaggaactgctgggtccaaaggcactcagatttgaattttgatacatgttggcaaattgcacttcagacatgtttaccagttgacactcccctgcattgcttctgtctctatcttctctcactcagactttaaatttttgttatgaaaaaacatctcgttttaatgtcactttccctgattattaatgtcatttaatatccttttaaaatattgaccatttgtatttgttttcctggaagttgcctgtttatgttctcagtacattattctgttttgttgttgttgttgttttcctggtttttaggaacttgttacatattttcaacagtaatctcttacctgatctatgtgttgcaaattttttcatcagcctttttcttatgttttaagtttgcctatgatgtctttatcatcctggcaataaacatgcacatttggccaaatctatcagtcttttttttttttccctctagattctaaacttatctcttaagaaggttattccttatgtatactgcaagttggcatgaacagctgggcaggagagtgcccgggatctacaacacatgtctgggctgaacaaactcccatattttatacttatattttcaatatacttgtatttttaatagcactttcataggttgtttttaaaaaagatttcgatctttaatctttctggaatttgtgttgtatacattgtgtgatagaaactaactacattatttttctaaatatatagttggttgttctgatactggtttgttaaacaacttttcctctccccattgaaatgccatcctgccgtgtggcgacttcactctcttcttccatctcagcaaacatttagattgtgtgacaactatggctgttgttcctccaacaggcctgtctagtattgtatgacttgagtcaataggcagtgggaaccactgtaagttcacaagcaggtgacacactggcagatggcagtgttgaaagaaaggctatttgagctgggtttgcccagaactttgggagtggaagggcctgaagggaggcctggtaggaggccgtgatgtggtaggaggccgtgaagcaacaggacagtgtagagggaggcttaaggaataaaaatgattgggggaggcagagaatatgaaggaaatgtcaaggggctgggtggccagggagctgtggggtagaggaaggagggtttgagccaggcttctggagaatggtggtgcctctggtgaaaaggggttgcctgagaaagaacccattgggagatataaactgccaagtctgctttcagacacagggagtgtgcgatgtttttagaggacgtttggacttagggactggagtcctgcctggggcagaaacttagatttggcccttgctcatgactctcttaggggatgagtgtgcttagtgtagggcatgggggagacacctccctttagatgggaggagaagctagattgatgggagacatcagaactcaacggagatgttgacagagagccgaggagaaagtgttcccaggagggaagtgtcattatgtttgccgcagcagctggcaagtcaggcattgggctgagtggaggcagggagtggtaggaggaaccggcggggcaggagtgtggaggggaagtccaggtagctgtgcaagctcagggtgaccagaagaacagaagacctgctgaaatccaggctttgggatttagaacctgagggaaacatggggtgtcagcatgtgctggctgtgctcatggtacagcaaagtggggacatggtgggtgtacagagtgtccggggagggtgggcagtggtgagtgggaaggcagcccctctgggcgccactctgtcctctgaccccggcctgctgtctcctggctactttggactttggcctccgcttcagttcccaggcttttggcctccttaaacaggaggtctttgaactcactgcctgccttgtttctggaagttcagctgtttgtggctgagcaggaaatgtggttgaagggtccaggccagcgcgactcccctcctctgccctcttgctgacctcgccacttgggcttgccttttctgtgagctgttgtcccctcccaagctggacatggatctgtggccttctggtcatagctatgttgccccaaaatattttggcctaaggtgcctgcttgacctacaggtcagtgaccctgagcttaacaaagccttcggagctatggataccacctgaattttagcctgacattgaggattagagagaatttcctgggaggtttatttatttttgtagatgaggctaacagaggtagtagatactgcttagcagcaagagaggatttggaccagctgggctggcgttcacgcctgctgtagaagcctagaggcacttgggtgggagtttgttcagcacggacttctgttgtagatcccgggcactcctgcccagctgctcatgccaacttgcagtacacagaggaaatatatggcttctcccaggcccacctacataccccggttcctctaggggttctgctaataaatgcatcttgggaaaaagctgcattgcttattgatgggattccacaaatgtgatttaggtagtggtggcctttgcttagagaagctttcatttgtgtgtgtgacattgacactggctgttcctgcatggtggggagctaagtattagtcactttttcctagcacttgtgaacagcaccagaaaggtcacaagcatcatccatagggaacagaaaaaacaactatgagggatttccaggaaggcactgtccctcccttcagcctcagccctgagggtcgcaggcttggccctgttttatgtagtatgggctgaagggagaggggtgtgagcactgggggcggggtggcgtggtgcggtaaaaacaagagctgttggttttaaaggtttttgaagacaggaattactttatcttaccctgtttataatgtttgagaggggatgcagtggtatggtaggcatacatttttcaacttttatcctgggttagtctaaatcatcagaaagcaacatatcccatccctgcccccaatgttccgaagagcctttgcaggcctgtgctgatgctcaaagctttggcctgtgcaaagctgcaggtggagaaagctctgcactgaggatacatctggggctgaggaggttgctcattaggttcttcagtgccctttgtattatatttggacactgattacaaattcctttccaagctcaaggccaggagaaaaagtctctcctctgatgaacttatttctgttttttgtactctttctagaactagcgtggtctcttatgcaggacagatgagtgtaaaaagaatgagtggatggatgctctgctgtgtttcccagtggagcgtcctgactgcagaaagctatctatttttataaaacagtgagatacccctgggaacatctggcttatcatcaacagcttccttcaaggggggtaggatctcaaaactttaaaatgaagtgctcatcaacagtcatttcttgtctacaccctcctgaattatcaaaaagcaagcctttccggcgagaatctagtggcttttcttccatctgtgttcctgccctatcctttgttaaggctcttccccaaattaaccataacacgtattgtttaaggcattgccctcttgcctgcaggctctatcctcctctctctattttttttctttaggtacttctggcttttgcagacacttgctccctgagaattcagtggtgactttatgaattgtcctcagaaattctaaatctctgcggcaggatctagcctccagggacttgtcagagccagcagcttctgccagtgcgtgggctcgtctctgcagagggagatcaacctgaaaagatctgtttctgaaatatatgtgggtgaccaagggacggggtgcaggggaattctgaaggctcaggggaaggtcaggtgggtttcagcagtgagagacttgacctgcacagcatctgttatccccatgagccttcatgaccagtatctttggagttttgtctatagctgaaagatttcctctagaaattttgttgattttaacctgtttgcatagaatttttttctgaaatactttgcacattaccatgctgtcttaccccaagaatgatctacgaagggactttatttatctttatatctagtgtgaactctgagatataatagtaggtgcccaataaacattgttgagtgaaaaattactgatttcattagaaaaataattctgattatttcttattgcagtgtcgaaactttagaaaataaaggtaatccaaaagtagggattccctgttggggaaaggaaggactgaaagccagggacctctgatggatacaagcacagcctgcctcctagctccagcacagcctctgcacaatgggagcttcgtcttaatgcttgtaaaatgtcatctcattagcatgttttgtgtttttatgtgatgacttccttgttagtgtttaatcactgttctggaattttaaaaagtcaagattattaattaaaaaaattaatacatataataaaatacactattttaaatgcagagttcgatgagttttgacaaatgtgtataccatgtcgtctctgtctgaatgaagatgagaacatttccatcactttgggaagttcctcatgcccctttgcagacagtgttcctcctctttactccaggtacccactgatctgacttccatcagtgtggattggttttgctgattctagaacttcctatgaatggagtcatttttttctcatcaacatttggtctaggattcacccatatttcaactgagttttgaatactgcgaaagggttacacaagcagaggaagtgtgagggcattgcacagatggagataaaaagatcagagggagttccgaagaccagaattagtttagagtgtcctaggcatgcagtctgagggggcagtggcaggagaagagcctaatgtggttgaaatagtggacagtgttgaattttacctgagccctgtactcttggaaaacagtgtggtctagaattttgaaaaatgcaaaggaaataaactttgggagtgagagaacaggggatgttgattgatttccattatcgtatcacccaggggaaaaccccagcagatatctgtgctgacttccttgggtgaccaaatcatttctgggaacttagggttgttgtcagcattggtgatggttctggggcacaaacatgctctcagccctgttgaccatttccccctgatctaaatgctgaagacagctgtgcctcttatgttcttgagtctttttttttttttttttttttggcagagtcttgctatgtcacccaggctggaatgcagtggcatggtcttggctcactgagacctctgcgtcccgggttcaagcgattttcctgcctcagcctcctgagtagctgggattacaggcatgtgccactacacctggctaatttttgtatttttagtagagacagggtttcaccatgttggccaggctggtttcaaactcctgacctcaagtgatccacccgcctcggcctcccaaagtgctgggattacaggcatgagccactgcgcccggccttgagtctgtttttaacagtgataccgtctattgctgccttgtggtcccctcttccagtttgtgtttttccttagttgaccttgctggtctcttggttttgttcttccatgtttgcagtggactgtaatgatcggaaaaccatgttctagaacgtccctgagagggtcttgagtgtggtctggaggggattccctggagtactagtgcacagtttcctctcgctacgcatcaggtcgggggagttgaatggtgagcctggagtccaggcagggtgcggtattgcttactgcttttcatgagtggtgttccccagaatctgtggttgaggtcaatgtcagctgtttgtcatttccttgttagagcctgatgtaaagttgaggaaacgtgtgtggtctcatcgtggatagaataggggcctggcctgtcgtgaattctgtcaccttgctcagtctcttcacatctttagtcctgataatcccgtctgtataatagattccataatgctgatgaatctggtgaaatctgtttttgttgcttagctggggaaaaaaaagttcttggtgtgaggaatttctcctttgttgtgactgtggttctcattgcattcccctcctcccctcctcacttccttctctgcttaccgttggatttctttttggtaggagctggtggtgatgggtgctccagggtcattttattgggctggaaccatcaaagtgctgaaccttacggacaacacctatttaaaactgaacgacgaagtgatcatgaacaggcggtacacctacctgggtgagtactcagggagagaacaggtaagaaaggggaaatgggagtgattcccaccagattcacaaattattgcttcattgttggaaagaggagttagttggctttgacgcctgttgttctaatgacttacatctttagccagggcatcttcacatctagctccacaaacacaaggtagagaggaaaaccaaggagggaactgaattaaaactgtatgctttaattaaaaagctgacagttgaacctccagggaaataaacattttattttctcattttatcaattgttgaagttcagatggtcaggtagaaatgagtgtgatggagtcttgattttccacgggcgtccctttggatggagtccttgctttctgatcacaaaactggtagcaaatagaaagataagaactagaaattatcatgacagatggcaacctaatgctgaaggttaattaaaggctcagaaaaatttctcttgctttcttaactcttttaatcttctggaaagaagatagacacaatttaatgtagctatcaggcagaatgacactgggacaaggtccatgccaatttaagaacagacataggctgtctttgcttgtgtagatgacaattacaagactcttttctttaatttatgccctaaatgctataattctggattgaaagcgaagctaaatttaggaaggcctaatgatgacacacaatgctctttcgcactcatgatacataacttacagggaaaggccctgactccctttttgcatagcgtcactgggaacttcttgttaaatggggttagggagtcgttgacttgccttttcccttctaactacaagttttttgcctggtagcatagacccaacaatccttctactctggggtgtttgctcctgtaggcacccagctgcctagtgctgttgcttattaagcatttaccctatgccaggctgtatgtattatttctttttaatttctgaaacaaccttatgaagtagctattattatctacattttatagataaactgaggagcaaagaaattatacatcttgccaaggtcacatggctcctaagtagcaaaattagggtatgagcttgtggtttctgagtgcagagtctaaatgctgagctgccttccctgtgggtgcgtctgagagagcacctatcactggtactgtacttctcactgggctgggagcaccttgaagacaaaatgtgggattgtgtctcacatttggtatagtgcctggtgtatagtagtaactcaacacatatttattgaatcagggaatgaagagagagcagaagaaagcccagtttggatgatgggtttggggtctagaacagctcctttgaagcttcgagcctgtggtttctctttgtatacacattagaggctcttatcagctgcagggattatcaaggatccgttcaggctttgatctcactcagaatactcttaggtactatcagtcgccagtctgagagaaatcagccacatggtgaggaagaattgatcatgatatgatgtcatcgcgaaactcaaacaacttacaatcactttagggttagagggtgatgacaagtttggggattatatggcagcctgtacaggatttatgctggccagaggagagctttcagcctgctagcaaggctctcagaaagcaggagacgttgaggctaagcctaggcaatcttttcctttgtttctaggttccttttgcatccatattttttcactgaccaccctcccacccatccacccatccatctacccaaccatgcatctacccacccacccactgacagcttcttttgccttcttgtaggagggagtgtggttaacagcaggggctttagaggcacagattagatttgagtcttgctgtgtgatctttggcatgttgtttaacaggtttttctaattctgtatctgtaaaatggaagaaacagtcatgccttcttcataaagtttttagactgaaagagatacctaaagacatgcataaaaatgttggtagcaaccttgttcatattaaccccagcctggaaacaacctaaatgcccagcaacagaataaacatatgacatatttatataacggatattactcaataataaaaagaaactactactgtactcaacgatgtggatgaatgtcacagatgttatgttgagtgaagttcaagaaaaggcaaacctaatatatggtgatagaaatcagaatagtggctacctgtgtggggcatattgactgggaaagggcatgagggaaccctctggggttatggttctgtggttatagtcacttccttgatctgggtggtggttgcatggctacgctcatgtgtgcattcattgagttttacacgtcagatatatgaccttaccgtatgaaaactatgccttgaaaagaagaaaacagatatatagtatttcatacagtacttgtccgaaagaagacactcagaaagccctctttcctgccctgatatccttgtgaacatgactttttgtgagatgagagccatttcagcatgagaaggttgacagctgccatttttttcctggtagtttatgttccaagagtagggagcatgcttgagaaacattttcctctgatggatgtttttttttcccttcccttctttttcaaccgtgtgcttggtttccgcccatcctgttcaggctacgcagtgaccgctggccacttctctcacccgtccaccattgatgtggtaggaggtgccccacaggacaaaggcatcggcaaggtgaggagaaacatctgtggaatagctggggtcagacagaagaggggagcatgctgtccctggtgcagaggtttgccagctgacattgacctgaacattctactgggtggctggtggggaggtgatgaggaaccccctgactgccccactccattggaaagtttcccttgaaagctcaattagagtgtgagtatactcacactctcgatttcctgcacactctcatctgaggtttttcacagctgaccatgtgtgtgtgtgtaatttataagactgagccctggccttatggtgtccttcaaaagaatggcatttagtgctgtccaacttcaaatcccaaacccttcccaagtttggctttgatttaatggagctaggtccagtctcagatatctttgaggctttattcatgccccaaattattctcgtatttatttccccagtgtttgagaaggaacattgggttcccaagactggttcagcccaaaggctggactggaaatatgtgggtctggctttccctaaactatagtatctgccaaaaaacccaccccctggatctagggctgcctgaattcctttgggaaacatgacctctgaggggcctgaattgtgaactacgcttgttggttctttatcatgaaggtacaggaaatccagattgagtaggtacagatggatcaggaacccacatttttaagaagctccataggttgtctgatgggaaagactgagtgaacagaggaatgaactttggatctggacctttaggggtagacctgtgatagagtctggtcatatctcccagggcttggagaagtggaatctggattctggattagcccagatgagctgagaccactggtaattggagccttcagccaggaggtcaggatgatcagggagctgacgaactttccagttgactaggcttgactaaggataatttctgtggatcctcctgggcagaggttaggagctgctgctcacgtttctggagcatgtgcctccctcctccctaacactgatgctgtggaaagaggttcttcaaaactgaaaccagataaaccagggccctgagctggcagggaggagggatcaagcaggtgaccttcgatcacctcaagaaagaggtggttctttctgagttgcatgaatttatctaagtagagaaagaagcactgagagctgttcacattgatgttgtcttcttggggaggggctgcgggctaccgggcatctctgtagaaatggtaaaaatgcctacgtctagttcacagtgatgcgggtgcctctatgctaatgatagcagctttcttttctccctaattgcagaaaacacgacccagttttatagtttttccttcagatgattgtgatgaacttcatagtccctgtcaagtcttaagatgacccctccgcaaacccctctcactggctatctggggggtgcaaggtataaagttaaaaagttgagaatggtacttataattgatagagccagacagcgggactcctggacccagtttataaagtacataaaaatgcttctttcaattagaccacctgagaggcatggggaaactggtcatagtgacaaagttgctgacaattccacattcccagggattggggctagtacagacttgattcccaaggacccctggccttcaggattttgctggatattctagtgtcagggcacaaaagcactcacactaagatggcagttccttatctcatgggaaggttatttacactggttctcatgagacactcttcccacgagatgtaatccaaaaaaaagaacttccatagtcaagtacatttaggaagttaaatgtcagtgatcgtctttgcagtggcgatgcatagttcacatgaacatgctaaaggctctaaaaagttccacagtcaaagaatttacttaatgtttaactccacatttcccaaatgaaactcatttttacccaggcagatcacatgactctaatattacgtgaaatcactttgggaaactgctttgtctacagtactcatctccacctatccctttatcttctgttgtaatgcctggtaaagtcttactgggaataaagtccaatccataccaccaactaattttaaaaacaggaataaaggaaatatttcaagaaacaaaatactagctttttctcagagttgaattgtttacttgtaatttggaagcttcttgggtcttattgtgtgtggcttttataagtattgtggttcaggagcagtggaggtgatgtctgcctcaggattgaaggacccttttttttgcagggctggtaaaatgacagctgacttcttcatgatcatcagctagcataagcacatctgctgtgcacctggctcttaagcttttaaataggactcccaggagagtgctgataaatatctttgatcattgatttcatcctaactagattttttttttttcattccataggtttatattttcagagctgaccgaagatcaggcaccttaattaagatctttcaagcatcaggtaaaaaggtgaggttcttggtataagtgactattttttatttgagagatgtgatcatgtgggagtcagtactttttagaaaattggtttgaaggccctacctgtgccctgtgtttatatggcagtgctgtctgcttgttggtgtctttaccttctcagcggtatgtgtaatctgtacattcatgggattcatactcgctttaggagacattctgtagcaagatgagttatatggggccaagttacagcacagagttttaagagattgtccgtagttcagactgtcatcaaagtgactgcatgccctgtctctctgcctccatcctttctcaacgaatctccacctccagagagagcagatctttctgagtacaggtagcaataaatgcttctcactgagcctgtttcaccagcccaacattacccccttccctaatcctcagccctcaactgtcattgccaaggtgactgttgccacacaaagaaaatccaaacacaggttgcctgattcctcttagaaccttgaagcagaaatagctcagggtgctgccctaaagttagcctgggtgagattactctgcctgggtcctccccaccctgtccctaatcctctctctgctttctgaaagtttccattatactgccctgttgtctaaaattaagccaattagagagtcctgctattaataagcaacagttttcatgagcttatcagtcatgcacttcttgtgtggcttagatcagcaggactgtttggctgagcttggctactctaagggacacaagtttaggctgggagctgtgggggtaatttggaggtcttggtggaggccttagtgggatctgggaagaagcataggatgtctgggacatgggaggaggccatgtgcctcctcaattctgttcctgccgagttagaactgctgtacgccagcctaggatccttccatgttgttctcccattcaagtagacctttttgcaattttaacaatccgaataggtacacttagtgtataattgtcattatcttttgaataaaaaatgcatcaccaaacttggttttgcatttttcctcagaatggctctgccttcccgagaactctgctggcttgtgttattttaacatttccaaaaccccaaagcaacagcactggaaaatgactgtgagccattctgcaaaagggttttccaagcacccttaaagttagaaaagaaataactctgtgctacttgtgatttacaaaagagagtttcaaagagcaagtagggtatgagtggaattaaggctaacattttagatcttctgcagaagataacaaatgggtgaatgtatctagcatggaaacaatctccctcttcccttcaaatgtacctgggtttgaaagcctaaaggtaaaggattcctttttttttttttttttgagacagagtctcactatggcatgatcttggttcactgtaacatctgcctcctggactcaagccatcctcctacctcagcctcccaagtagctcggaccacagacatgtgccaccatgcccagcaaatttttgtatttttttttgtagagatggggtttcaccatgttgcccaggctggtctcagactcctgggctcaagggatccacccaccttggcctcccagagtgcgggatgataggcatgagccaccgcacctggccaaggattatttaaaatgaattgtggagtttctgagtatctttatgttcagttgtagctgtgcccccccaaactgcttttccttccctgccctactccttactgtctgtgccctggggaggtccggttaattcctattgccttcgagtaattaacaatctgtaattgtgccctctctcctccttgaaaacctcttggtttggatgagaacctatgctcaagttgatcaggtttttgggggtagatctgagagtgggtggtgcaaggaggatgagattaacctttgagaacccacttgtctaaacttcctgaagacttctgccattgagttccaggacaggttcaggcctgaatgtctgcttggatgtccttatcataccaagatacatcaggttccctgagaagggacagaaaggcccaggtattcaacttcttggcttcgtagccatttgactttttcttttctttagggctcttctggccctaacctttgcaccattccataggcaccccttctttctgccactcactcacagtcctcttgccttcacttccttctactagtgtctccaactagatttaccctgtcatcatcgttctgcttttgaaataggccatgacctttctttatacaacttattctacttcttgccagaagaaatgagacattcatgtctttctgacttctccattacctcctacaaaaggacatgaccccaggctttcaaaggatgcctttagatttatccctatgtccagagtcacatagacaggagggttctaactcagcaaaccaccggttcacttctgcttccgtttggctagaatttggtcagatagttctgtatcctggcttcctataagaagaaacaaagcaaaaagattaaaaaaacaaaaccaaacaaaaaaaacctggttcttgtctttattggttgactttctccaaatagtacacttaagaaatcaccaacatgtgtgcagttcagatgttaatacagacacacatctccacatttccaggctgatggggagctctgatcatcggacacacaccccaaagcatgtcattgccatattgaagttttattgaattaacggagtatgtgaagcatttgtatttcaaaactgagataggaaacttcacatatagagatttctaatttaacattgatgaagatgccaagttaaatagtcctttggaatgaaacaaatagttcccctggggctcagccagtgagcgcagccagcagcttggctctttgggtctttgcctgtgtcttactgatttcttttaccaaagctcagatggggagattggcaaggccactgaaatagtgactggcaactcggtttctttcctcctcaccctctgtgatttcaaccctttcctgctccgttctcctttgagaatgggtaatcagaggggaggaagatggccttggcatatcactggggaaggatttctgagcggccactacaaagccctcctgtgaccctgttagctgcaggaaatagattggagtgtcctctacctctctccctcaaactccctgggtcagctgccaacaaactccaacagtaaaagaaaaggcttgttcatgtccatcaacccaggggccttttattagaaaacatttattttaaaagaataatgctttttctctttcttttcttttcttttcttttcttttcttttcttttcttttcttttcttttcttttcttttctttctttctttctttctttctttctttctttctttctttctttctttccttccttccttccttccttccttccttccttccttccttccttctttcttttcttttcttttcttttcttttcttttcttttcttttcttttcttttcttttcttttcttttcttttctttctttctttcttctttcttttctttcttgacagagtcttgctctgttgcccaggctagagtgcagtggcatgatcttggctcactgcaacctccacctcccaggttcaagcgattctcctgcctcagcctcccttgtagctgggattacaggtgcctgccaccacgcctggctaatttttgtatttttagtagagatggggtttcaccatgttggccaggctggtctcgaactcctggccttgtgatccacccgcctcccaaagtgctgggagtacaggcgtgagtcaccatgcccggccttcttcttttatttttttttaaagtagaggttgcaaactgacagcctttggaaagaatacagcctacaaatacttttgtttggcttgcacagtatttgtttattgtttttacacacgaagaagttgcgagcatttaaaacactggcactttaaataaagttttaaatttttggcttcttttggaaaatggaaaggttgctcctctctgggtcagcattcctcttggtggcagttagctgcagctgggttgaagctgctcctttagccaggcttgtgggctccagtttgccacagtctccaccactccctattgttatgtagacaaggaagacaagtgtcacttgccacattaattttttttcttatgcctgttatatcacctgcctggatcctgttggtatttgggtttgagacccctaattaagctataattaaaagtcaatattatcttgctctgttccctcatcagttaaacagtcttaaaagttgtacctttttctgtcacttcagctcatgccttcctaaccaatctttcacctgtgcataggaccaggagagaataacctatttccccatgtaacatttattttcatgcctttcttgtgttgtgagatttcatattcctacttgcttggccttgtcaaatgtctgatataaggagcatttttattatggttgtaacataactttgtgtcctcagcttgcatttttaaaaacagcacctcattctgtgggcatcaatctatttatcttccccttgataggactccaggaatgggggactttgggccagttagctttgtctcacattgactggggccctgccttgctgctggaagttgggtatttcactctttgctaggcattctggtttagggggcagcatagccatccagcctctgagggatgtttctttttttttatgtttttattttttagtatacattaagttttagggtacatgtgcacaacgtgcaggtttgttacatatgtatacatgtgccatattgatgtgctgtacccattaactcgtcatttaacattaggtatatctcctaatgttatccctcccccctcccccaaccccacagcaggccctggtgtgtgatgttccccttcctgtgtccatgtgttctcattgttcaattcctctgagggatgtttctaaagccaatggggtggaggaaagcgagggcatccttgtgtgagagcagacactgaatgctttgttgcaactcaacttggttgcagatgggctcttacttcggctcctccttgtgcgcagttgacctgaatggggacggcctctctgacctgctggtgggggcccccatgttttctgagatcagggatgagggacaggtcactgtctacatcaacagaggaaatgtgagtacaatactgggcaatgtgcggatgggtgtgggggagggacatttgtccagccagcagtggccgagcacccctctgggccggcactgggggcaatgttacccagaggagatgaaaatatgtgatatctgtcttgaataagctcaatggcccattaatggaaagttatatacaatgttacaactgcagacacccaggggccaaggaagaatcttaataattgtcttttgagtgcttactatgtaccagggactcttcttcctgctttctgcgagagatttctatgcaatatacacatggtatcaagggtgcccatttttcaggtggaaaaactgaggcccagagaggttaggtaatgtgtcccaaaccacacagctaagaagtggggctgggatttgaacctaggcaagctggctttagagctggcatgctttgtctcaaggttatgccacctctctgggagcatatgcacattttcccagggaagcagaggaggacacaatggctggggaatcttgaagaaggagtaggagttagcagacaggcagggtgggctggagcagagctcccagtgcagagctgggcaagtgggttggggtgtgaggtggcatcaccactcatttcagcatgggggggcaggggactgcatgggaaccataatctttttgttcgtttgtttgttttgaggcaaagtatcactccatcacccaggctggagtgcagtgacgcagtcttggctcactgcaacctctgcctcctgggttcaaactcttctcctgcctcagcctccccagtaactgggattacaggcacttgccaccacacccggctaattttttgtgtgtttttagtagagatggggtttcaccatgttggccaggctggtctcaaactcctgatttcaagtgatctgccctacttggcctccctaggattacagacgtgagccaccacgcctggccaataatcttggtgtcccctattctgcagaaccatgaaagggacgtgacatggacagaaagatgcctctggccctctgtagctaatggagggtgggtgagtgggggctgggttgggggacagcagtgcatcgtggaagcaggagaccagtgagaaagcagtcttttcaggatctggaagtacaagtgttcaagtacaagtattcagcaagaacaacatggttcaatgaaaacattctggtgccgcctaccttttctctaacatgagaaaacgcttatggagataatcagtggaaaaatgggatgaaaactgcatgtacaaccagtcctcagaaatatgccaaatacatagaaaatgtgaataacagctctctggatagatgtttagttttatctttatccaaatagtgagaatataatttcatatttaaaaaaatcgaagtgtactgttaagcagtggctgagatgctaggtatcccagttgggagagggcagaggtttagctataactaagtgggcagatgccagaaaggaaggaagcagtgaaaggagagccagggattgttagagccttatgttgcgtctgaggttttcaggctcttcaggaagtcagatctaaaaccagggaggtttgggaggcccaggtgggaggatcacttgaagccaggagttcaagaccagcctggccaacatggtgaaaccctgtctctactaaaaacacacaaaaaaattagcctggtgtggtggtgcttgcctgtggtcccagctgaggctgaggtgggaggattgtttgagcccaggaggtggaggctgcagtgagccgtgatcatgccactgtactccagcctgggtgacagagtgagaccttgtcaatcagttagtcaacaagccaacaagcaaggtgcagtggtggttgcctaggaggctgaggcgagaggatcccttgagcaccggagtttgaggtggtagtgagctatgattgcaccactgcactccagcctgggctacacaatgagactctgtctctaaaaaaaataaaatatctgggagggaaggtgcttattggtacctgttgcaggaactcttggcacctgcatacccactgacattccaggaagtcagggcagggtgcagggagaaatgaaggggacattaaataaatgagtgctgtgggcattcagtggtgcctgccattgtatttgcaggagactgagacatttgtgtaggagtcaggtccaacagccagactgtgtgtctaaatcagaaggtggactcttgaagcacaagaactcccccaggcctccactgggcatgatgcacccacaccctcccctgccaaccagtgtttcttgatgttgtatggttattctaagtaccagagtattctcatttctgttgaacatcagccatttgaataaagatcggaaggcagtgtggagtagtggaaaaaattctgactttggagcaaggtggacctgagtttgaatcttggttttgccatgtcctagcctgtgtgatgtggacaaatggcttgaaattggtggcccaatttcctcatctgtaaagtgagaggcatcataagatcttccttatggagtcattgtgtgatttgaatgaggagctggctgtacagtacctggtacataggagcaatcagttgctggtgttcctctcctcttccccactacactgaaagaaagaaattaatgcatatttgtgttttggggtggaggtttcattcacccaagaaatcatctcaccttgactgttttcaaggtgtaaattgtgtttatagtgaaaaagaagacttggtcatgataaaagccagacactcgtgggatggcctgtaggatatagtgggcccagactgcctctgcactggggaatgcatacatcttctcatgtctcaggacatcagattgcattgtatcactctggtcttcatgtgtcagtgatttggggtgagagtaggtatgactttttcccccaagttagatgacttttcctgcctttgtacaccattaaccccctccctctgttggttagtattttctcaggaaattcatacctgagccatgcatgaataataggcacagtgacgtctgccatcacagccaccctctggccaagaacgactgggtgcttggattttctgaaccatgactccctctatcaagataactcatatatgcactttgcaaaacagttttataaacttgtaccaaaaggcacaggaaagaaaaaatagaaaaatgtatacccttttaaaacaacattggggaaaaagtgctatgccttaaggacgtggagagcacatgggggaaaggtgggtagggaggtttgcttgtgtgtagtgtattaggacaaggcagagagtgtagtcattggctaccatgacattctccttccctcaaaaatgcatctcaggctatgggagaccatcctgctaagcaggtaaaagggacgcattttgccagcaggagagagaagtttgggttcctgtaattctgcccaggtgtttcctgtcaatgagtgtgctctagcagggcagcattcaaactctggttttttattgatttttattgtttgttctgtttgtttttgttttgttttccattttctcctccatcctgtttcccagggagccctcgaggagcagctggctctgactggggatggtgcctacaatgcgcactttggagagagcattgccagcctggacgatctggacaatgatgggttcccaggtgagtgagtgctcctggtgcacggagcccctccaggtgcagcacgctgctctgtttcagaggggcagcctgctcgctgactgtccatctctagtggcatgctcctgggtctactgatccccttcgaaggcccatcaatgtgctgtggggagataggacacgtttagaggtgctctccctgtagacacgcagggctgagcttccagcccactggagttttgcctctgcataatcccttctcaccagctcagtgttctttgttgtttgcagtggaagcaaaccttggggctggtccatttgggacttcttatggcaagaagtttgaatagcttcatcctgccatcaactctccttgtttctgagcctttgatgctccatcatgctctaccatgttgatggggaaatgagtgaggagagaattagaaacccagacatcttctgcctgattatagcagcagctagattgacttttgagagtgtacgcgtgtgtgtgtgtgtgtgtgtgtgtgtgtgtgtgtgtgtgtgtgtcttgggaggcatggaggcatatgtacctaatgtctaggtctgtttggacagcagtgttcctcacagcctcttggcctctctctctggcttgtttgagcctcttcacctcgctgcatacacagcatacagacgtcgggaggcagagcaaccatgtcaccagggcatgtggtggtggaggtggggcaacccttgcccaggccagccatccagacgtctttgatacctcctaccactggctacagtgggcttcattttcctcccccttggcctcacttctgcagacacatgactttgttagaagcaagggaaaaaagttaggaagatctaggttttgttctaggagttgccagtttgtgagagtaatgttatttcttgtgtgtgaagtgaatgcccttctgtatatttcctttatccaggaatggatttattatcaaataataataaggaatggtcctttatccaggacctcagactttctcagttacacaatagccattgtctatggaattctccctgatggaaattatggcacgtagtttatatttgcatttcttttattggatgggtcagtggtttttcttacgagcataaggtagaaacttttttggaactaaattcttctcagtcagcttctatagttttcactgtacttttttttttttttttttttttttttgagatggagtctcactctgtttcccaggctggagtccagtggcacaatctcagctcactgcaacctccgcttcccgggttcaagtgattctcttgcctcagcctccagagtagctgggacaacaggtgcgtgccaccacacccagctaatttttgtatttttagtagagctggggtttcactatgttggccaggctggtcttaaactcttgacctcaggcgacctgcccgccttggcctgccaaagtgctgggattacaggcgtgagccaccacactggcctacttttttttttttttttttcctgctgagggatcttgtccccaaattaatgcttgaacaatcaacaaccaataatttctggtatccagggactcagacatgacaaccagaattagggaagctgcacttgtattattaatgtggctttttaacccatagctgtttttttaccctcagatgtggccattggtgcacccaaggaggatgacttcgcaggggcggtctatatctatcatggtgatgccggtgggatagtccctcagtactcaatggtaattagtgtgagagtgatatggcaactgttcatacattcattcagcaaacatgtatggaaccttcattatgcaccatgccctggaggtacaaagaaaaacatttttcttgccttggccttcctacccttttgtgaaagatacaattaatattgcttattaaatactaaaaaaagcattcttagaatcccaagttcgctaacactcagggatgcattttgcctaaagaagataattttcaactcttactcagagttggagccatttatttaagaaaggaaaggaagctttctctttttggtgactactttgtcaaccgtctatgctaaggcaaaggaatatgttttaatatataatctagaagaaaaatggtccatggtggaggggcctgaaactgatcacagactgtcgtcccagctggcctcaaaaccaggagccagttaggactctgcgcttgcgccctatacttgggaacatggaagtggtgagttctgttttttgccgtatcagcttggtgttcaatcttgctgatggtgtcaagcccagcccatgggaaaaaaggaagtcatgctctcagcagaagcattgtcaggatatttgtggatgtctgcctgtggagtggcactggctctggtctttctcccagtgggtcagagacagaaggggacacacattgagaaatttccaatcaacaaatatttatttattgaacacttactacatgctgactacttcctactcatatgtatttgtattttaattttaagaggcagcaggtaaatgcaagtacaacttctacatgaataattgtccttggcagatagagataaactagttaagggtggagggttggttggttgtcattcgtgcctcagatcccctctctactggcctcctgctgagctcagtgcctcacctgcaggagacagggctttgggaggcgctgcgaagaggagggactgttttttgggtgcctactctgccctttctttacctttaatcctcgcagcagccatgtaagatgggtctgtttattatccaccatttatttatccacgaggcccaaggaggttatttaacttgcccaaggtcataagtggcagtatggccacagaatctttgccagtctgctgcctgaaacttgttatcgtaaccaccatcctcaactccacattgcaaaaaggaacgctcggaaactcagtaggaaaacttacgaatatggaaactattttgccatgaggcatacatagtctgaggggcatttatctatccagaccatcctcttttcattagaagtacataacaggagattaataaacttcggtgattcagcccacaaggcaggaggaagagagctttgggcacagtttgggggccacatctgagtcacaagagctgccctaggctgcggcagggatgctcttcccagggtgacaagctaaaagtcacccaaggagccccgtgctcgggcagcggtcagggtcattctccacgcatcctccgggaagcttgttttcctggacctcggaagctaatcacacagtgaggcaacctgtgagagaccccagcttcccctcctccggggccctcccagtgttttgtttggttgctgggtggaatccctgtagagaaccacagtataactcttgtggttagcgtggagcgtctttagtgggaagcagggatagcatctggaccagcctgcctttgtcagcacgcaggctggctcctttgctttgacaaagagaagtggttttgggctcttaaggaaaaaaaaagaaagaagcaactatgactgtacgttcccaagctgctaatatgcatatgataagggcagagatttaaaagaaaaaaaattctttaatggcagattcttgcaggcccaggtcctggacagagcaggcattgtgtgggtgaactagaggaaggaatcagaaacaactctgggcaatggaatcactttgctttggcccagatttgtattatttctgctgggtaaattgtgagatcagggcctacacttcttccacattgctctttaactctctctcgagtttaccacggagagtgtttattttaagatccttgtgtgcctttcccaatgtgagagccctctgggcatatggcggcccctatgatccttctcttgctggaggggacactgcatagaaacctggtcaagtggaggtttccagggctcctggttttcatttagggttattagcactgggcagacttatcttcttggcttttagcataatggcctgcagatgtctgtgggataacttaagcctgcatcaccaccccagatggaccaccccttcgctctgcccctcgtcccagccacagcataccttagaaatgtagatccaggggcaggctgctgctagagttcttggacttcagagccaagagggtctgcttcaaaacgtggcttttaagaaatgtgcagacacacgtacatgtttgtttagacagagccatgtgggatgtagggctttgcctgttagtgtgaaacatttcttcagtgtttcctacagtgttctgatttgtactttggtgcttggacatttcctgttggatggcttaacggaggatggcaagcagccttctctgatcacttctaggagggttatttgcagttatcagctgctgggggtcagggggcatctctcgtgcctccatctgtagatcctgtgaaaactcccccctccttgccttcgtgacttctctgcaggatgactcgggaaagagaaggataaggaaagaaagtcaaagtgagcccctagatagctgtaaacctggttctattgtactttgaaaacaaagcatttctcttgtcctccacagtgaggacatcaggaagtaagcctcccctgggggaccatgcagataaaggcagaaggagtaggtcagaccccagaagatgggacttttctgattcaagaagttcagtatctttgtgaggaactgcgccacacgaatgttgatgcgcagcttcagtgtgacaaaggctgtttgtacaataaatattgttgaatcagtgctgcctgtgtggatatgtgatgaacttaatgatgaataagaagtgagcacagccaggagtggtggctgtaatcccagttccttgggaggctgaggcaggaacatcgtttgaggcttggagtttgaaaccaccttgggcaacatggcgagaccccgtctgacaaaaaaagtaaaacagctgggtatattggagcatgcctatagtcccagctacttgggaggctaaggcgggaggatcacttaagcccaggagtttgaggctgcagtgtgctatgattgtgccattgcattctagcctgggcaacagagcaagactctatctcttaaaaaaaaaaaaagagaaagttttttgtttttaaaaaacatataaagtaagcatagatgctagtgtgtcccatggtgaagttgtgaactctggttggttgagggggctgttttctagaggggagggcagggcatcttcttcagctgagtgcttttgatttcctacagtttaagaagtgttcaggaccatggagttctagatttactgggtaaaactgttcactcctgtctgtgaagctccagaatctatagatcatctggttggctggatggagaggtagtttccacatggccatcttttccagctggacatgttaattacctgtctgtctagggaaagactctgtaatgtgtgcctcttaggagcagagtgttaaatatttagtacatatttgggaagaaagatacaagctaaatatgttcttagaatttcagccagctacacctgtgtaaaaacaaacagaacctgcattaggaatggaagttaaactttatccattttgaatttcaacatgtcaaaacattatcatggtagtctaggtggatttttttcattaacacagaacttagaaaaaattttaaatgatgacgtttggccaagacaagtaataataaaggagtgtgtggccttcaactgcctgctaaagacttgctgatcacattaggattactttttttttttctttcaacaactttaagaccaagtgtcctagggaagctggaataaagcagtcacagttcttatttgtgactgtggtcttttcctgtgactccatttccctattatctgtttcagaaactgtctgggcagaagataaatccagtgctccggatgtttggtcagtccatatcgggaggcattgatatggatggaaatggctatcctggtaagctgtttttctttaaaggcacatgagataaatgaagataaatgcatgaagtagaataattttcagtctggttagcaatcatcacatccatttaggattaggacaattcacacaatagaatagggtgttttgcctggtgttcaattttaaggtgaaaataatgttgatatttattttggggttttaaactgatctactctgaatggcttagcaccaggagggtggatttgtgtagtggtttctggggcggtaattctaatgaagaaaaaaagcactggccacatctaaaatggttgaatagtgaaacctcatgttttcctttgtatttaaccacattcaaaggcttcttactcttgagagggaaaaagagcagcacccccaccgccccctgcccctactcttgaaataaaatgatggagaaagatttggagttaaaagaaaaccaagtcctcttgcgtgtggacaaagcagaccttcaccattcaatgctggctggcttggctttagagttaattattgcctgtggtggttgtggctaactggataaagatacatgatttcaaacccaaccccaagtgatatctggcctaggtcaaattgcctgggtggtggagtagtggttcttcaggtgtttcaagatggagtggggtaaggtaaggaaacaacagtaagaatttgaaaaaatccagaatggtcatggaattcaggaaacatttctctaaattttatagtcatcttgcttttgagaaatatttctttccactaaaatttaagaaaactaacgcagtcttgtatgaggacaccacattgtgtatttttgtacagataggagttttggaaattcctcaagacaacagagccaggaggaagtaagggaatagaaagaagtcagtgttgaagcttttgtcccaagaaagacccttgtgggcctttttaagtttgagaaagcagttcttgttctggaaaatttgtggccatccccaaataataccttatatgggtttagcatttaatatgtacaaaatgcttccacatgcaatgtgcatctcgcagtgaccccagcaggtaagtaggatagggtgttttccccactttataaacaaggatgctgagactcattgtgaggggctgcccagagcctgcagtgcacggggatccatgcttcccagtggttcagctacttttctgtaaatgtgaggtgagcaaggtgttcacagttcacaatggatctgaatttctgatcttgtgtttttcataagggaaattgacaaattcatcaggttcttttatttttaaacatatagcaaatttaaagactattgaagaacaaaattgatacaacacccaagtggagaaattttaggaacactataattcatggatttgccatttgtttttccctaatgagggcatcatatagatgctcagtgcatttagtgatgtacagattcagaccctcttggactcagatacttggttctgtgaagtagtagtgggaaccccagggccagggatttatatggccgggttggggtggtagggagaaaggcatagaaccactggaagagtaagtacttcctaaattaaagttatttaggaataaacattaccagttaaaccagggtcttggtttatagcttaccaagtatttccatgaatttactgacttaaatatctgatttcatatatttaataaatatttactataaatctagtgggtacttaatgaatattatataatgactaataaatattttctgatttaaatgtaatgaaatattatcagcttttgaagaaggccctggggataattatcttcattttacagacagggataccatgagatactcaggtcacatagagtgaggggtggagggtgacaattccatgttcttcagaacctagagcattttccaagagtcactgaattctaggtatgtctttctctaattcactgatgtgaaaagaagtataagccatatgtgtaatctaaaatattcctgtaattacataaaatgataaaaaaggtgaagttaattttattaatttttttagcccaatatagccaacatattatcatttcaacatataatcaatatgaaagttattagtgaggtagttaatggttttctgtactaggtctttgaaatgtggtgtgtagtttacactcacagcacctctcgactgagactagccacatttcaaggccccagtagcctgcgtagggattggctgccacgtcagagagtgtggcttccattcttacaagatcattgtatagcccagacagtggtcgtctgagggctctccggcctcaaggctgggtctccatccttgtgagcgcattcccagggcgcggttgtgtatgggcttcagcaagtttctgaacgctgtaaacttctcattttcagatgtcactgttggagccttcatgtccgacagcgtggttcttctcaggtgagaggccccactcttgctccttgaattgtgctgttcagggtgagggatggagccattcaccattcatgggctctttcctctgtcctgttccttgtaggctggaggtgcttagtaagtggaaatgctaccttattttctcattctaattattctctatcccagagtttctagctgtggccttgaatggcttgcaggtatgagatgataacatcctgggagcttctaggtaggggttggggtagcctaactcttaagcctaaggtaggggttggggtagcctaactcttaagcctaactcttaagctatttgcttttggccaagaaccttccataatgtgccataaaaatattttataatttcctgcgggtgctgggaagcactgttcattctgtctcttcatctgtacaccctgcatttgtacctccagtcagtccacaacaccctggggaccgggagcctcctgcccgttagacagcacgtcattccctgttggctgcagaggtgagggacatgagctgaggcccagagcttgctgaggcccgtgcagtctgcatctctcctgcaaaggccagtgggccgccgccaccacccgtgaaccctctccaagtatttctagctgtatgagtcagaggaggcagaattacactttggagtgggagccaattcttaggttttgttaataacctgatggcagaactttctaaaatagactaataggatctcagagctggaagggatcccagaggccatgtagttccacaccccagatccttcttattcagcggtaccttctgctggtctccactgcagggctacacagcctcctgtttgagtgagatgccccatgagtgggagcccagttacttctaagggaaccagcttgccccgggtaacattaaatcttgaattattaaagaggcagaagagccttgaggttgaatgtgaactcaggggccaggtggccgggttccagccctgactctgcccttactaggtgagtttcctgggcaagtcccctgacctttctgtttcaggattctcctctgttggccaggacagcaatacagatgctccttgacttaggatggggttatttccagataaatccattctaagtcaaaacatggtagtttcaacttaggatgggtttatccagatgtagcctcatggtaagtcaaggagtgtgctgcattcctatggcttttgcaccgttgtgaagttgaaaaatcataagttaaaccattataagtcggggactatctgcagtacatgtaaaatgttcagaacagtgcctggtttaactgcttaataaatcttagcaagtttgatgtaaattgggttaaatttgcctccctaaaattctgcttctcagtcttgtgtcttttatgtagcaaccctttagtatctgaagggggcaattgtgtcccccaagtggtgacttcactaagataaggcctccctggttcctgtaattatttcccatgtgactggattttcactttctttatcagcgcttcctctggataaaacagcttttgtggctccaaatgattgaggttagatttgtgaatctggttgctctagttggtgctttcatgatgtcatctttgctctcttcattatcctgagcatcttactttggtttgtcaggattcttctcaaataaaacacactcctcaacttttacagttgaaaacaggctttttttttttcttcttttctttttttgagatggagtcttgctctgtcacccgggctggagtgcaatggtgtgatctcagctcaccacaacctccgcctcctgggttcaagtgattctcctgcctcagcctcctgagcagctgggatcacaggtgcacaccaccacacctggctaattttttaatatttttagtagagacaggtttcaccatgttgatcaggctggtctcgaactcctgacctcgtgatccgcccacctcagcctcccaaagtgctgggattacaggcgtgagccattgcgcctgacccaacaggccctcttaaaaccggggccatctggctgaaggtccatcatatagactctgctttctcatcattcttgtgttttttaatcttcctgctgtgagcttaatccaaagggtattttctttttctcttcttcatggtgagggacagccttctccaggagtttgctcacatatggatgtaaagtaaagcgaggcagttacacaatgggtgggagaccccagactccagcctaggatggagggttgaatctggtgagttggagctcaacagggacaaatgtaaagttcttcaagaagaactccagggagagcacatatcaagagaagagacctaggagaggagcctggggagccctgccctgaataagagcatggaaggcccaagaagagtggtcgggccatgacagctgtagagtagcatgcaaggatgttgtggtcacaataatccattatcttattcattcagctaaggtgcattgacctgttgagatgcagccatgcatcagatcctggggatttgatgggaaacctgacctagcctgtgaccttagattatagccagagagccatatgcaagtgaataataatgcaaccaatgtttggtaagctcctaccgcatgcctggcacagtgtgagcacttcatttgtgttcattctttgttattgttttctttctgtattaaggtagaatttgcatgcaataaaatgcaccaatttgagagtatgactccatgagttttgaccactgcatacgctgtgtgactaccaccccaccacaataaagaatacttctgtcaccccagatagtttccttgtgcctctgtctggtcatacccctctcctgatagacaaccactgttctgacttctatcaccatagatccatcttgcccattctagaatttcacattggtgggaatatacagtatggactcttgtttctggcctcttttaatcagtgtgatgcatttgagattcgttcatgttggtgtgttgcttgtttttccccttactgagtagcactccattgactgaatatccttgagtttgttcatccatcctcttgttgacagaacacatgacaactcttagtcttcttaacaatccatgacataagtggggctgttatccccattttatgggtgaggagaccaaggacatgcagatcttattaatataaaagggaaggtgattccagatggtggtaggtgctgtgaggattctaaggcagggttacttggtcaggcagtggtgtcaaagtcagcaggaagggccaagcagagtgaggcctgagacttgttggaggtggcagggggaggtcaggggtgcccttggctgtggtggctctagagaagtgatggggcaaaagccagatggcagtgggtgggtgagagaagaaacaagaaggacagtgactcttgactgcttctccagaagcttggctgcaaaggagcaaatgggaccagcaggtagttcagggaggtgttttaaggacgggaagctctagatcagtgattaggccaagaacgtctttgagccattttctggtctcccaagtcccttaccctcttggaagagatcagaggtggtcaccctcagcttcgccctcatctatgtgaaccctgatgccctaaccctgtgcctacacccaagggtcctggagaggttgaagagacaagagggaggatgggaggctgctccagggatgagggatggggggatgaggttggtgagagtgatggaatctggtacatgggctgggggcgaggggccctcatcttctgagccaggccccaagataggaataaggtcagagcaaggttcagttccggtacatgggctgggggcgaggggctctcatcttctgagccaggccccaagataggaataaggtcagggcgaggttcagtttgggatgtggatgaggatgaagcagagggtgaccaccctggtctattccaggaggacaagggaatcagggagagcagggaaggcttcaaagacaggctggagcccctaagagaggaagcaaggtggggcaggcaaaggggttgctgagcatgtctgaggggccagcaggctggatgtctgcaggggcagccgttgataaagtcccaggattcagctgagcagcagtgaaggcctggaggcatcagctggctatgttaagtaggggcttggctcagcctggcctaactgatgttagattttgagttactttaggttttgggtgggactagaaaagcagggagagctaggagaccacgcatgtgcaagcacacatagatatatattgcccatcgttcctaaccctcctaagggcaggaggccagaggtatgtgggttaggaatgctatgggctgcagctaagagaaaacctggctgaggctttcaactatatgacctcaaattagctccctggaggtaggtggccccagggctggcttagtaacctaacaatggcaccagtggcaccaggggtgaaggctctttatctgtccttgccttgcagaaggccaaggcaccttgagcaacatgtcaaagggcatcccaactggttgtattatttaccttgaagtgaagtgtcaggatttgaactgtcagccctcagggagaagtgttccagctaccaggttttttttttttttttttttttttttttttttttttttttttttttttttttgagacggagtctcccgctgtcaccaaggctggagtgcagtggcgcgatcttggctcactgcaagctctgcctcccgggttcacgtcattcttctgcctcagcctcccaagtagctgggactacaggtgcccgccaccacacccagctaattttttgtatttttagtagagacagggtttcaccgtgttagccagtatggtctcgatctcctgaccttgtgatccacccgcctcagcctcccaaagtgctgggattacaggcgtgagccaccgcgcccggccgctaccagcttcttaagaaaaaaaaagcactgaaagcgcttgtggtgctgtccttgggtgctcctttgcttttatctcagaggctggcacatttgtaggcaggactgtgagacacagtctcccctgcccccaggagtgtggctggcccactctgccctcaggaagtttgcttccctcagattagctccggggcaggtcctgtgtcagggtgataggcacacggtgctctcccattgaaggtcacaggaagcgatcagagaggcctctgaaagatttctgggcttttcttcatccaaaaacaatacttggagttgaaacaaaaaggttgaagggaactgatccgacagctgtgggaaggagatgtacctgtgaaggtccctgtggtccatttcaaaggatactgtttttccaacttccactgaggtcactgtgtctgggctgcccacgtctgtttcctgcctgccgcactgtcttctgcagagctcttttgtgagaggaggattcggcctcctccctgacgaggtggcccctggggatgatggggcgggctaggcttttcttctgtaccatgaccaggcgcgtcagggaccaggcaaggtggagaccagctcttcatggtacttctgtccatctgtgaggctttggacactcgtggttttcagtctcctaggctggagtaaaatttgtatttatttaacaagggtgtttgcacatttattatgggaacgagaggatgaattcaccggatcccagcccttgcagggtgctgcaggatggtggggcaggtttggaaatagacaatgactgttcaccttagtaagtgggggccagaggtgtgtgtacagagctggaagcacagagagggaggatgcctgtcaggggtactagagaaggcttcctcagggtgggaacatttgagctggctgttgaaaggtcgacggggttttatagggtgtccattggcatctgcacaatcacactggccaggggtaagagatccactttccgatttatttctagtatcctataaggatgaacccagaagaaaatggaaagactaaggtgttggccttctttcaggcactgctattgtctgacttccgtttgtcctgtggccagatttgctctggaagtcccgcagttccactgcatctgttatcactactctctgttgaccccatctcccagcatggtggcagcagtggagtcccctcaccctatctgtgcctcgtgtctcttcacttcctttgttcacccagattttccttaacgctttcttccattggagttggtgtgggtcatcattcccatccgccctatcaccctgggctctctttgagggatcattgtacacaggggcatcattgttctcaagctactaatgccccttaatcttgttatgtcaccccagtggtgtgaaggccagggctccttagaggtaaaagggtctctttgtgaggcctggaggggagaaggttgagcagtagcttaggtgaatgctgcctgagcagatgtctgcagtgggagcagaatggtgtgatttactctttgtttttgtgggatgtccttggggagcccaaggactgtccattcatcaagcactgggagatggtccatggcagggaggagagtatggctttttattgagtttcatttggtcataagactgggcaggttgatttcttctgccctgaagcactttgctattaccagctgggactccacttatcaagttcttttaggaaattacccaatgaattggtggaggtaaatgatgcaggaggtttgaccaactggatggggctacaacattgcagttcatgctcataatggcagcaaatgcttgagggaatccctgagtatgcatctatttcttgaatcatggcatctgctataggaaatcctcttaaatgtattcttatctccctaataaaatggaaattggtacttaattggtaaaattttaaataattacccagcatctggtggttcatttatggcttcaaccagatgcgttttattaacaacaaacttgcttttattattgggacgctaactattaatttactaggcaatatgccccttctaaaaccagaaaaaaatgctcacagaacatactagcccttctctcttgggatatttcatgctttaattaaatgctgggttgaaggcctaggatttatcctgttggtctagttcttgtttggttctgagagctgctccttaccacgactaagtcaccttcctctcttgccctgcagagcaaggcctgtcattacggtggatgtctccatcttcctcccgggctccatcaacatcacagcgcctcagtgtcacgacggacagcagcctgtgaactgcctgaacgtcaccacctgcttcagcttccatggcaaacacgttccaggagagattggtaatgagccaccaagtcagggctcaggatacccgtttagctggagtgggctagtgggatatttccgatgttccctgtcgctgttcctcccagctggttttgcaggcagcaggcacacaggctggacatcctttccctctgaggttcctccccttctatttcctgcttatcaacatgtttctaatgtcacacaacctccagctctaggacaaataatgttggaccccaagcattctttttgcaaatatgagggctagactgaagcctcattggaccacaggtcctatgggactggtggagatatagtgcccggagcctggcccttagggaacattcgagcagttagaaagcagaagtgacaggactttggaggctccttattgagcttgtagcatcagccagatgtcaggggacttataccatttactatggaattggagaccaaagatggatggtgggattcggatgctggtgttacagaggcttaggtttctaaaagaggggtgctgctttggcagctcagaattgaaaagaggcaggcattgtcctgacagctggtaactgtccctgccatttgtctggctggggaaaatcaacttgctagcccagctctagagactggattaaaccccagaacaagatagaaccagtgttgattggaattcagagcacgtgatcacctgaaggaaatgaatctggagctttatgcatattactaggtgcttcatttttatttaaaaggctgatttaataatagaaagaaaaactccaggcaaacaaaaacactaacggacctgaacctactgacgttcttagatatttttaatgtcatgagtgactccttttgctactcacagtgtagcccctggcctagcattgtcagcatcactgggaacttgttagaaatgcaggactttgggctccgctttggacttctgaatcagaatctgcattttcacaagagccccacaagattcctgtgcacatttaagtttgagaagcactgctctggagcacacatgtgtgcacacacgcccactcatgcagaaatatttacgtgagctagttcattcctcagccacacctcaaatgttctaccttatttaatatgttcatccttcttggctgtctcattggcaatttctcttgatcttcaggtatattgaataagctcaacgattaaacatatttattttatcattttttaaaaagagcttagaaatttcaacattgaatgaaaccataccataaaacttgggaactggttagtgagggaggattaacaacattttcttgtgcagctcaatgagaaagagcagctcactcaagatcacacagatattgttgaagccaggagttgaatttggatcttatgatacttagttttgctttctaacaactatttctcaccacctccataattgtttaagatactacagtcttaaggaaaaaagctttctgatagttctgggactcgtgtgtcctccacataattaagcagtctgtcttctgtccagtgccagctcatcacgtagttggactctgttaaaaaacatttttaaagaatgaagattaattttgatacacataagaatgagaactattctagaactctcaaaaagggcaaacgagtaatagtgtctgtgtatgttcatttgacacatgcttattatgtatccacatgtgccaggcactggagatatagtcctgccctcatggagcttctaaagggagttacaaagagtttctactattttggccttgaagcagtgttagacaacgttcacttatcgctgttgtgaaagtgaaggtaaattggcatagctgaagcagagaagaagaaaccaagatgcaagttagagcaagagtgattcagagcatgagacaagtggtagagcaaactctgatttgaaggttcatgagctgagcgcagaggagatgtgggtgcctcctcatgctgttcccgaccagtggctctttctggggccccatctagcatgagcctttcacagactgctaagcacaattagaatgaaggtctaggcttagccatagccccagaagtgttggggtaaagtggaagaggccggcagttggatggcatcttgtactgtaccttgtgggcaatgcgaagcaacctggcttatatctgacattaggtggggcccattcagcaccagtgtaccctcccattaatttctcttccctatcctccatctgccacatgggttcatagataaagtcaaacatccctttatactctaagggtgtgtttccccgataatcaggcttaaaggggatggtaactggagaattttgatatctcagtataataaggcaatgcagaaaattattcatccccagcatgtttctgtcactttctctggcattcatatctcaatctttgcagtagaaagagaaatgtagaaatctgccagaaaatgtgctggcagtgaaatggagagtttggggagggaaaaatgggcaggccttatggaaatgtgataggaaatgaggtggaggtgaaaggtcaggtaactgtgggggcccagctctgggtgaggtgtcctagaattcagcaaggaaggcagcctcttggctctgcacagttgggaaggtcagtcttcagatggaggaaagatgggcacttccaggacacagataccctccactcccatccaagctcagcagagggtgctggccaactctgtcatttccaggcctccgcctcaggaacccacagctgagacactgggttaccagccttcctactctttgtgctggcagctgcagaggaaccatgtggatgatgactttgtccatggaatgcctggtgaatgagtgccagccctgggcaggccttccaggcacctctcaatgtctgcatatcttgggctgagtttgttattaagacggctgcatttgggcagagcaatacacagatacctgtggtgggctaggtactgctgtcagaagtggtatcttctgtggtatttatctgctgctgtcttcagctacatgacctgctctctgaggatggttttgagagccataagcagctgatgttagtcttgtgcctttggtttcttcttctctacctggcagggttcaagcctatgtacagagaagggacaccaactgcctctttatttcctgctttagaaatgggagaccacagtgcctacttggtcatgggagtgttcaggaccagctcattagcgggacacaagctgctgtagcctctgtaaatactgtaggaaatacagactttctctgtaggaggtgaatctgccttggcctctgaaacaggcagagtccagtcaggaaaacaaaaaccataccagttattttaacagaggaaatttagcactgggaatgggttaaacaggtcatggacgacctgggagtaactgcaggaagcagctgccgcctccaggtctgcaccagtggatctcaaagtgtggtcccagaccagctgcattagcatcacctgggatctcattagatatgcaaattctgactagaaactctgaaggtgggacccacatctgtgtttttacaagcctccagatgggttcaatttgagaaccactgttcaaggttatacttcgggttaaccacttccttggggttatcagaacctatgagcttggagaaggggccctgcggagctaggacctgaacctctgaggaggaggctggtgctgctgatctctctgagggagtgcaatgaggctggctctgggagaatggggggaaaattgaaaactacaattaactgctgttggggccagctgccgtgagaaactgttgctgggataagctgctaggaataggaagcagggaggaaggagcgagttcctttgccctctccagccttgcaggctccctccgatgctccatattagcagagcctcacagcaagcctctggcaaaacaagtgaggtttgcagggtcccagctccagtgtcacagtgcagggtagagaagggtgggttggagctgaggacaacagcttcataaaccagcacagcaagcatccagttacattgagttgctgaatccctgttgggtcattcaatcaaacaataataattaaggtcctacagagtgccagacaccctgcttatcctggggcacggagcagtgagcaggacaggcaaagtccttgccctcatggagctggcattctagtgggaggggggcaggcagacgggacaaaaacaaccagctgctctcttgctggcttttctagatgagctccgggccccttgtgtggcatgcactgtgcttagcactgggacacagacagacacagacttctcactccgactgtgggctcctccaggagcaggtttacaacgtatttcataaagcactttaaaataggagttcttcctgtccctaatagtattattcatcacttcattcttggcctgggaacagcctgtggccccttggagcctcctggctagcataggtgaaggtggtgaatgctttgcccaaggggaccctgcccctcacccatggacggtgcttgtacctactcactggccaggctgaagcctaaacttgcttgtcaatctctggaggctgggaatcaagctggcagttctgggctttcaccagagtgtgaaacgaaaaccaggaaggggcgctctctgagtgattgcattttgcactcagacccagtgctcctgtgtttccatggttagcctgaaactcgggaaggagaatttgttagaatttcacagctgaaatcttgttctgacagagagcaggaattaatcaaaacttgctgggagagaccagagctagagttgatgagagacagctggctccctcctggcccaggcccgtgcaggggggctcctcgggaagcagccgggggcagggcagggaggtggctgaaagtattactcggggctgatcagcttttccatcaccatgacatcattcgacatggcagggacacaagctgccagaaggaaaaacctaaagatgtgaaatgtgctgttggagcaggccctaatcagaactagcagcctcccagggacagacaggggctggccaggctggcttacctcatggccggctgtgggcaacttggacagcctgatccacccaccttcccagggccctgaccgcggagcccgggcagctgatcggctgcttcccagacatgtcctctgcttccctttccaccagaccctttaccagtgggtgctggtaaaactgccagttccgctcagggctttggaatgagtggtcagcatttcttcttgcctcctcaggcagggtctctcgttgtgactcttgctttcttctagaggagacagtctgatgtagaagtaatttcctttggggtaatttaaaatgtcaaaatttaaatcaaggaaaagtactaattaggcagttctagagatgaaatgcttccagaatgattgcacttggtgaattggataatgcggtatgtctgtgattgtatgttttaacattttagagaaatctgaaagtttaatgtgctggcatgcacacaccccgctggagaggagcagcagttgccttgtcctcagctcagtttctgtgaactgtgggttgtttctctcttccttgagttgcaagagatcagtacttccggatcagtacttctgcagtgagatgaaactttggaggagtaaagttggtgtttgtaaattatctagcacagtgcttggcacacgttgcaggttgaatttatttgcttttccttacttaccctgtgttaatatgggttctccccaaaacagagcctgggtcaaggatctgagtgcatgtggttgatacacaaatgatcccaagaggtaccagtaaggaaatgggacagtgagacaggaaaggaaggcagttgcaggcctcaggcttctccagagaaacagaatggagagagaaagaaatggattagttggttgattttcaggaattgggttgtgagattatgaggtctgggaagtctgaattcttgggggcaggccagtaggctggagactcagggaagagttgatgttgcagctcaagtctgaaagcagtctaaaagcagtttatttttttgggaaccttagtctttttctcttaaaaccttcaacagatgaggcttgcccacattttggagggtaatctgctttattcaaagtctactgatttaaatgttaatctaatataaaaaaataccttctcagtgacatctagattggtgcttgaccagattctgggtactgtggcccagccaagttgacacataaaattagccatcagagcagccaaatagagggtgtcttattgagcaggttaccactgtgggcagctggagctcagtcctgctggggaaccctggcagtcagtgtagaccgtgccccagaattaccccacatcaaggggcaagggagctggggccctgcattatggagggctgctctggggacttgagttccctggcactcctggcttgccaggcacatggacagagccactagagaaagccctcaggagaagagatgcaggtactggcagttgcaatttgggccggacagcagagaaatggtaaaagccaagaggatatgggtgggggagcaataccatcagttccatcttcctgtgttcctttccacccaggttttctctgagctcagctagttcatctctggtaagatagtccagtctcgctgttctctccattgtctcccttcctgagggaaggcagccattcacctgggaaggaggctggtcaggggaccccgaggagagtctgctcagcagctgcctccaccacattggttcacccaactgtggcctctggcttgtcttccagcaatgtgtatctgtagccatgactttgcttaagcaaacttggaaattcacttcatttaaatgtaatctttcttacttcagggcagttgttcagggaagttgtgatcagtagaaagtaaattggctagagttcagttgtagatctctgcacttgtttggacctgctatccatgcattcaaaaaaatgggaggttttggtcaagtaatgtacaacatgcagcaagaacaagtgtggtgggaatagcctggcaccagagattaagggagtcctagattcagctgtttgatgggtggccctctggcctggagcaagtcttgttcccttttggggcctcagttccctcatcttaaaaaatgaaggtttttgagcttagtggtctccaggattgcctcaaagctttgccagtctgaatctacccttttcttgctattgtccccattggaattggtgtgtgacacttgcacaggtgccagtgttttctgtgtgggagcactttcctgtatgcattattttcttcttaataatggcacctcctgagagtatccaggtctcagatcccttctggtgacacagccttgccttgtaagtcaactgtttgctggcgttaaacaagttggggcagatggctctgctgactaggaatttgccagctcggcatggcaagatccctgagatggcagaggcccagggaggccattagaagcatcaaaaatacgccctgtggcaggtgcagaatgcccattcaggtcaccttcctctctgcctgttcatacctcccctggtggctgatcccattgatgtcattaaaagccggagccttccctaatgcctgacttcacttacttaaatgccagtgggctcggggctacttgttactgatgcaaagcccccagattctaagaggcaggtgtgtggagacagggcagggctgggtcatctgccttctgttgcttagccatcttgccttgtcattccagggacagagattcctgttctctcactttaaaaataacatatttccttgaatccccaaaacagttaaaaaataaaaagggttacggaggggatgacctctggcacagaaaagcagtaaaataggtgtattgacactgaagtcatatttctataatgaaatacatacctatctatttacttattgactctgaaataacagaggtagatccttccaggtttatctagcctgcatttgatactgtgatcatcttttttttccttctttctttcttcttttttttaaattcaagactgtgttacaaaagttctgccatctggcatacacattcaggtatgggggtgagttattctttgcaggagaggacctcagtacaggccctaccgtggtcatagttttgttgaaaggataggcactacaaaatgtttgatcaccacactcggctacctgggaataaaggcaactccagccttcatctgggttcctgtgcatgtaaactacctgaaggcaggagtttatgcctgcgttgttcattgatacatcccctctacctttagcggtgcctggcctatagttagtgctcagtaaacgatggcgggcacatggtctggtccatgtactgattatagagcacgactcaactttgttgagatgagttaaaattatcagacgagatggttcccttgtgttgggcataaaccatgtgctttatagaagtcagtattacacaaagccttgataatttcagcagcttctggtaatgttctgtaggtttgtcatgatgttttgcttgtcaggacactaacctgtgttgggtacaccttgttaatgggcatattgctggctcagttgatacctcatgatggcatgaggtttaaatcagggagagccgtgaagtatgacacaaggagagtcattagaaaggcagaggacatcatgcttctctctcgattctttgagcaccctggctgtgtgctgctttctgagcaagtctctgcttggggctgcagtctcctgccatggaagggtaggtatcatatgagatgtgcatgtgatcctgtgacaaggaaaagaggtggcctcatcacagtgtgtcggtcctttctgacattttgacctctcatttattggcaggcctgaattatgttctgatggctgacgtggccaaaaaggagaagggccagatgcccagggtctactttgtgctgctgggagagaccatgggtcaggtcacagagaagctgcagctgacttacatggaggagacgtgtcgtcactatgtggcccatgtgaaggtcagtcctctcctcctttttatcctcaaactttgatctctgcagatgttcacttggagctggtggaaactatttttattatgtattatgtgtgctcttccaaaattttatttcacagggaggagcatatccatttcttcttttcttttaaagttggcctctgacagcccttttatttatcttactgtgttgatttcagcctttaaggggggtcgtggtggtctaggagaccagtgatggtccctggctttgacttgttcttttgagaggtttctcatcctctcccctctatgaggcttggtagccttttcagaggagagccttggaagcatgtgcctctgggtctgcagtgatgctggatcacactgcacctgatgcctttctcagtggtctactacaaattagctcatggtcacagttaaggcattttaaaactggttggactagattcttcccccttgactactttctatttattttaggatgcattttttggcaacctttcccctcgcactctaaataaacttgcaaatgtttttctcctcttgaaattgtttgttaaatacactttgctgctaattcaggaggccaggctttgattagctacagagtggcccttgcagcaggcgctggcagggtggaagacctggcagtgcctgatgctgcaggaatggccagacactgacccatgggcagggtcagagagcggaggaggtggaagaatgcacttaatccaggccacatggtgggtggaatgagcatgggttttggagacacatagatccagtgtgtatccagctggacacataattgtgacctctccctgtctcagtctctgcatctctaaaatggacacagtagtccttaccttgaaaggtggtcatcaggattaaacattacacaatgaatttacttaaaggaccttgaatggtgtctgataaatagaaagcaaccaaattattattatttggttgggctgtatataattgccaatattctttttgacttacaaaaatggaaatttcatatagctcaacccaatattgtttattagccactggatttctgactgatagtttgaaaagtctgcagattagagatgaagtgtcctcctgttagtgccagagcagaagaataacagctgcttctagatgcttcagggctgtgtatagagagatgccccacacacccatggcccagagcccatgagtccatgcccctcagatgcttctcagtggggctgggctgtgtcttctgccaggactcctgcaggggcctgcccagaccagctgcctgagggcttgggatgctggccatttataaagctgctcctgtgcctgttaagccatacagccccgccccgtcagtcttagattacattggcttgttggtgcctttggtggggtgtgaggctgcgcagtacaggctcgtatgcaaacactgtcaggcctttgaatgcctgtgattggtgtttttatacctgctggggacagggcatcttctctcgggcctcttcttgctaggtctgttcacaaaacctttcctttaggtttctttgcagcttcttgctttggctgagaagttatcctttgttcctagttaccaagggtactggctatgagatgccacgtagagtggcaatagtgaagtgcaggccagaggcagggctgtttctatggtggccctgagggttactgggaaggatcagggttgcgcaaggggttggtcctgctactttctgatatctagggttgccagacttagcaaataaaactatagaactcctaattaaatctgaatttcagatcaccaatgaataattttttagtatgagtgtgtcccaaatattgcatgggatatacttatactaaaaacattttgctgtttatctgaaatttaaatttaacttggcatcctgttggcagattcaactctgctgatcttcctctacccaacaagtggcatttcttcactcaagcaaaacctggctgccaagaagagagattgagatgatggttagaagagtttggaggctgagctcagggctctcgagtgcagatccagcacagaccttgacgtgattattttggtcattctagggagagcaaaagagcaggcctgcttcagtgaattgggacctagagtcatttggatacagtggttgcttggccattttctcatgcaaggaggtgggagcggagaaatacaccagatagacacatgtctctgagacctttatggttcaagaggcaacattgttgccaaggtacactcaaggtggctgatactttatagccatactttataaccatgagaatgtttatttctggcagttactgtctgggctgtagcagaggactgggcaaatggcagagtgcacccgtaggatgagtgctaatggcctagctagctgtccacagaggaggcagcaggcaccgccccggcttactggctgtgggaacacagctatggaagctgaggcaggaagcaaggatgaggggaaggggagtggcagccgggccacctcctggagcaggaactggggcctggggggtgttggtcaggggtcaagagcaggatgcagtctctactgcaagtggagctttctcagtggagctggctctcggctttatggacaaatcaaagaagataaataaaagcattctggcttatcacacaccatatggctagcagacagtggggccagcatgaggggctgggcctgctttgtttaggctatctttaggtatttttttctttttttctttaagcctattccaatctttttttttctccctctccttttccctggaagttttcttgccatatatggtgataagtgactttatcatggaagaccgcacaggctaacacctgttttccaggctaactgtcttgtaccagactttgttccattcaccgtattggagggcacctccggagggtataggattttgtgataaggcacatcctcctgaggggagggcaggtactttctcacggcctcactgtggtcagcagagctgaggcagctccagccacttccttggcttctctgcctcagagttcacacaccccggcttatcttccctcttccccgagaccagcccagttttggggatggggcccctcccactagccagtcaggctggaggcctctggtggatctcacagtcacaggcgaaagcccaacacctcccctcagcatcgggctctccatgccctgcctgaccttacctttctagacccatcttctgccaccacatcccctgggccccagctcttgtcatgacctgcccctttcctcctggaacctgctccttacacttctttgccttggttcttatgctcacagaagtcagaggcctggtttgtgtcatattcatgtagaaccatctaccacctgcatgatttttacatttttttggtcttaaactcatactgcctgtgatattttctttcatatttttctctttaaatcagccaacttttggtctcaaataaaataatttaaaacagaaactttgtacctttctataagcagaaaaccatctaacatgtccccaaaacagaaagtaactgtaaaaataaatatattgaagacacaacagtgtcctagaattctagctggatttcattgtttgtcaaagttgctgataaagcgcccactccattcatgtgttagaaagggaaatgatcaagttctagggaaggcttaaagacatactagcaccgcgctggaactttcttcctgatgcaaccagaaggactgcaggggaattgactgggaacaacttttcaaatatgagagttgttttacagagtcatgcctatgtgccatggaaatccaccttgtgggcccagtctgggaagccctggccatgctctgctttgatcagatgtgccttgccccatcctgcctgctgaaggcttgctgttgttcaaggctcagtccacaggttttggacatcctcagtggcagctactgtcctaggccctggggatgccactgtcatcttcctgacttcttggagcttgttccatgctgcctgactcctgctttggggatacttgtcaggcagaaccttgttggagtgactaattgggttagctggagtgtggggtcacaaaggcttctgatatggagtggggcctgcttgcctctgtctggactgactgctgggaagtgatggcttgagatgatggagaagagaatttgggatgcatggtgtgtgccaaagaataaatgcaggtgtcctgttgttactccatctgtttctggtttatgtgttcttacctggatgacagctgtgctcatcctctaatcctgtacaataccttgagagcacaggccttttgtgagatcaaatgcctatgcatgacaggcaaataagcaggctcttcaggaccagggaaacgatggcaacagttctgagtctgatgcagggatggcagagaagcccaggcagagtgcaggggcagtgatgtcattccctattgtgaggatcagtgacaccctctagaggcatttagggaactttttttgaacagaaccatgtgtcagacactgtcaagaaggccaataacggtattattgttaaaaacaaaacaaaacaatctacactagacgagggaatatgcacatcagcttttctgagaagctgcagatgttcataagattgttcttctatgttcctgaaggatttttcaaggaactttgaaacctaagtggctgcagctccttccttgcttttgtgggcagatgctcatcctggcctggcgaagggtgggacatcaccctggccaccaggtctcctgagagatcataccctgggatctgcccaggtgttttggcctgtttccattttcatatccaacaaaatgcgttgggaccatggcttcaatcacattacatgctgtgagtttagagtgttggatgctggttttcagaggtgatcaaacctttttttttttcttgtttaagaaacagatagttaagaaagggagattaagttggagttaataagaactctgagaaagaggagaaagaaaaacagcaaaagtttcttctttatctggaaaataacatgctaaatctccgggtcatcttgagaaatcaaagaaatagctaagaaaaaaacagttgcagggtttggcaaaaggggacaccaaccttagatatgaggtcttctgaaaacttttaaaatttgtttattttttgaatcagtagtgtgtatagttaaaatttttaaatggttataaaagttgtcaaagaaaggatgtctttcagctatcctatttttctcccaaaggcaaccacagttccattttcttaacgtgtctttcaaaagcttgtcaataaatatagaaatctgtgtgtgtacctccttttattttatgcaaatagtagtatactgtgtgcacactgtagtaaacttactttttcttttaaaacatccaacagcagaatggaggaacagattttggcaaatcgcacaaaatctagctgtaccagatgaaatacaactcagcaataacaatattatgttattatgatacacacaataacatgaatgacttttgaaagcattaaactgagtaaatgaagccagacacaaaaggctacctactggatgattcatttatatgacgttctggaaaaggccaactaaggagaaagcagattggtggttttcagcggccagggtttgggggaagggctgatgatgattgacttcaaagagggatgagacaactttctggggcgatgaacatattctaagatcgtggttgtagcggttgtatggttgcatttattaaaacttaacagagtgcacacctaaaattagtgaatgttatgtatgtaaattatatctcaatcaaacttattttgttaaaaaaagtttcgtggagattgttccatattggtgcatatagagctttcctgttctttttcagtagttctttttcactattccttgatttatttaacctgtccaggtggtcttctatatgtcagttccagactaacctgatctgatgcttgtagactagttatcttagtttgcttctccagaagaggctcctcttctctcccctagatccatagtatcctggctgaggacccctgagagggcagcatggaggggccctggtgctctctaaggtgaccttggacatatgtcctacagaggacaagcctctcagctatagggtgcccaaggaaaatgggagatttttcttgattcctgcagttggctttgtgcccttggcaggctctcctggtctgtaggtagcatagatggcctgaatgtttggtaaggggtgctggaaactagggcaagaaaagaggggaaggttgggatgcatagaactgatgtgtgggaaactaccttcatcatccagctcaggtgtgaagccgctgctcatgcgatatgctctgctcacacagatggcactaaggaaccgggaagctgggctttggagaccacgctggaagtcagctcactgagtgtgggttgccttgaccatctcctctgggaggccatgttgtgcatagctggagaacaaactggggatgaatcaagaagggaaagggtgtggtgaatgttcagcatgggagctgatatctccgatgagcactgtttggccattgatttatttcttgggtgcaatgaagggctcttaatcttctgcatttggacacttgccacagaggacattgtgattagcaaaggaaggcacaaaaattctaatccaaaggctttgcccgccttaagtccttttttgaaatggagctgatttaaatatgtaagtatggtcacagcattgacacttcagtggttatcgtaagcttatttgtacagtatgtgagatgcagtttgtagcaattgctatgggtaaaatttttattttaagaggtgactttctatttacagttattcatttacactgggttcatctattaatatatactgttgatgcccttttaacactggtattctttgaagtcacacatgataatgtgttctgttttattggttttgtctttatatttgagatgtgattataaagatcccttctgcctcaaaccttgaacttagatattcattataagcatgattcccttcaaagtaatcaccttctagtcattcctgttttgaaatttcttccatggtttgtttattcacttttatcatggtccatttttactctaggagttaattcaaattttggaagcagcaagatttctctgcaatcctctctagtagataatagtgtgtttggggaaaagtgaggtataataatacaggaattagtattaaggaatgtagtaattaaactccttttgaaaatgattttaaaagaattcccatgatattcaggtaatagcgataaaagcagctaacactaatcgagcatttagtatgtgctggttactgtgagtcactacatgtgagatagttactgtttttatcctcatcttactgtttcaaagacaaggcatagaggagtgaagggacttgctcacaaccttacagttgacaagtagcagaggtaggatttaaacccgcaagtctggctcctaagacttgggtttaaaccactacattgtaacacccctcataaatacaagctagaactattagtaactagtacttattatatgccagatactcttctacaggctttacatgaagaaagagaggttaagtaacctgactcaggctatgaactagtgagagacttcactgcctcttcataatagagtcctgggaccttctctgtgttaagcatatggcccccagaggtgacagcttttgggggtttatgttctagagcagtgatgtgctgctaatgtttaacaactagctcttggaaagaggggacatgacttttgtagcattttgcaaatttccctggtgtaaatattcttatcatgtctgatttcaagctaccaatgagacatcactgaatgtggagttaggaagagatgcacaatagcacacagttgtttagtatttccaatagctctaaatatctttaagagcatagatgatagtaaagtatggtaaaataattaggaagttatgagtgttgagtatttattacatttatcttaatataatttacttatttttaagtttattcaatttaacttttaataatggctgtgtttaacaaccctggctcataaactttctgaaaatttaacagttggcttttggaaacccactgcagcaagctccagcacacaactgaatatgttgagggtttttttgttgttattgttgtttttaattttagattcacaaggtacaggtgcttgtttgttccatgggtatatcgcatactggtgagtattgggcttctagcatgtttgttaataagttggtcatatcactcaagtcatgcctgatacacagatgtttgattatcagagtcttttttctttcttgtttcctgtggctttttaagttgatgaataataggaaagtaaatttgtggggtcagttaaaccaccagacgacagcttttatgtttgtacattggttcagaggtactctgtattttgactggatttattggatagtgtaattgtttccatttaaaacaatggaaaagatttcatttaaatttattgagatcttatttttcaccctcattccgtgcacatttgggattctgttcgccagcccctctgcactctgaagatgcacagcagcctctctgtactctgaagacgcatgaattgctgactgttgggcttgcttggaggggactgggggttattacctcccacaggactgtttaagctctggaagttttcctacctcctgcaactgaatttagtcttaattagtacagagtgaactagctgtgaacaatctggttttcttgctttgtgccttgatcatgtgagacctaagggctggtcctgcccttttcttatccattgctttaatcagaaataacatatcaaggtggcccaaattgtgtcactattctttcctttgtcttctccacccattcccacggcatccattcctaaggtcatttggagaattctctgttccaataagtgggatccacatggctcaaggagcaacaggccttggaatcactctttgagtagtagctggtccctcagtctaccccaaagagctgcctcgccagacctccccacctcccggacatacagactccagatgtggaaaaagcccttgccatctctatcctccaacacagagctttggtgtccgagacacatccaagtgacaggcccaagagggcctctgaatgaagacggatgagccgtgtggacacagccacactatgttttcgtgaaggcataagaccatgggccaactttctgggcatccagggctggctgcagaggctggagtgagtggctttcaaggcaagactgataatgaaagtcgtgtttgggtgggaatcacaagcaggggaagtgggggagccagcttcccttcgtgctgtgtgtcacaataagataggacacagatgcaaaagcagatcgctacagctggatctgggtaaaggtggcagtgacgcgtcggtgcagagaattcctgttttgaggaaagattcggagccagctaaggttttctgagggcccgtcatgtctcagactgtcacacttattcctctgtcatgtatgcttaagtctgttttagatgaccccttgtaaagaaaggaagcctggcccctgaagcctcattgcgtgggataaggggactaacatattctgtggttgtaccagcaaattattatttatttcttattttataaaagtatagattttattcatgcctatattgttagagaaaatcattatttttagtcaacgtattagtattaatatcatggcctcttttcttctcattttggaaggggaatatttttagactctttaatgagagagtcattttctcagtaaatatttgattggcctgaagttaagtgggtaggcgtaaaaaattatggaagtattggacttgagcaaacttttgacaaatagcgctctctttctctcttgggcgtatgcgtgtgtgcatgcatgtactccagctctctgtgtatgttacacacacacacgtttttcgcataaaacatttttattttgggccaggtgtggtggctcacgcctgtaatcccagcactttgggatgctgaggcaggcagaccatctgaggtcgggagttcaagaccagcctggccaacatggtgaaaccccgtttctactaaaattacaaaaattagctgggcatggtggtgggtgcctgtaatcccagctactctggaggctgagacaggagaattgtttgaatctggtaggcggaggttgcagtgagccaagattgtgccactgcactccagcctaggagaccgagcaagactccatctaaaaaaaaaaaaaaaaaatctttattttgaaataatagcagtcttacaaaaaagtcattaggatagcacaaagaaataccgtaaattcttcacccagattccctaaatgtcatttgctttgtaattttctatctattcgtacttcttacctgtttgagagtaagtcggagacgcgatgcccccttatccctaacatcagggatatttcctgagaacaaggacattcttttacgtaaccatagcacaattattgaaataaggaaattaagtgatacattactgttagcttatctgcagaactcactcaaatatcaccagttatcttcatgtccttggtagcaaaagaaaatcccgcactattgcatttggctgtcacatctctttagtctggaaaagtcactcagccttgctccttcatgtccttgacatttttgaagagtacaggtcagtttgtctgtttcatcatgattagattcaggatgtatattttctgcaggaataccacagaatacttgtgtcctatatatttaaaaacatatacatccaacatcactgaaggtatgtatttttaactcctcctttaaagtggttttccaaagttagttgccatccccaaaagggagcttttagacattgagagaggtgattatgaaagtacgatagcttgctcaccacctctctcctctgctcctgggagcacaggggagtttcaactctggggaaggtgatcatttgggtcattagtagcgctttgagtaccatggtgtctgcagggagttcccagttcttactgctgtctgagaataaaacataatatctttggtcttcacagaggtatcagacaggaattccactcagcttgcaggaattgagaccccaggacaggggcttaagcacatcaagataatttctctctcttctagaggaagagaagttgctgatgttggttcagtgactcgaggatgttctctgacctttcacttattcaggaaatgtgcattgcatacctattatgccgtaggctggggggccctcagctctgctgtgaagagacaaggatccttgtccccctgggagtttatatcccagtagggggagacagacaatagatataataagaagaaaattaaggtgcattagaaggcgatgaggctatggaaaaaaagaaagaaaatagagcccagtgaagcgggtttgggagtgcaggcatggggttatgggggtcagggtgacctcactgacgaggtgtgatttgagcaaagcatggaaggaggctggggagttagcacagcgggttcctggaggagggctcagaccagtgtctgagtgtctggtgtgtctgaggaggagcagggagaccagtgtgggcaaagaggtcagagtggcagtgatggttgtgagcgggtcatcttgggcttcctaggccttgggaaggatttgcctttactcagagggggatgggagtgtgtgagggatctgggcagggtggtgacctggcctgccttccatttttacaggcccctgctggcggctatgttgggaaggcctgtaggaggcggtagagcagcaggaacggggttaggagactgagcgttacccagggaagagggtggctccactggggccatagtggtaacattgtgagaagtggtcaaattctgcgtgcattttgaagggggatcctacagcatttcctgagggtttgattgtcagttgtgagggaataagatatcaagggtcactccaagcttttcagcctgagtacctaaaaggatggagttgtcactggtggtgttttcaacggaaggtgcaggtgagcaggttgaaagggggaagatctggagtttgtttttagacacactggtagatgtttaagtgtgtatgcgtatgtatgagtcttcagtttgagtagtagtctgagtaagaagtatcaatttgggagtcgccagcagacagatggtatttaatgccaggagatttgatgagatcacccagggtgtgaggggagatagagaagagagggggaccaagggctgagctgtggacactccaacactaagagcatcttttcctcctacccctaaaatggctctggggctccagccattgtatgtgtttttcatgcaggaagaagtgggacatgcaaaggggctctttataatctggtctgaggcccctgtaaagagcctccagtgacttctgcttataacgcattgaccatccatattttaaaagaggttggaagatgtctaagtaccagctagacatcttataaatcctatcactatagagttttgctctccagcagaactttctgtgatgaaggaaatgttccgtatcagcactgtccaatattggtggccagtgaccacatatgactgtgagcacttaaaatgtggctagtgccaataaggcattgactttttacttttctatacttttaattaatataaattcaaactgaaataacacatgtggctagtggctaccatgttggacagtgcagatattgaagtttgatttttaagaaggagagggacagacactggacagacaactcacagctcctgccacagtacagcatggagcctcccaaggcactagtcacacagatcaagccacacagccaaatggaaatacaaataatagattgaggtcacattgactgtttcacgttgtacttagacatgctgattaaaacctgagttgcaagtgtgccatggaacataatctctccctctagtgttttggaacaatcacacacaaatgtttatatccacatacaggccccatatacaatgggggaaacagaacagaagaaggttggatggttcaccaagttgagtgggtccttcaaaggatgtcaccatcttggatgtgatgttttctgttttcagtggcatagaactagataaaaggtggcagtgcagaggatggaagtggtattgctcagtgggaaagggaaggcattttaggtttgagacatattacaatattgccttttagcgtagaaaagccctccttcctgatgctcttgctagtgctgggtggaaagattccctttcaactcaacatgtgtgaagcacatgaactgaagcactcttcctgcttagcatggcaggggctgggccaggccagggtggaccaggtcttgctctgatcaaccacatggtctcaggcaagttgcttcacctttactgctgagcttcagtgtcctcagctgaaatggggagcagaatactgacttcttagtaggggtctggtaaacactgggccccttttcccttctgctctaccctgcaaatcttttcctctttctaactgcctctgcatttggaaggggtcaagactcgtttcatagttttttgggggattaaaaaatgattagaagcagatggtgagaagaaaatagaaagtatggagcaaataagaaatgtgggaagagaagagggcaaatggtaaggcagctctcggagctggcacgttctttctctctggaccagagcaagccagagcctctcagtcatcttcacgggctggttgacaaggactcctcacgttagcgtgcacacgaagaacctgggaccttgttcaatgcagatcctgatacagcagatctgaggtgaatttctagcaagctccctggtgacgctggtgctgctggtccatagaccacaaagcaaggagctcgaagacatagataccaaaagttacaggggaaaacggacaaagccaccagctggcagttgatgcaggtatcagaagcaagtgggcctcggaggggccagatgcctctctcctcacactgaccgtgagagcgagtgctcctcatcaacaacgtggggccaggcttgagtcagcagcactgactttatgtgacctagtgcagctcgccagcccacgctgatgtgtgttaatggagggggtgccccttataggagggtggtgtgggctataatttcttctgcattctctgcctattgcttgaaggacagtgttgtcagcagtcaactgactgagcttgacttttcagcagtttttttaaacttcactgcagtgtttttggacacagctatgtcagaaatctatttccccttctcagagaccaggaagctcttgaggtacaagctcttattaagcagaaaattttaaagtggttttccttctccttttcttgggtctgctttcttggggcaaacagaatacgagaagccagcttagaaattgcatgggtccttcctgcattttgtgagaaaatggtggcctcctatatttcttccctgacaggttactgtgggccaccagcctccttggtgacttctgttttgcagatggggaatttgttgattgtagtgagtacgctgtgtgcggcagaaaggattctgtcacctacagagagctagggaagcgcccaggctgaggaaacccaccccttcgaagcagccatccataggtagcctgggggtcttttcacaagacagccctagccccagttcatgggagttggaacaatggtgggtccaatggtggatgaatagtttattcacatgcatcccaggagatttgtgtgaagagggtgacagagagttgcttcttttaaaaaaaatgtattaagggctatgtaaataaaaagaagaaattaagttgtaacagtaacaataatagctatcttttattgagcatttactatatgctacatgttttacatgtacatgaagtccttataaagaatacaattacatatgttaatatgtgattatatacagaaaattgtatcagaattatatctacatatataaaaataaaataaaatctcattttaccattgagggatctgagatttagagcatttaatttatttaagatctcacagctggtaagcagccaagtcttgggtttgaatcccatccagcaaccaactagttctatgactttgaatgcaaaagatgatggcttttctcattattattacctagttagtctgagaaagagaaaactccattctggatggcccatttctgggtggattggtgctaggtttctcctggtcttggacgaggttgcacttttcagccgctcctgtgcacgtgtgtccgtgctctgaggtgggaggaaagctcaatgtgggtctgtgagtccagggcaggcaggagtcctggggactggaggttctctgcacttctgtttgatcttccctgcctgtctgtggcctctgcagtttaaacaatgactgtcacttaaacctcttctgaagagcttgaagtctggtccatgccttcagcccaccagcatgtgttgagtacctgttgggtacacagctctgtgtctggtggaggggaaacaaagattaaaaagactgggccctgtcctccaacagctcaggttatttcatgcctgcattcggggcactgtcttacttggcctagtcccacacttgtccctcccaccccttgcttctctattttcaattcacttctgtttctacacacatcagtgatgcagtgtcctatgtacaggtgtgcctgggacagtcctggtttatgcctgttgtcccagcataatcattaatagttctctatttcactctcaagtgttccgatttggatggcaccctatttattgagtgctcattgtgtgccagacactgtgctgggcccggggcagatggagactcgtaagccataaccgctgcctcccaggagctagtctgctggggcatccgttctgaataccatgacttggcaagtgaagcattcccatgccttccagactcctggctctgcctgtgtgaaacgtactccatttccagagccagctgccgagctttttcccctgggctgactttccaccaccctgacctgcgattcctctctgctaaccctcctctcaccgttctccccagggtgggctgtgggccttctggtgctgagctccctcacatctgagctgtcttagcaccttctttccgcctgtatttgtgttacttggatatttgtgttttatcttctgtaccagagcataggttattttaaagcagggagcttatggcattcaacactgtcaccctgggaataggacccccaaaacactttatttctcaaataaatgatggagtaggttccagcgttgtttcttccttgctgtccatttctaaggatgagtaaagagttaacgtattgaacttgaaaggagagatttttttccctcttgtaataaatcaaacttttctgaatctggaaaagtgatggatgaaactatgtgagcacacacacacacacacatatacaccccataaccattttgaggtcatttaataagggattgctttctggataatctcgctccttgggtataaatctaatgtgaaagggcaggggtcagatatttaccccaaagggttggtgtgaggataaaatgaggcattgcttttaaagtgctaagctcagcccactgaaaaatacgcaaatgcatcagaagagtcctctgtaaatccactgagctggaatttccaagcaggtgtccttgctgcctcttgttagccttttgtgagttaattctttgtttaataacaaagagctgccagatggtaattttggaggctcagatacactctgttgcacgtgcctgtccagcttacttaaaatatgtcagaaagaatgagggaatgactcaaacaatttcaggaaatggttcaaggctgtgtaacctttaaggaaaaccacacggagccattaccttgtgttgaaaggcagctccctggctccctgggaggcctggtggcaagcagtgagacacttgatttaggtgaaggggggccccaaggcagtggtgcctcccttccttctgcccagaattgaggtgttgtccctacagtggaaactcaagagcagcactgtctgatagaaatataatgtggtcacatctgtaattgtaaatttccttttttttaaaattatgctttaacttctagggtacatgtgcacaacgtgcaggtttgttacataggtatacatgtgccatgttggcttgctgcagccatcaactcatcatttacattaggtatttctcctaatgctatccctcccccagcccgccaccccccgacaggccccggtgtgtgatgttccctgccctgtgtccaagtgatgtcattgttcaagtcccacctatgagtgagaacatgtagtgtttggttttctgtccttctgatggtttgctgagaatgatggtttccagcttcatccgtgtccctgcaaaggacatgaactcatccttttttatggctgcatagtattccatggtgtatatgtcccgcattttcttaatccagtctatcattgatggacatttggattggttccaagtctttgctattgtgaagagtgctccaataaacatatgtgtgcatgtgtctttatagtagcatgatttataatcctttgggtatatacccagtaatgggattgctggatcaaatggtgattctagttctaggtccttgaggaattgccacactgtcttccacaatggttgaacgaatttacactcccgccaacagtgtaaaagtgttcctatttctccacatcctctccagcatctgttgtttcctgactttttaatgatcaccattctaactggcatgagatggtatctcattgtggttttgatttgcatttctctgatgaccggtgatgatgagcatttttttttctagtagccacattgaaaaagttaaacaggtaaaactaatttcaataacatatatcagtttgctagagctgccataatgaagaccacagacttgtggtttatatgaacagaaatgtatttgcccacagttctggaggttggaagtccaggatcaggtgtccacaggtttggtttctcctgaggcctctcttcttggcttgtagatgactgccttttccctgtgtccccgcatggtctttcctctgtactcatatctctggggtttctgtgtgtccacatttcctcctattctaaggactccggtcagattggattagggcacaccctgagggcctcgttttaatttaatcaacccctttaaaggcccagtctccaaatacagccccattctgaggtactgggagttaggactttaacacaggaattttgggggaacacagttcagcgcataaaaatgtatattatttagtccaatatagccaaaatgttattatttcaacataaaatcaataaaatgttaatgaaatatttgccttctttcctgtactagggctttgaagtctggtgtgaatattagccccattttatgatctcattaggcacacgtgggtagtggtgaccgtatcagacagtgcaggtctagtgtcgaacctcctaatctcttgggagaccttgggattgtcgtaaggaggcctgagtgaattcataaaacatatgcagttcctgaatcaactaataagtaaaagtataccttttatcacctgaggttctggtaaatattttggtattataaaggttgctttcacacttacaaaagttaagaagcatggttctgactttcctaaactggggtttctagagcccaagctccattagcatggtgatgacggcctgcaaaatctttccagcatttcagaaagcctggtgggatcacaggggttgccattcagctactgacaaggtcagcatcattgctttcagctggcgttttagtacagtttttctggtgaccttgtgctgatcaaactttccgcgtggctttttatgacactgtaacaattactggggtcatgcctggagaggtggcccacagttcatgcacaggctcgagtacaagccttccggggactcatctctcagccctgttattattctcagggatttggagggtgcagaggtagatgaagtaagcaagcactattgtgcttcctgtgttgaagtcagggaataagaatttcctctgtgccacaaataatgctccccacctgtatagaatgcctgggaaatgcaacactggccatccttcagctcttctgcttacagctgttgtgctggtgggtctcctcctattctcagagcagagagccacgaatggggcactcggggccgtgacaggcatcccttagctctggccttctggttgtgggcagactctgctgtgtccggcagcccatccagcgttggatggcatcagcaacctgaaagccctttcttaggctgaaccagagtctacctccatgtaatcacacactcccctcctatttctgccccggagcacctacagatatctgtctgtctgtccccatccccactgcctacttcctccagactcagcatcctgagttcctttgggttactagttcattttggaacttattccactattgaattatccgtattctttggttttatacctttattcctctttagttgaccttttagatacttttctaaccatgccccctccccgctgccccgaaagatcagggaaaataagaagaaattcaaacccttgttttgctcctcatcagcgacagtggtagggaagatgcccacggcacggaggttcagtggttgttttcattctttcctgttagccagtttcctcaaattggtcagtataatcctacctcttggagcgatagctggctggattcttctgccattttggcagttatatattggtctggatttaaaagtgatgtttattccatagctctcctgaatctgacatttgttcctctttcatcctatacttccctgggcatgatacccttctttccatcagctgtgttggagaaatgtggcatgtggcagatgtatccttgcttgtttaattaatgagccaaacagtccagaaacttaggttacaaccaaggtagtctggcaagaaatatacatgaattcaaagaggtttgggataattttattaatgataaaaccataaagaactcagaaaatattttaagatgcttggcatcaggaactatttcatttgtctccatatccccagcaccacgcagagtaattgacattgactaattgcccaataaatgttcactgaatgttaggagaagctggagtatttccaaaatgaacatatgctcaagatattctactagaagtttacaatgttatcttttacatttagattagtgatccattttgagttaatttttgtgtgttgtccaggatagtttcaaacagttgtgcaaaacaattctgtttgttggttatcatgggtagactaatacctgtcagatcatataacccgacagtcagctggaaacacttggtcacatgagattgcctatctacattttaaatttggcttcagagggagcagccagcaactcccttcaaccccctaaattttggattgtcctaatgaaatcttggactgaagcagtacatttttaaccaggctttctcaggagatttggttcggctggcactcagcccacactttgcttaactctgagcaaaggtgtccgtgggtggataatcccacctccccattctggatgtgccagcacttttcctactcatccccagttatggaatgtctaattctttctcattttctcctgtcactaccatgctgcagtgagcatcttgggtcacctaactattaattctggaggacagattccagccgtggctttgctgggtcaatgttacagccatttatgtcccctcagatgttgggttggtcctggatgctgccctgtaactccatcacacccatctgaagtcctgcctggtaggcagcagacactgggtgtggcttggtttctcatacctttttatttcagtccctggtgtttttgtcatcttgtgtggcagtggcagtgctccagctgatcatttttatgggacagtccttccttgatgagacccagatccctgtcacttgacaacataaagaatattattcttcataccagcatttcccaaagcattttttcaaaggatagtaacgacttttatgtcaaaaaacaaaacaaaattttgaattcaaattaattttggaacataattgaatttaacgcaggctttttattgcaggacttcatggagctttagaagcccaggcacgcaaggaggatgcactgtttggcatttcctaaatgtacttgaccacggaacaccatttttctcctgaggtttaggaaatggtgctatgatatagattagttttctatgaataacttggctttatgccttcatataccttttctctctactcatgtagaaactcttcttcagcttcatgttttaataatggaagaacttagtgatgtttcatatgtagagatttttctctaggtccttctcatcgataagacctgtttcaagatatggcaagccctagttctgatctctggggtcctcaccatttatagacttccattagtcctgttgtgacttaattgttttgttatatttttggtggcctcctacactatggaagactttctgaaagcccatatctcatgctaaatttagctggatttttaacagccttgattgattgctggtcttaatggaagaaaatgtgatcctttctcttcctcccttgtcattaaattattactaatctatgaccagaggaagcagccactgcatacgtgggtgtatttttaaaaattgtgacacatcatcaagatggatatacttgcccctttaattcaacaggcacctgttgaatgcctgtgcatgcaaacatgatgctgggctgagccctggggcttaccctgaagagctttggagcccacagcagaactcccagccaggctcatccaccactacagccacaaccatccctacctggagaaaggggctaaaagaagcccatgggattaacagacattctgaaacaccaacccttaggaaaggagtagaaatgggagttgggattaaaagcagaggtgaggttaaagggtttgaacaaaatgggcctgatcttgggcttctgaagtcctgtatagtgtaagtgctgacctgagggcctgtggctctcctgtagtgagggaggatccaactggagtatgacttccacctctgcatggccagcctggtgacgtgaagcacatttcttatgtcaggttcccagtttcctcttctgtaaaatggaggcagcatgggattgtaatgaggattaatggagctcatttacctgaacgccccagagggtgcttagcaaatactttatgcttcttgtgggtccattactttcccttgcctgtttttttagggaccctggagtgttaccttggcttctgattaaaagctaggttggcagatgcaagcacacatgcctcctatagtgttgtcctagactggggtggtgttagtggtcaggcaaataattgatcactctgtgttctcaagacaagcaatgggtaagaagacaaggccacggaggtcaaagatacagaaagataattgccatatatgctatgcagccagtgcccctacctcatgtgattgtagagtggttcttacactagggtggcatagaatcacctgaagggcttgtttaaacagatcatgggtggtgggtacagcatttcaggtgcggaagatgaaaggttctggaggtggatggtggtgatggttgcagaataatgaaaatgtacttaatgccatagaactggacacttgaaaatggtgaaagtgatacatcttatattgctctccctgccccatcacaaatagattgctaggctcactccttatagattctgattctgtacctctgaggtggaccttaagagtctgcatttgtaacattcccacgtgatgctgctggtctagggaccccagtgtggaacccttgctgactgggttgggagtgacgttgggaactgtttcgccagaaatactggggacccttgagtggtaatggaattggttgtatattttagtatgatagttcttatagatgataaagacctcagaaaaatctcactatgtccatgcccaagagttccaccatgagcacatgccttgagggcagtgaccctggctcctattgtctctgtctctctatatctataacttttaatcttgaaatagtttaagattcataagaagttataactcataagaagttttaactcataaaaagtcaaaatagtacaatagtccccccttatccattgggaatacattctaagacccctagtagatgcctgaaactgtgggtagtcctgaaccctttatctgctgttttttcaatctgataactgagacagctagtaagggattaatgggtagtagtgtaatagcatggatgtgccggacaaaggtgtgattcccatcctgggcagtatggcatgagatttcatcacactactcagaatagcatgcagtttaaaacttgtgaggatgaggggaactactctatggaaagattcaggtaccctttacccggcttttcccaatgataacatcttacatatacatagtacattatcaaaagtaggaaactgttattggtttaatactatacattcttttaaaagagtgctcaactcaagattaggaatctatttttcaactaccattagccccactttggcaaggccaggtgggataagtgctggggctcctatggtgggtgtgctgcagtcttcagcagagcttggctacagaggagaaagatctaaactggaccaatttcatatggtcattgcctctggcttgtggctgatcatcttgttctttggaattgactgtctcatgaaatagtgagtttcttgtcaccagagagatttaagcaagagccatggaatccctgtccccagcactgagaaggaacatgaaccatgtattccctgaatgtcttattccttaaaaatcctgtgattctatcaattgttttgttagagtttgtggctgacattgattacactatgagtcatgtgacattccatgttgatgtagttgccaaaatgctcgccttcctgggttctgctttcattagtttgagagaggagctgagccacagaaaaggggctggagtctgctagattaatgaagatttgggatgtgtagtctgttttcacactgctgataaagacatacccgagattgggtaaattataaagaacaagaggtttaatgaacgcacagttccacatgactggggaagccttgcaatcatagcagaaagcgaaaggcacgtcttacatggatggtggcaggcaaagagagagaacttgtgcaggggaactcctctttataaaaccatcagatctcatgagacttactcactatcatgagaactgcatgggaaagacccatccccatgattcaactacctcccactgggtccctcccatgacagtgagaattgtggtagctacaattcaagatgagatttgggtggggacacagccaagccatatcattccgccccggccccttccaaatatcatctcatcacattccaaaaccaatcatgccttcccaacagtcccccaaagtcttaactcatttcagcattaactcaaaagtccacagtccaaagtctcatatgagacaaggcaagtcccttccacctatgagcttttaaaattaaaagcaagttagttacttcctagatacaatgggggtataggcataaggtaaatacactcattccaaatgggaaaaattggtcaaaactaaaggctaaatgcccccatgcaagtccaaaacccagcggggaagtcaaatcttaaagctccaaaatgatctccttttacttcatgtctcacatctgggtcatgctgatgcaaaagataggctcccatggacttgggcagctctgcgtctgtggctttgcagggtatagcaccccacctggctgctttcactggctggcattgagtatctgtggcttttccaggttcatggcacaagcagttggtggatctaccattctagggtctggaggatgggggccgtcttctcacagctccactaggcagtgccccagcaggagttctgtgtggaggctctgaccccacatttcccttccacactgtcctagcagaggttctttatgagggcccccgtgagggccccactcctgcagcagatttctgcctgggcatccaggcatttccatgcatcctctgaaatctaggcagaggttcccaaaccttaattcttgactttgtgcaagctgccaaggcttggggcttgtgccctctgaagcaacagctcaagctgtaccttggccccttttagccatggctggagtggctgggacacagggcaccaagtccctaggctgcacagagcagggggaccccaggcctggcccatgaaaccattttttcctcctaggcctccaggcctgtgataggaggggctgccatgaagacttctgacatcccctggagacattttccccattgtcatggcgattaacatttggctcctcagtacttatgcaaatttttgcagccagcttgaatttctcctcagaaaatggatttttcttttctatcgcattgtcaggccacaaattttccaaactttaatattctgttttctttttaaaactgaatgaatttaacagcacccaagtcacatcttgaatgctttgctgcttagaaatttcttccaccagataccctaagtcatctccctcaagttcaaagttccacaaacctctagagcaggggcaaaatgccaccagtctctttgctaaaacagcaagaatcacctttactccagttcccaacaaattcctcatctccctctgagaccacctcagcctagatttcgttgtccctattattatcagcattttggtcaaagccattcaacaagtctctaggaagttccaaactttctcacatttcctgtcttcttctgaaccctccaaactgttccaacctctgcctgttacccaatttcaaagtcgcttccacattttcagatatcttcacagcaatagccccctcctggtaccaatttactgtattagtccgttttcacactgctgataaagacaacaataccccactcctggtaccaatttactgtattagtccatttttacactgctgatagacactgagactgggtaaattacacagaaaaagaggtttaatggactcacagttccatgtggctggggaggcctcacaatcatggtagaaagcaaagacatgtcttacatgggtggcagcaggcaagagagagaacttgtgctggggaactcctcattataaaaccattagatcacatgagacttattcactttcatgaagacagcacaggaaatacctgtccccatgattcagttacctcccactgggtccttcccatgatagtgagaattgtggaagctacaattcaagatgagatttggatggggacacagccaaaccatatcatgggggtagagttgagggaaggagagaacattccagggataggaaatagcacatgcaaaggtcctgtggcatggcctttatgtgtaaaggagatattgataaaccttggtatgaaagactgtaggtctctgggtgcaaagtaatggctgagcatgaagctgaattagacttggccactagcttactttgctgttgacagaatgttggtacagattgagcatccttaatctgaaaatctgaaatctgaaatgtcccaaaatctgaaactttttgagtgctgacatgacaccacaagtggaaattctacaccttacctcatgtgatgagtcacagttaaaacttttatttcatgccccaaattatttcaaatattgtataaagttacctttataggtcatgtgtagaaggtgtatataaacataaatgaatatgaagtttagcctttagtcccatcctcaaagtatctctttattatatggagatatttcaaaatctgaaaaaatccaaaatctgaaagacttctggtcccttatatttcaattaagggatatgcaacgtgtacttctgcagctgccttgagaatgcatatcattgaataatgttagtgggaggttttaaactatctgaagatcacacaactgtgagagcccagctcccctgaaatgcgtagggttggtcagtgattttgctatgcgccaaagcagctgccttgatccctcagagccccggcatttctgcccggggtttggccacccctggccttggctgacttctcatggatgcagcaaaaacccagtaggatgcacctctcaagtggttggcagcttttactggacagctttagagtcctgtgggttattctggttgttgctattcttaaatattgagtgtccaaaagattcgtgaactgcatctcagctgggtgggaccctttgggacaggagtaggggaataatgccgtcgttaactgcaaagaggagttttgggaccaggttgtcttataggtttattttgaacaactgataggcttggtattgctggaagtggatagatttgggttgcctgtgtctagcaggtggcttccttttccagtatgttgcccactggtctcatctatcagactcacttgagagtatttcattattcatctaataaaggagtatgtgagattcccagaggaggaggatctacttctgtacttgacctgggtgaggaccactgggaacatttgcacctttcaccattgcaaactttgacatgtgagagtttccagaaatacagagattcttattttaatcctttttctttttaactgcagaagggaaataataatgggatagaataactgcagggagtagagagatgagaaaacattagaaaaaatagtacagaagtagagctggatgagaatccaagttatgagaacctattgatgagaggcatgcagaaataaaaagcccaaattcagtgatctaaatcagggctcagatgaggctgtttgtattgcacggtaggaatatatccagaaacagtgggccttttataaattaagcctgccattctccaattgcttaagacactgaggcccatcaggccagaaacatatgacccactttttctgagaaggaactttccctttaggagtggtaatttagaagaaaagaacaagcccaatgaatagtcccttatgggaggcatctcagcagaggccctttttgggggcaggagggattgcatagcaatactgcctacccagagttgttgttcccaggctagggtccaactcagggcagggagatctactggaggcagcgtatcacacactagttgtccaagagatggagagagagtgcaaaatctgagctgtgcttatgggaagctcggagtctcacaaaactacacccatgctgcccatggtttatgtttaatgaatgaaatgatgattaagataggacaattggacaaaaaggctgggccttcttaggtgggtattgagtgggaagtgattcaagaggccagacattctgtctggacattagctggaagtggggctggacaagatgaactagagccctcttgtggtcccatcattcaggcctgtagctttcatttgagaccagtggttcttaaacttttgcagggatcagaatcacctggaggacttgctaaagcacaaattgctgggccccaccccagcgtttctgattcagtgggtctggggttgggactaggagtgcatttcaaagcactttctggagatattgatgctgctggtcctgggaccacactctgagatacagtaatctagaccatgaaggaggtctggatcctggggagggaatccgctttctgctttcttaggcactaggaaggcaaggagatacttggggctggaaggtggcaggggagcatggaagggaggagtccttgtccatcgtgtctcaccatctgaggagctgtcatcctttattcatcctgcccttctgcttgccctcagtctcagaaattccaaaagacagcttatgaccctgcatttttggttaaagaaaggagggaactgaactgtctgctctatgaattctgggctagtggggatcatggggattttgtaaattattttggtagcccgttgagttttgtctcaggatttcagcggaatccaaaccatgtgacatggaccattatcattcagctgccacctcctggatcctgccctgtaaacatgcccaggggtctctgaggatggacgcgtgtcattcacacaccaagtgtgttagagacaacagaaaaccttgtttttttcctgtgttctggtgaaagtcttttctgtctttccctttgtttcttcgagggagcttgagtggcaggattattattaagagtactttttaagttcccaacaattagataggaaatgaactgaatgggagttcacattttatcttcaggaaaatgaccgcaagaaggccttactgtggggtggttaagagcatggcctggctttggaatgcctggattgggaatccttgttttgtcacatcatcgctgtgtgatcctaagccagtgatgtgacctccctgcacttcaatttcctcacctctaaagttgggataatactacaacttatttagtaggattgctgtaaggaccaaataagataatatagctcatgcagttagaattggacctgtcacttacagatagaaggcaatacattttagttcttactgtaagactgagacatccaaagacgtctcatactgtaatgtgtgatatttatgtatatgctttttaaggactacaatccttagtttcctacctactcaaggttatgttttgtagatgctaacagtgtacattctagagaaaatcagctggagggaggaaaatggtacagttctaaaattctttaagcctcgtttaattttttacctgttactgctttcatcatcacctctcactctcattttctaataagcctgaaaagcatgatggagtcataaatcatgtctgtaaaatgaagatgtgtagactttggtaagatctcacatgtgatgttaataacaataccttacatatctggcctcacacttcacttaaactgtcccatttaatccctgaagtggtctcattagcttctgttagtcccattttacagtttgtacagtggagacttcagagaagaacctggcccaggctccacaggcagttaatgacagagctgggatttttttttgtggaggaataggggagacttttctggtaaagaccagaaaacctgctagacaaattctaaaagagccataacactcagagcggggattttaacttcatcttctgcttcagggaccacattgttcccagtgtgtttaaacacctggctggtttttcacttggggttctcattcagattcgtgattctgtttactgagagatgatgtcccagttactctagctctgtaacaaatgactccaaaacttggggctgtgaaataatcattttattttgctcatggattctgtgggttattcagactcagtgttccatgatatttggggcctcagcaggggtgattcaaccacaggagctagagtcccctggggtgtctttgcccacgtgtcccacaggtgcatggttaggacagggacctcagatgggctgtcatccagaacacctacgtgtggcctctcaatgtggtctttctgcctgggctgacttgggtttcctcagagcatggcaacctgattcctagtgagatttccgagagagtgcggttgtctggcacttctgtgatctggcaatagcttcaaggaaggaaatatatttttacattgaaagaagagaatatgagccatgtgtgccaggtacggggagccacctgtgaagatcctgagtagaggcttaggtcactgtggacacagtggcagcagtggacaaggacaagggatgccgggtcatgcattcaccccacaaatattccatctatctctgaactaggcagaatgagcagggcaccaatctaatggctcttctggataatcacttcacatgggaatcctaggactccatattatattcttatcctgttgaaaatttgaccttttaaagatttatttatatttagctcaggccttaaaaattccatgtactatctaaaaagggaaaagttcatcccagtcaatgtcctgtcttgcttatgtttaagttggataggaagaaaaaaatccacaccaggagaagattggttgtaaaagtttattttacatttatgtgaagtttatttttggttctgatattcttcatagggtagatatttcttttaagactgttaatagtgtatttcctttttatttgccactccccaccaaaataaaccctcttttatttttgaatcagcttcatatcttcagaacgtccaactttaaataatggttggagaagctccaggttaagtagagagtaaaatcctattgctttctgacctttgggttaggatcaagtgtggtgtaataaaatatcagtcccaagagtcacctttgctgatttttttcctattattctttcctgttattccatattcatgcaggtcttgcagccaaggattgttacattaagatccaatctgaaattaaaacttatggttttaaccaataagctataaagctgttgaactcccactgggatgtagttaccttttcctaaacttcctgcattgtctccttttagccccacagttgatttcttattgagcctttggaaagttccttgccgtttcacagccatttcccgtcagagtggggaatattgactgtgcaaaccacttaaggtcacaggcaccacagctgtgtttcttctttgcagaaggggggtttctttgggtggggctgtgctcagcccttccgggtggtgaaggtctgaggtcacactgggagagcaggtccatatcgggattggggctccagcaggatcagaatgacttcacccagacttctggacctggaactcattctcagaaccttccagaagaccctgccctggaattgctttcaagggtctttttcatctgtgtacagagtatatttccttggaggcagctttgctgaaggccccttgagtcaagggtaatagggtgggagcagctatacacagttgcatttcagtgtttgatgataaaatggtgtccgttggtgagcatcttggtggtgaggaagtttatacgaccacagatgcttctcaccccaaggtacccgtgccctgtgctgctggtgccactcatcctagggcattcctgcttggcagtagcagattctagattgtcctgtttgctggtttgggggctgcaggggtctgcagagtgccgcaaggaggaggagtcccagatcactggttgaccttcagcgggcatttaacagcatattccatcaggcctcacctactagtgttttgttgaggctgctgtgtaactttgactttctctgctgtctcctatttaagagtaaataaaggtagtgacagtcacaaaaatagcatcaatgatgacaactagcgtttactgagtgctgactatacccaggcaccattctaacctctttacccaagttgtctctgctagtcctcaccacagccctgggaagtgtgtgctgtcatatacccatgaagaaactgaggccaagaaaggaaagcagctctgcccaaggtgttataagcagagagcaccgagacaggacccaagcccaatttgtgttgactggggaatcagtactcagttctcttagtctttggctgttttgttgagtgcccaggtcatcctggtagaagggagacagtgacccacgtgaaaaaggatggctacagatgcatggctgcatggctgtgcgtcatccaccctggagtatctgcttgccaaaaatagggctacctgcaaaatgctttgagcactgtggaaaccagccgttacaactccaaacgtttatttttctgataataggtcaaggttttcataattgagttttaggggggctaattttagactttctgaaaatcagtctcaagaaacaaaacccagagtcaagtaaaaggatgcttttggaactgatgattctcagaagaagccatgaagggctcggccataaccccgggaaagctcactggccagcagcctggagccagtggagcttcaggtggctttaattcttccctggatgctggtggtctccagagacacaggggtaaacaggtcagcgtccttgtcctcaagggcgtcatcctccagggaggacatagctggtaatgacaaaatgtgggccagcgccttcttgcagctgggcacacagggctaggggaactgagaggagaaaaggatgaatttggccttggcttggagcagccttttaacagaaacacgcgtaactttcctgcagatgcacttcctgtgaatgaagagtcttgatatatatttttctttaacaagagaaagccaggcttttgattaataatttatatgtcaatgttgggatcttcattttgttatgagagatttcagttacaacagtgtgaggtgggtggtcaggaaacattccccctgggctcactttttgcttagaaaagtcctgatggagaggttgaggtgggaagagagtgagggggaagactccatggagcatgacaggcatgctgtgcctgccacagccaagcatggaggtcccaaccataatgtgtttttgagacaggatctggctctatcgcccaggctggaatgcagtggtgcaatcttggctcactgcaacctccgcctcccaggctcaagccatcctccctcagcctcccgagtacctgggactacaggcgcaccaccaccatgcctgcctaattttttgcattttttgcagaggcaggggtttcgccatgttgctcaggctggtgtcgaactcaagtgatccacctacctcggcctcccaaagtgctgggattacaggcatgagccaccacactccacctccaaccacaattcttgttttaaaaaatgaaaatagagtgaaacagaaatggtagaatcaagtcaccttgctcattcacagtcatgtgtggctaggacaccatgtggtccagtctgacacaggctgatcctttcccctcaggacccatccttggggtcgtccagtccttgggctctgttcctctgatgtggcacaggtggtcagtggggcagggaagacagaaagatgagggccacatccacagaagtcatttccttcctgtggtacagacatgacaccaccctgtgggatgaatggggattcccatgtttgctagttacatatggccaagcccttcagcctttctgccccacttccagtttctttcttgggtgggaatgccttgagcctcagttaattgtttgagttttcttgagtataaaaggaatcctggctgggcattgagtgaatacaatcataaaacccaaatgatgctgttggcctcatctgagctgagagtggtgttggcaccttcatagctgacatcaaatggatctccaagcccaaacactaacagtggaaccagctattgctgcttctggtgtatcatccaaatgggttttcccagccatcttctggtgcatttctaacatacccttaaaaggcataaaaaagtggcatagatgatggctggaaagattaagttctttctggtggcttctttaattttggaataaccagccttccttcaacccccttacatgcattagaaacttctgaactgtttttgttctgtttttaattaggttgtggtacaagaggagcaattaataaaaccttccatttccacatctactgtgaaactctgtgacttcttcccgtgtgatgatggctaagtgcgcagaacatgtgaaatttaagtagatttgtggaaacagaaacacatttttatttagtcgtgagcgtcacttggagtataaatagagccctttatgattcgtgtgctggtctttcttcctggagggcttcagtattatctcatgctgtcatctttatgttgtattggaaaaatctgggattctttttcccttggtcattatttgctttttaaaaaataatgtagttttaaagaattcttgctatttaatctcaagcccaaacatggtttttagtgaggaactgatacttaataaagtttgatatttttagttctagaaagaattgttttggggggtgggaggctgcagttgagaggtacaagaaatgttcaatgaggggaagacactctactgtggttccatttgctctttgaaaacttgtgtttctgttggaaagaaaggtttgattttggaagttttaaatgtactgcatgatgttgctaaattttagttcgttgctgggaagttttggatgagctcatttcataaggatttatgtgccttataggccagtgtggggtaaggggtggagaagcttgcctccttcagaagggtcttcattcctagagggatatggaatgacccactgctttttggtgggaaacgtaaaggccagtcagcttttggatgaattttcaaggaagacagcagctgtccatcttcagtcttgacttgccattcccttagggagttccttcctttcacccatctttttctccccatggcttggccatgccacagtggtccctcggcttcaacagtcttgcttgcttacatctactaactgggcaagagagaccattctcccattggccctggaccaccactctgatttggatttagatgggctcaggaattttgtttggaatccttttggccttaaacaaaataatgatgagagaaatctgcctcccataagtcataatctcagcaggctcctgtgtctgagctatttctgtatccaggtccccaagagggctacagggaaaacttcatcatgatgggagggaagaaagaaggtaaagtcctaagatgtttgcttcctattccttgtaaggtttagccatgtatagtcatgtgccagtcacctagggctgagaaaggggagcaagcagagagggagaagaggaagaagccaaatgagatggttcgtaattgattagtggaagttaaatcatgttaaggataggaggcttgtcccctccatcatgatttagtatatcatccttcccaagagaagttttgagaacttgtcctctggtatccaggaaatggcctccccagcagtgtgcatagtcccagggaagccgtctcatgagcccctccttctcttgactcctctcctaatggtcacatggtgccaccactctttcaagccaagtcaaattgcatgcagcagaaaacccaaataagtttatgcagtagaggtttattctcacaccgaagtaattcagcattggtatggtggctccatggacttcaaggatcaaggatcctttcctctttctgttccaccatcctcagaacatggcttccagtttcaaagttaccttatggcccaatgtggctgttggagctccagccatcacatccaaattccagataggaaaaagaaggaagagagaagattacaaaagaaaattatctcccagctaatttgtctttatttatggagttttcctggaagcctcacattatggtttctgcttgtatcttcttgaccacctcttctccaggggagactagaaaatgtcttttaggtaggcatattgtagattggaataaagttgagtttggttaaaagggaaaagtagagaatggatattggttaggcatatagtctctgccatggtctagaatatatgaagaacctcatgtgtgaaccttaatatattctgccaaatattctgtttataatatctaaccctcctatcagatcctaggccatttggaagccaggagcttatcctctcctctttgtatcaagccaggggcccacatgttggagttatagcccatctttgttcaattgattcagattcagcccttgcctcccatatccctcaccatggatatgcagttataaatgatttcttgttaagcatttttaaaaggttaacttcttcccagagagcttttacataattatccatttaatgtgtttttaatgataaagaatctaatagttatcaataatgttggaaaagtaattctaggcatgaaaattagcagtatggtacatatgaagtacataccaagtactacctgattccagatattaggaaaacaagacagaagggtttcaccactagtcagtatcagtagattgttggggagaaatctttatgaaaaatgccacttttcactctttttttcaagtttgaactgactgtggaaagatgggagatgtctgagaaaacttgtgtcagtacttcatgtttgtaaaaggacagggaatccttctgaaaatctagttacataaatttatgttccaccacaagaaaaatcagtggatggctggaaggcggggctttcccttttgctctggaagggaaggaaactctgacagccagacttctcagtcggaaagtgtctttggtgagccttactatgtgactggctgattcactttgtccgctaagtcttgggagaggtgatgtaaccagggactgcaacttctagggaaaggggaaaaatcactgttggccccaccctctagcattggaagcttaacagggctttggcccacagcacatggaagtttgagctgtgttttgtaattcttttttaaatgttcgccagagcatccattattcttcctcattttctcttctcctcttccctccttttcttctttcttaccttttctcttttttatcctggatgtgctcctgtatggccattctaaatcaactcaggtctgacctttggaaatacgtacagtaataaggaatcctaggggcttcctgctgtatttctgtttttgaatttgattaacatgagctaagaggttgagtagaaagaacttggactttggtgtccaaaagacacgggtatgaattctgactctaccattactggctctgtgactctggacgagttgctttacttctctgactctctagaatctcacctggaacttgaggttaattcctgcttcaaagcgttgttaggaagattgaacaaaataatgtgtgaaggaaaacccagcgagagggatgaagagcagagtgtgctgggctacataggctaaactaagaagtttggattttatttacagtgctctgggaagcagggaagtgacctgatattgtagatattttcaaaaaatcactctgggcctgtggagtgaatggaggacaggagctggagtggaagcagatagcccagctaggaggcaagaacagtggacaagacggctggactagtgtggtcacagagggaacagacggaagcagtgattcttgagaacttttggaggtaaagacactaggagtagctgaagtcttagatgtgaaaaagggagggaaagagaacactcaaacatggatcttaggttgggtcttgagcgcgtgattggtgaggactgtttgacagtgtagcccaggactgtgcatggggatgacacccacaagatgttggctggctggctggattcatgactatctggaggaaagagagaatgcgtgttcttaggccatgttggatgctgaatgcagtgggacagacccggttctatttcttgctttgaagagattgtgttccaattatctgccctgtttagatggcagcttccagaatcaagttggtcagttttgagcaagatctggaaagcaagacaatgtctcaaaagcatcaggacccctgatatccaccttgttaacaccgtagatgacttcggtgccctccctgcagccgtctgctttaattgtcagaacaaagtgaaagcgaactcagagtgggacttgggatgggctttggaactgagcagcattctcaaagctgggtgctgtagtggcatgactattacaggtggggccaggaccccacttccacaaaattcaattggatacatctggtaggaggtgttcacctggaaatctgggtcttaaaccactttgagaaacactgtcctggaggtaagcagcccctgttctggttctttttcttccactttttaaaaaggaaatcagtttggtggcaaaatctccccttcctgtccataattcagactacgacagcaattagaggcaggcagcctcccctccaaggagaaagaaaccctccacgtgttttatgagtatattcctaataatgacaatagcagcaaacaaacaccatagtggtgatttcatactcatgaaattattgtcatggagttagagcctagataaaagtgtttggcaagtctctaaagcatatttcaagagaaaaaggaggccagaatttatagaatctaaaaatagcagttgaagtgcagctgtgtttagcttgtcagagaacctgttgagtcaagatgggcaggggattttatttctctggccctgaggtcatttgtcttgtttaagaaggggcagcaaacatttccaaatagggattgacttttaaggggaggaagatggctaaatgtatatggtatttcttgttttctgctcttactcttcctacctccaaccccattccaaatttcctcttaagaaaaggaaggagagtttgtttttctcagtagagtaagtagtgactgcctaggtggcaggattttggatggtagtggtgatgttacttattgatggcacatttgatgactgttagtccatggagtggtgggggtagactaactatctggtcttagtgggttctgtacaatcccattaagttgaaggaataaacctgtagttggagaaataacagtgtgacttctccaagactgattggctgacttttggaccctctttgtcccatttctagtcaggaattatgtcttctactgttccacaacccacaaaagaagatgtctgttccacttctggcctaagcaatcctcaagcctctatacttaacaacattggaatgtcaccatcttaaaacttgtcaaccagtaggccttcaaacctcctgccctttaatatttattgaaaccttggtggaaatgaattctgtttttggtggagtgcgtgaagttatttccctccattagtttgtaggccagaggttgaaaactagtggcccgcaggctgagtcttcctcaccgtcccactttgcttgcctggcaaagtgttaacctatacaattgccaatattggaaaactgggatactttgtttacaaatctttatttctggattctcctgggttgctctaatatatattcttggtttagatttcttttctggagaggtgtccccagactgctgtgcataggtccttgtcctcccagagtagctcacctgtgggtcatgatgagaaatagccactgtattttatttgaggataataagaaaggggttaaataaattgtatgttgagcacctagaaaacatatgcatgtgcatgatgagcaccctgtaagcattagctattattgctatcatcatcagcatgtttaatgtattttctgttgagggttccattgaggacattgttcatgacataacccaatgtcttatgaggcctcatgaaagacatgtctgtcagatctcagttccagaaaatagctgtccttcttctgaattactggttcatctgtaccttactcatgcccccaatcttatttctatctttgcactagctttgcagaagctcagaggcaactatgtagttcatgtctagcaggaggacttggattcgatttgttgatcccttggtttcacatgccataatttccttgcttctctacttttctcacttattttgttgtgagcattattgtaagcagccttaaatcctgttggaacaaggctgggtgtaaattaaaaaacaaatcaagcatccattcctctgagaggttatataatcactgagaataggcttccacatcaggacaggtttcatgtcttagccttgggactacatgttttctctttcccttctggacactactgacctctcattgtcatgttggacttgattctatcagttgtgctcatgctttcccttgaatctagataacctgtaacttctgttacagaatgagatggcttatttccctgggtagactgactgtattagtcagctattgccacataacaaactgccccacaactccatggcacacatcaagaagcatttatgttctcatggatctgtgggatggttggacagttctgctgcaggtctgcacgttggctggggaagctgttctccatgtctcttatctttctagaaccagttggctactggggcaggttcttctcatggtgatggcaaaaatgcaagaggggcatgcagaaacatgtgagacctcttaaggggtaggctcagaactggcactatcacttctgccctcattccattggccagagcaagtcatgaggcccaatccatcagtagagtggggaaatagagtagaaatagatcagcctctagtgagaggaaccttagagtcaatgacaaagggtaggagtaccaggtggtgggtagggggcagctgataagtaatgcagtctagcctgtaatcccagcactttgggaggccaaggcaggtggatcatgaggtcaagagattgagaccatcctggccaatgcgatgaaaccccatctctactaaaaatacaaaatttatctgggcatggtggcatgtatctgtagtcccagctactcgggaggctgagtcaggagaattgcttgaactcgggagacggaggttgcagtgagccaagactgcgccactgcactccagcctgggcaacagagtgagactccatctcaaataataataatattattattaataataatacagtcgatcacaggcagtgtaattatttgaagaccataaggttgggcatacagcatagagtatctagcccttagtggctatgttggctattctctacttcccctctccagatccattctccaccattatccctcctgctttgtgcccttgggaggctgaccttcccctctgccttttagttgggttcagtcagaggggagcactggaaaaagagggtggaagagtggccagccatagtgaccatggctctctacggaaggccatagcttctgtcaggtggttagttctaataacttaggggttccagtgaccactccccaccttgctccttccgacctagggcattaatggctccctgctttgccacaggggtctcttttaaactgaccccccttactgttgtaaatagtcccttcagtgaattctttttgtctccctggttgaaggaaacatctgcttctggccaggaccatcatggatacagtaggtgctcaataagtgcatggttgattagcaggcctccttgtttttcctctcctctggcctctacatcactaaatggtcacttctcttctagcctgaagagcccatggaatgtcagcttgggaatccctccctctttccccataacttgtccaaccaccatccctctcccaagaacctggcacagtaaattcattagagcgaattcaaataaataaggttttacttttcttctttgggatttcttagcatgcccgttgggacaattagggagggattctttcaagtacaacattttctctagcaattatgggggttttatctcccagatgtgatttatgccatattacactccaagaagggaacatgaagaatgtttgtggctaaaaaagtctcaacacaaggaaactacaggtgaaacgtaacaatagtaattgccttactttatttgcgaaggggtggtgaacactaatatgcctgactccatagagcagtgtatttggttttcttaagcaggaagaagggggccccccccaattttaatttactgaatgagtttaagaaccatggtgtatttcccaagcttcgctagtgaagatggtattttgttaaaaattgagattcccattgatccagatccagttgggcctgggaatctgttttcaacgtgtatcctgagtcatatttgggaagcactgggctctgcttatgattctcacgttctggtctgtgactgaggagatgtgccatgatgagagtgatgatggtgatggtggcagacaagagcatgtcacatttagaaatactgtaactggttgctgaggttttacatatattccttctgagcttgttttgtctaatattgcctgtgccaacagtattttaccagaattgaatgaaaagaaaggtaccagcagatttttttagatgttctaattgataccagaagcaaagacgtagaaaccgtcatgttataaacatgaaagccccaagcaaacagcctttagcccaccctttgagaaccactacatgacttcttgataagattctttcaactttaccctatgcctggatcatgaaagaggtgtttctagaaagctctgcaaaggactttctctgacagacggctctaggcagggggaagctctgactaactgatctctggagaggaacacagatgttccctcctaaaaaaggacatgctggccttgctttcttacaggtcacgaagtctcttttaggaatgccatttggcatttcaagtttctgcagcagttctgcagaaagccatgcctagaaaatttataattactctgataccagatggctttgcggccttcagtatcaaatgcattgtgattgtgctatgagaattttggggggaaaattccaaactttattaattattgtattggggaaaacatcatgttattgaattttaattagagttgctgggcagcctgggctgccttttaacttacgggtcacctggttattgcctgtgaggctcactgaggaaatgtcttgctggcaaagctgagttcgctcagaatgtggactgttccatttttctgttgtccaacacttgctttgtttgtgacatttagctccttttcttcctttccatcccaaatccacaccctttcttctgtcttttgcaaaatctatgacactgttgaatgaataatataagcccaaggacttggagggatgagagctgtgatgcccacatgttttagtgttggcatgtttccctcatttttggggatgccttgggttgaagctgatttttcagcatccctggtttagcatatgttgcattatgtatctgggaaagtagcatatctattttctcattttgcattacaatagcatctagtaacattcaagcctcaattaattgaaccaataattattatattaaaaatggtatgtatgccccagggcagaggttaggctatggtgggcatttgagaccttagggccatagaccccgaaacatgcattctccagaactgagtatgcaactgtttgctttcgaccttacagcacaggctttgggagaaaacagttacgttcaggtcctaactccagtaatgaatttcaagcttcttgttattgtttttcttcctgaaagacaaagggagttttatgccatggtattttgaggacaatgttgaatcaattgttatcaaatgggaagatttctgaatgctgaatagtttgtaatatccttcaaaaaaccaaaccaagaacccacccacccattcaccatttatctctccatttgtccacccacccattacccacccatccatccattcacccatccatttcaacattcaccagttcctacaaggtactgagtactgcatttatttgctaggggtgcaaaaataaagtctaataataataataaccatcatttattgagaacctactatgtgttgagcagtttccaatcttcaaagcagttttgtgatgtaggaattatgttctccgttttatgagagaacagaagctaatttacttgcctgggtcaccaggcagtcaaggcggagcaggcctgaggcatccttgcaacattagaaccagaacaacatttcattcttttatgttaaacggactctcctgcctggacccaggcccacgttagcatccagagtggcatgcagtggcagaattggagctggaacagccctcatttgttgtcttctctccttgggaaatcttcctgctatcagtgaaaaagggagagggatcagctcttgtttcttggctttgctctttacagcctcttagaaacttgagttctatctggattcatcgtgtcatttgatggtacaggagtacaaatggaggtccacttagcgaatatctaaatatttaaagattacaaatcaaggtaactgttcagtaaactgtgttccatcctaccttgacaaatatacctttataacaacttggaagccctaggttgaattttgatttctcaggcctctcagagtttagtgtagaaatggatggcttggggagagccagcccccagcccacccccccacttccctttccatctgactccatcccgcatggcaatgggccttctgtgcatgcgtgtgtggacacccatccaagcttcgtccaccccctccccacagaggctgcccttggacctcaggtagggtacactcactcatggtgcactttacagtgcaggggacaaaccctggagtagagcccaacatggaccctgaaggaggacttagggctgttggggcagggatttctgttgtcctgggcacacagagcatatctgcaagagggagatgtggagactgaccttggtctcacaaactcattgccccttgcaaagaaataaccaggagggtctcctgagaatggggttcagagtaagggcccctcttgcctgggtcttacccagggtgataccatttctgccaagtcagaggatgaaagggacttcggcggaagccatatgacccacctctgtcattttagggagactgagcatggctggtaaatctcagtgatggctggagccctgggggtccttagtttcccagcaagtgccctgtcctgctcttgcctttctgagcatcatcctcgtggcattctggagcatgaggacccaaggctgggtctgagtggatgactgtagttacgtacacaggctctgctgcagggacaggattacagaagatgtttacacaaagctgtagctttggaaacaggctgtggtgcatatcttagcagccccactgaccagcttggtgatttttgttcaactggagccttggcttcctcgtctagaaattggagataaaatggtatctgtaggtagagttgtgtaggtggaagatgagatgtttgtagaaatcttcatacagcacttggctttcccaaagggaacatcagcgaattgtagccactgtgactggagctgctactattgttcaccaggtgtcctggaccccactgagaagacgctgccattcgttcattcactgattcacccactcaaatattcatagagcacctatcatgtgcaagtactattctggtagcatgggacttaccagtgaacaagagaagcaaaattccatgccatagtggagctaacatcctagcaggtagaggcagagataaaccataaacataattaacatggagatatagaacatatggaatatagagtatggaaacacgaaagctgataagtgctatggaaaaaggtggataagggaaaggggtttggttgacccaaggtgggctgtaattttaaatagggtggttagggtaggcctcatgaaagaggtttttaatcaagaacttgaaggaggtaaggggagagaaccatgtggagggatctgggagaagagcattccaggcagcggaaacagccggtgcaaaggccctgaggcaggagtgcctgttgttccagggacagtcaggaggccagtgtgtctagagcagaatgagggtgtaggtattaagagacgaggtcagagacatgacagaggcctgaccgtgtagggcctagtagaccattgaaaggacttggcttttactcattgcaaagtacggaggggacaaatgacatgaccttctgcatctcctcccacgccttgggcccgcaggctgcctctgcactgttagtcctccctgacttcctgccccaggctcactgcccccatccatgttgcacacccctctctacctgcagccgccatcccctaacaggtagaggtgtgccctgggtccactccctcaagtcccagctgcattaccagccaaggatgtgatgcatagtattctggagctcctttttaaaaaggagttacattgctttgggagttcaggacacaggcagcctgggggtgcttgcttcatttctgaaaaagcaggttgtggccaccctttcatgagccttgactctactgggctctccctgctccccatggagcctcatgctgtcctcaggccaccctagccccctgttctcctggctggctttatcccgctgagcagtgggacagaggacaggaagatgagaggaagatattccagagctgggtggagagtcagggtggagtagagctgtgtgagggtgtgcatgagggagccaacaggaaggagggctgggttcttgttctctgaccaattcccagtcatggctctcccatggggtttcacagctcagtccgaagacacattgttcctgtgcatggtgtagccaagcccaaatatttagctacggccacaccagcccttgttctgcttataactgtggtgtagacctcagtccagacaccctccaagagatacccaccctgccccttggcactggcttgggcggccttgtctggtgctggaaggctctcttgggttctttgccaaagttcagatgtccccctttcccactctgtgggtgggccctagtgggggatggatgagggctaaggcatgctttacccctggctcccaggcacagagatgagggtggcctctgggtcagagggcttcctgttgagtcagagcctccagccgatatgcctactgtcccacccctactccacatagatgcagggcaccctgcagctttgtttcaggaggaactctgccagtggaaaccccatgtccttagcgcagccctgggggttatcagggtggctcagatgcaggaagtcctcgcctctgctgtcctgctctgccccaccctgtcctgcagaggggaggccctgcccatgggagagtctgcctccactgggcagtgctggcctggaggaaacttccatgccacccctcctgcccctgggctccagggctctcgatttttggggtaaacagaggtgctgggctctgctgaggataagctttgtgatctgggaaggatccctttctcctcattttttccccacctccttttcatcatgtctgtgtgaaaacgaaagctattgtttatgtaaaaggaccatttgcctaatgtccctggaatttatttgctggagcattttccattttcatattcagtttagaccttggctgaagtagggaggttatgtaactgggatggaacaaatctcattggcatctggggaccctagtgtaccccacccttagccattcctgcagtggactgagtgcccccctggctgtatattcaagtcgcctctgtggctgccagagttggggagctggggagctggagtgatagagaaggagttggcagcatttagaatggagtcaggaggaagatttctctggggggttggattcatagatctgctttggggctgtctcctcctcctcagctgtagacctcgggggtccagactttccttgcacacaaagcctaggcctttcctatcagcctgtctgtggaccttagccaacagcctgagcctcactgcttgagccttggctggattagggaaatgtctctggcactttccttcttggctgtctgtggaacctgtctctacattctaacccatccccagcagcactggccttgagggccatgtttctacccctgattcccagcctgagcgccttgggtttctcctcagaagccttgtctgggtctgcatggaattactttgacaaaggatgggatgtttttctaggttatgagggcctggacatttgcctgcctggggttttaaaagaaggcaaatatatagagtgggttttggagccctgaacttagtcatgggtggataggggtgggctgaggagggggtgcaacctctgccttccctccccacgcccccatattctgagatggtagagaaccctttcattcctccagcctgtctctttcatccctctatggactgagacatctccctttacaccagttttttacttaaacatgcttattagcctccattaagaaaaaggtaaccctgtgtatacctgtattaacacaatgctaactgctgcaacaaaccctcagttttcaattacttgacctactagatgtttgttcattgctcatgtgtcagtcaaataaggctattcctcgttgaaggtagcttcctccacgtggtgattctgggactgcagttgctttccattgctgctgctgcaattccttaggacctccaggatttctgcctcctgggggcaggaggagaaagaagcagtggagaaggcacacccaccccttaaacactccagcctagaaatgacccacatcccttctaccgactttccattggtgggaactagtcacatggccacagccggcctcagaggaggctgggaaatgtgggtccaggctgggcaccaccttgggaatgactccacatatcagtggtaggagatggagaggagggggtgtacttgggaaacggcgaggtcaagtcagcagggtggattgagaatatgtagggggacgaagccaggagtccaaggaccccttgggtttctggtttggagaacagggtggatggtgcctctgaaggcaatggagttaacaggaagatggacgatgctgagagggaaggctcatctgtcaagtgcccagcaggggtgggtgctgtaagaatgttttgtgaatgcaggaatgaggagaaacagtagtgaatgaacttgagtcccttctgccaaccccttgcagctatagtggagaaaaactgtttggtagctgtactccatagcctgaaaccatagcacctgatgaaattggaccaatctgttttcaaatacaaagctagtagttagaataaccagggggaaaaaagcataatcagtagccccatgtctttgcacaggctgccataaaaaaaggtacagttgtttctcagtatgcatgggagattggttccaggattcccaatggataccaaaattcatagatgctcaagtccctgatataaggtggcatcgtatttgtatataacctacatatatcctcctgtatactttaaattatctctagattacttataatacctacaacaatgtcaatgctatgtaaatagttgttatactgtattttgggttttttgttgtattgttatttttattgtttttttcctgaatatttttgatctgtggttggttgaatccatggatgtggaacccatagatacagagggctgactatcccataaattgggtgggttacacaacagaaattaatttgctcacagttttggaggctgaaagcccacaatcaaggtgccagcatagttggtgtgtggtgtgggctctcttcctggcttagagacggccaccttcgtgctatgtcctcacatggcagggagagagagggagaaagctctctagtgtctcttcttatataccatcatgaaggctatgacctcctctaaaccgaattatatcctgaaaggcccatcacagtgggagttagggcttaaaaatgtgaatgtggtgttggaggacacaattcagtccacggcatccagtggcgatgtctccccaggcatagagtcctcttctgtgttgggtattgtctctctaagctgcggggaaagggaaggcagcagattggtgtcctggcccatccacttcaggtgagaaggatgcctgctgtcctcgtgtggacacaacttcctctgctctccttggccttgccttggcctctttgctttaggatatgatgcccagaagggctcgaaactggagtctgaccaggggcaagcaggctgcctcttgctcctccccagaaagggagagccagctgagggtgacaccttgggctgcagccacaggccactttgccactgggctcacccacgctgctgctgccacacgtggggccaagggtgacaaggttgccagggagcctgggatcggagttccagggccatctgagctctgggtcagcagcagtcattggagcagggatctggggaggcttttcacgtgggggttgttgagataggggtctggccccattcctgcctgactggcagtcttcattaatgtacgtttataccaggagcaagtggagctggggaggggactcacatctctgtctgtgggaagcagggcagagtgagggagagtatggcctgctttctagctgatatctccccttgctctcagcaagctcctctgcctcttcctttccttctggtaaagcataaggagaggactcaacagtaaggactaatatttgacagtgaggagcagatagagttttttaggcaggggtcactgttaaggaagtttgtattttttttttaacttccaaataaagcttgaagtgtctgagaggctgcataacagaggtgaagggcacagacttgggagccccatggccaggatttgaatctgaactcttaggcaggtccctgaactgctcagccctcagtttcccatctgtaaatggtgataacagtaccttcctaaggtcattatgaggactaaatgagtaaacattgatacagtgctaacaacgcttaatagagtacttacaacacttcacttaataagtgccatatggtgggtgttaaatatatattttggggaacggggtctcgctatgttgcccaggctagagcgcagtaactattcacaggcacagtcagagcccactacagcctccaactcctgggctcaagcagtcctccttcctcagcttcccaagtagctgggactacaggcatgtaccattgcacccagctaaatttttaaaaattaagtcttgttgaagagtgagtagaaaccagagtggtgataatttctggttctccctagtcatctccctcaagaatttcccagttacttctcctggaagatccgcttccttgttttgttgtttttgtttttgtttttgtttttttttgactttgagacaggatctcactctgacacccaggcgggagtgcagtggtacagtctccgctcactgcagcctcaacagcccaggcccaagtgatcctcccacctcagctttccaggtagctgggcagtgtcagcagctctcctatggccagctccaccaccaggtcagacagtacccttggcaacctgtggaccaggctggggaagaagaaaatctaggaagaaaaggccacacaaggaagaagtgcagatggcaggggattccggtggccagggaccagatgggagtccgaaagctacacagagcaaacaaccaaaattgaaagcaaacagactctgagttgagaaacctgttctccctatccagagcatacaattcagaaaatgccggaacagcataaacactgcaaaacaaatccagctatgtaatccctttattttagtaattagaggtggcactgggaatgctggtaacagtggagtttgactcagatccccttgacctcacttggcttttcctccatgttccaacaacttgttaagtctgcttctccattccattcctttcccggcgtggtgtttgggtttgtaggcaggatggccatgtatgcacaaagaaagctttggggcagtttcctgccacccagtttttatgaacattctctttgccccatgtgtggcagcagaaggcaatccagccctcagcctggaccgccgaccttgtgtgtttgtctccctctgtgcctaggcccgagaggccattagaagccccatttgtgtgtctcagcatggcaggaaggtcaaaccgctgcttcctggttggaaatggtttcttcattgattcatcaggtcagtcaagcatttactgagcacccactggagccagcattgtgcaaggtgctaggaatacagtgatgaggaaaagcagacatagaccttacccttctgaaagttccactaaaaatcaaataactgtgaacaaatgtccccttcctgctgtgatacctgccataaagaaacatgttactattaaagtataaccagatactcacatgtgacattctcttgttggttttccctgagtgcaaaagaggtggtgagtctttctaaatcctgagtcaagatgcttgaccacttattaggacttggacccttagttttggacccttagttttggacccttagtcccttatcaacatcgaaggtacagaaggattgacatcagagaggcccaggaagtttgacattggagagaggcgtttttggagaaggctgatgggctggggggtgttttccgacctgagccccttggaggagagaaaagggtgttcttcctccagcccagagaaaggaggagaccagacaggtctagctcctgagagctagcctgactttcttccagagtcttggagagcacaaagatgtgtgttgatgtacagcttaaaggggagttaatggagccctgagaatgtcctgctcccccggaggaggacatatgagtgcatctcagggtgaaagctggctaggagctatttaaaaggggttgtaccttaggtgaccctagggagaggtgatgggaccatacccaaaacacaaggggtctggggccagcggaggagaccttgttccctcttgggagttgcaggggagtgtcccaatgctcaggaagctccagggaaccttcagtgtgcctgaaaaaaagtcaacctggaatacccaccaagctaagggaggtcagcgtgcaatgccacaaagccacagaagtctctagagcgactcagctttaaacagctgccatggccagagaaaagccaacacccaaagacaccagttccaactaggtgtggcttctcctcccctcctctcctcccctcaaaaggtgttctaagcagctgctgggaaagggggtgagaggaagtgactgcagcttttttatctcccacttcccaccctctagcaaccttcaaagcctgaagtagggccaagttggaagaggcgaggaagtttaactttaaatgaaatttggagtttttcactaatacgcaggactggtcattttgatactgaatgggattattctggagattaaagcaatggaaagacttttcatgatctaagagtgatccaagagatagtgggacctgctcaaggtttcatccaggaggccagggagaaagggccaacctcagtatctaagggttaagggtgtgcaagagagtgcaatcagtattgcatttcagcagatcagccaagctgcaggataggtgacagatatgaaacgataaatgtggaggcagggagaccaggtaagaagtctgcggtggtctaatggtggaggtgaagagaagagggcaggctgcagaaaaggcaggatacgaggtagaactcccacagtttcctcatctctattgtacatagtaatcagggtctaacatagcttccctttcccacctacgacctatgaggtgcacctgtccgtagtaagtactcagtaaatgactggtgaatgaatgtgttttaaataaggtatatagtgagaaaagtgagcattggagtctatttcagttatgtgttacaataataatgctgcagaacaaactcaaaacctcagtggcatataatacaaagcatatagtttgtgcagctgggattagcagtggcttggctagctggctctgctgatttgggcagggcttgttcatatagctaggggtcagctagctgttggttatctagactggcattggctggggtgactggggcaactcagcaccgctccatgcatatctcactgtccaacaggccagcctgggcatattcacgtggagactgagaagcacgagaaggcagaattgggcccttgataagatcatcctaacacagaggcagatgtagatttgaaccctatttgcaacagtcactaatcatgtgatcttcggtgatttattttacactttgtggcttaatgtctttatctgtaaaatggggctaggaaaatttatctcactgggtagtcaggattacataagagtaataacatctcattcccactataccatcctgagagggtaaataattctgcctatgacgcaggtatagaaataaaaaagactatgaaaagattaaaaagagctcaaatgaagggaagataattctaggcagaagaaagagcatgttcaaaggctgtgtgagtgaagaggtgggagagtgtgctgaaaggtgggcagaagcctctctgccctgggggaggggatggtgccagggagctctaattgtattttgctggcactggggagccatggaaatttctgtaggaagggagagatttattttattccacaaacatttatttggcacctatgatgtgcaaggtattctttaagatgcttgggagacagtagtgattaatcaatgtccagtgggagagtcaggggggtcaggaagatcttggcacagaatgaggtcagagtgagagaggtcaagattggctggccaggggtattagccctgagatacactgctgctctatgggattttgcccctcattcacaagcagagggcctacccttaggccccaagtgtgtcaagccccctctgcttacaaaactttatttttcacaaccaaaggtggttcataatggtgggctgaggaggaagcaactgaagtaggggaagctcagaagtctctgagggtccttcccaccaggaatctccccacttgaacctaaggctgggacactttggcatgtgtgttttaaaggatccgtgggtttgtggggagggctgcaccagtgaccagttaagcccagtgggtgatgcctttcctttgttacttttcatgcagacatctggaaagaatttgtcaagaattataataaagaataccacggaatgaaagcaaatgtggtgagaagcagagttgccttaagactgagaagccagcaggaatggctgctgctaagaacctcattcttataggaaggattcagttctttccctgagcaacagaagtgcataggtgcacggcatagtgtgtcagttagcatttgctgagtaacaaaccttcctcaaatttaatggcttaacacaacagccatttattattgtgtataagtctctgggttagctggatagttctgctgatctgggtggggcgtggctgattttggctgggctcactcatgtgttagggttcagcttgcaggctggctggaggctggctcagtcagatgttttagagttggctgaggtgacagtgtggctgggccaatgcctatcatcatccagcaggctggcctgggcttgtttacatggttaggaggttctacaagtgagagtggaagtaggcaaggccttttgaggcatgggcttcagaagtggcatgatgtcatttcttacacattctcttggccaaagtaagttcaagggatgggaaaatagcctcttcctgatgatgggaggagctactgtatcatcttttcatgacacatatgtagggacaggtagaacattgtggtcatatgcagtggactgagcccatgggctttggagtcacatggggctctcaagccatgattctttacttaaccttcatctataaaatgaaaacactgatagaatctatctcacaagatcattttgaggtaaatgcacatgtacctaatgcatagtaaattctcagtagaaaataacattttatgtattttgcatgtttctcataaactgattgtgcattctaattatttagtttggaaaatgtagtctctgtaggtttacccttccctgaggcagtaggggagatcatcacctctgtaatggtataatatgaactcaggagttgagattcgtaaagcagtaaggaatgcatagtcagctatactggaaatttgggaaagggaaatggactatgtgggaaagcgggactcttatccttgcagaagtcactatgaaatgaggctttcagtaaacagaagatgggcatttcatcctttctcattactgagccttcctcaagacctccttaacatcctaacattataaatacaataattttagaaattacttagtcaataaaaaataagcacttattgtatacgagactctgttctaggagccagagatacagaggaataaggaattaaggtatttctcccatattcaaggacttcagtttcattacctgtccagaaaactatgagaaccacccatcacctctggttatagattcttaagtgggatgtcaagccccttccctaatgatctcagtttaacctgctgtcctattcctctgtggcctattcctgtgctacactcgagccaaggtggcctcttccctagccccacacatactctttgtttttccattcttccaagcaggcccggagaaggaatgggctccacgatgcagggcccgcggtagagaacagccaggcagagcagggggcctggctggatgtggccagcatctgcaggggttcagcattgagatatgacactgtcacctccatctcaagaagcccttacggatgcctcccttcccttcatgactcactgtgatctacaactcctcagagccagccttaaagtggtctgtggatcagtctcatctccccactggagctccatgggcagaaagcactctttctcttctgcctacaacatcctcctcccatcggtatgcaccccttcctaggagccccacaggcaatgacaggaacccccaaccccatgtgtgcacatatacacattcccacatgtgtggggaatgagaggctacatagcctgctccatcctcttcttttaacctgcaattactgggtgaaaagagtaggatatagtaaaatgcaaatgctagtttagtaaatggcataaagacattgaagtgtccctggacatcagtcacgtggctgtggaagggagacttagggtgtggctttccccatggaccatggtgggtctttgggatccctctcttccccaccccagtcctttaaagacccaccagcgactttgtgagattctagactcctttccctcgtacctcctagccttattggatggaaaagagggaacagtggttcctttctttctgccacgcctccaccttccattggagactcctatttctccctccgtgacatctttgctgaacagaacagctcttaaaccagaccttatctgttccatgggtgcagaagggtgcaatgtgaacagaaacagcaagtctctggaaaagagctccttcagctgcaaagaacacagaggtcaggaggaataaagctaatgagagagcagagagtcctttgtctccccaggtgttattcccagagggcaactagggaaaatggagatggggtataaacatctgaattcactgttaaacactccatgaactgttgataattccctagaagcagcatattcctgaggtagcttcatatgatctccagaagcaacttacatgtagacatttttctgagaattccagaaagaatattgataattttcagacaccatggcttccacgcctcatcaacataagcagtattaggctttatctctgacatcaatcaaacttgaacaccatcagcatgggctttaatgaaattctcacatatgtatcagaacttgtattttttcctttagtcagtgtcttgatccatttgtgttgctgtaaaggagtacctgaggctgggtaatttataaagaaaagatgtgtattcggctcatggttctgcagggtgtacaagaagcatgatgccaggcatccgctttgggtgagggcgtcaggctgattctactcatggtggaaggagaaggggagccatcgtgtggagatcacatggtgagagaggaagcaagcggggagtggaggtgccaggctctttttaacaaccagctgttgtaggagcacagtgagaactgactcactacctagagaatggcaccaagccattcacaatggatccgtccccatgacccaagcacctcccatcagacccacctccaacactggagatcagatttcagagtgagacttggtggggccaaacaaatcatattcaaaccatagcaattagaatcttaaaatcaaaattgatggctttatttttctaaaaatgggaaaatatctccaaaacattgttcaaaaacaaaacaaaacaaaaaaaaaatgtttgttcttatatcccatcagtttattcaactaacattcactgtggactttttataaggcagtaactgttttatgaataggagatataaaactgggtgaaacagtgaggttcctggccactgtattgtaataatagaggcacatataccaaagagctaaaatacaggcagcaaactctagggactgaagtaaatttccttaatttaatgaaatgtatcaagcagaaacccacaataagcatcatacttaaaggattcatttgaatttttttatttatttttattaaatcagatatacttttctagtttttttaatttttattttttgcatttcttgatcatttcaaagtgaggtcagttacagagtgaatgggttcatcctgtcattgtaaataacagtttttcgtttaataatggcattttgtattaccaagaccttgcttcacattaggtgttttgtatacattatctcatttaatcaaaaccagcactctatatcatgggtgccaccattcctctgatttttgctaaggaggaaactgaggttcaaaaagggtaaataagttgtccaagaccacacagccattgtttggcagagctggggcaaaggtctatactgctgcaaagcttgtgatttttggctactaccctctaatgttctgtgagggtggaacacctaacctagaatttccctgtggatcactcacccccaatgatggcatgtcttgctctggacccatgatataatgatctggatacagccaaagtcactaagcacgctacaccctagcctttcaattcctttattacttcatggagaatcatgtatttcagccactcaagtatctttaaggtctaggccttatcgaatggggtttagtcactcagtacagtctgccctttgtactcatgagttcagcattcatggatttgaagaactgtggggtgaaaatattccaaaaaaatggatggttgcatctgtactgaacatatacagacttttttcaatatttcctaaacaataaagtatagcaatgatttacatattatttacattgtattgggtattataagtaatctagagattaaagtatataggaggatgtgtgtatgttatatgcaaattctacaccattttacatcaaggacttgtgtgttcttggggtttggtgtcagggtggtcctggaaccagttccccatggacattgaggaatgactgtgcttcccctacccaacagaagtggttctcccgtcaggttataatagggaagggatgtgtgatctttcctgagaactgaggcatgctattaagctttaaatggagcatctctaagtttccttaccaaaaagtaatcagacaaagggccatgtggcaagagctcttgcttcaccaaacacgtagtgatggacccccctatacccagtgtgccagacatcatcatgagatgtaactcctttcacatatctcttcccttgccagaggaaggaactgaggctcagaaaggttcaattcctcacccaaaggtttccaacccaaggtttctgacctggagccctgctctttcctccacaccctgctgccattattttgtcttgttgggctggggaagggcaaagagggtgcccactgctggatgaaagaagcagctacattcccattcaaggtgtgctgagcccagtcctaactgctcaagtctttcttaggtcttatgatggaactgaaaagcaggctacctattttatccaggaagcagacagaggatacggatgggcaagcacttctatcagatgctggttctgttgtaagacatcatcaaggttcctccaacccctgctcctcatcacactgcacagccctttggcagagacagggagaagcttgttgtttgagacatctggagttagaaagtatctgagctttaaatggagaaggagtggggagaaactgacagtgaagtgtagacatgaggcttagagagatgctaactaagtagtcatgagtcgaatctcccatttagtcagacacatttttctagtttttctagttttctacccttcaaaatactttgtgttaaactcaattacagagatagatccttccattcatcaagtgaattttagaagccacacctttgggtgggtcttaaaagcagttcatgggaatctataggctattgtgtataactggagggtagcagaaaacaagttccttgtgagatcagacacatgagctaaacatttaggaaaaccttacagaagcaaatctttaacggaagggtttccacactgagggccttgtgttgcttttgggaatggtgtagaaatcacgtgcttagtcttgaattatgattcacctttactgaatgtcccttctcttttctttactcactgtcgaacaggaacccaaaggatgtagtttttggcagatgtcctttgtagggttcagtatttctcactcacccctttaagaccctaaagggagagttattaatagtttcagaaagttgagggaaatcatgcagaggttctcagatgttcagagaggcttcctctccccttccatgaaagttctaaggctcatgggtgaggcctaagaaaggcatgtcagttgtctatcaagttcattagtttattcagcttatttctgaagcttttgatgggccggctattcagaggtcaatgaaatagacatgagtactcttcacagaccttaccgtctaataggaatgatagcaagtgaatgtataataaataaataattaggggttgattgttacgagtgctatgaggggaatagccagggtgacatgtttgagaaggggtcagtactgctaagtgttggtcagggaagcattgcaggcagagggaacagcaaatgcccatggtttggaggcaggaatggtgttccaagagtagtagggagcctcgggactagagtttggaggatgagcggggagagtgggaggagatagtgggaaagtctgtggagccagttccctgaggggcctggtgggccatgctcagtgggggtttcatttgacgagccatgggaaggcttccagcaatgggggatgtggttttacttgtaccttaagaagatcacactgggtcttgtttggagaatggacaggaaaggagcaggagagcaagcagagagtctgaggtgcaagaaatgccctgtcctcccagcagactggagcgaattctaattctgcctctgctacttcattcctatgcaactttgggcaggtttcctaatctctctgcctctcaactgttcacccctcataaaatgaggacaagtattttctcatgtggtttctaggacaaataagtattcgtaaagtcctctataaacttgggccatatgcttatctgagctataatatgattcatattgaaaggagggggactcctgcaatgttgggaaaacgactcagctgcccctatataaggaatatgttattacagtccgagactaaaaagatgcttttgtttctttactgccatcagtgtctctctaagggagggcggctggttaaaaatcacatggtgtgggcatttataggggtaataacttgaaatgattaaaccctttttttttaaagcttcatgtctctgttctccatctgtaggtggtgcatgagtatgatatagtgtgcatgtgtgacatgctgcgagtgtgaggaatgccagagggagacccacgaaactgccctgcaggcagaaggccacatgctctcagcaccagtcagtggtgctcgctagtccggcagattgctgtattcttgcaccctgtaccacaacattgttaggataaagtttcataagtcttatatggctttgaacaaagcaagtctatttttcatcatagtatgggttatttagaattcatatgttatgaggaaatacactgtttcaaatgcagttttctttgtggtgtctcagcagatactgagttttgctgccctgtcatccaagagggcctcaaggtgcccagagagaccaactgaaaaatgttcactggaacggagctgcaatggtggaaacgttctgtgtgtgccctgttcagtacagcagccactgcgcggctgctgagcccttgaattgtggctatcagggtagaagaactgatttttaatatattgaattatgagtcatttaaatttaaagagcacagctgtattggacagcacagctgtagaaggatgttttctctcatggaaaaccccaactctgagccccaggggtcctatggatccatgagctcacagactcccctaacgtccatgaagatcatcaccaggatttgagggaatgctgtggtgcatactttgtgttggacagttatgggggattgcttttgccgtctcagcatttcaccgctgtcctcggtatgagattatggtgatgttgaatgggggtcattagaaggctgtccacagaggggatcagcccccctcaatgaccactactccgagcatgggctttcttctgtttgatctcgttgggccctcagctgtgactgtggagaacagcaagtcctcagtgagagtatttgtcacttcctactcttggtgtttaatatcatccctctggcacagatgcttgaaaatcaatggtttcttgacacatcttggcttgtgtgaggggccataacaatagcagggctcatggctcctttttttttttttttttttttttaaagagatagggttttactctgtcacccaggcaggcaggggtgcaatagagtgatcatagttcactgtaacctcgaactccaggtctcaagggatcctcctgcctcagtctcctgagtaactggatctatacacatgtgcccccgtacctggctaatgtggcttcctttatgttcagcaaggaactctcagtgtttgtccatttccttaggaacatgagtgtttttggaaggcctttgatgagtggcagttgggtggatggatgagctaatacatccatcatcctatctcaggaggatgcttggatttgtgtttagaaattgggtaactcagttgttcatggaggaaaaagttgaacattactcaagtgcagatagggaaacagtgtaagaacaaaaaactttttttctatctacaagtgaggaaaaaaatattgacagtgtgcccaagcttcatggtaggatgggtgttaattgggaatggcatgtaattctcttctggaatccagtgtctgggcaagtcctgcctctcagattaaggcaccagcattcagcataagagggtcctgcctctcagattaaggcaccagcattcagcataagagggagtaattgacattctacatggcaaaagacccttgaaagataacagatgaatgtctcatggccagtagcttggtttttttgcatggtgtagatttagaatataacttttacagggaagaaaggggttaaaatgtctggtgccatctgtcacagtaatgagttgtgcaaagcccaatgaaccttgtagaaacaacatcgtgcccagaaatagcctagacctcagagtgacatcagggggcagggacctgatagatgtggtcctgcaaaaggaccgaaggttcttctttaacaattcaaattgaataggaaccatttttaatttgggggtaactccgtcttcaccattaatggccattcttcaaagctactttcattcctgtgagggatggccagacacgagaaagccaagcagggattttcagttacaggtgagcatccgatctgcagccagggctttttctaccgggcacatctttgtgcgcagcctggtttgagctgatctgcacataaacaggcactctgggtgtggatgggggcatctgtgtactctttatggctatatttccagaatatgcttttaaagactgtggtcacatttaccttggttagggaagatagtgacttataaaaacctcaaacatttatgtttccctttccaatataaaaagtgttaataatttacccacttaaaaggttaagatcaaagagatcataaacacacatgaatactatttcaggaacataaaattcagctatttctactaacagaaagtgagtttatgggataccaatgcaaacaaacatagatttagtggaaaatgactcaaccaagtaagatttacaaaacaaacaaaactgttttcatcatctttggttgtagttttataaagaatgctggttcatggactccagacacttcattgaaactgtgtgaatcattttaaacaggtttgtccttgggccccagatagtacattggcatttgtgaatcattttagatgagtttgtcctcagtacaaatcgtgctgtgtttaaagttcttggagacacttctctcttccaataaaaggcttttactagatgtttcagtgacataaagttgaagacataaatactgttttatattgtaagcaggaccaactcttttatggtgtgttttatacgtctagaggatttttgttgttgttgtttctttgaggttttctctgaaacttcagattaaggtagtccttgaagtggaggctattaagacctagtgttatctgtttcagggaggtgggggactaggtggactgatggaccccagaactccagattccttgcactggaagctggtgttttgtgtttggaagagcctctgccctctgtgtcatgctgcagtaaagtatgggtcaacatccccaaaatgtgtgactcgcccaaattaagtggtgtcatactctgatccttcttccactgaacatcacattcttcatgagaatcacaccattgtcctctgtctgccctgcctgtgagacgggccatgctctatgcttgcccgcctcttccatcaggaacactcacacagtcattctcctcacataccccactctcatctgctgcccctcacacctgcccttctatagaatgttctaccctttaatagggaagggtttcttcttcctatgaatttttacctcactttgtgtctttttaggtttgtattggaactatttgcaaacaggtcttggcttatctaaagaaaaattgtaagctccccatgacgcaagacagtatcttatttacctttgaaaacctcatcacactctgccctgctcagagtacaatctaaataaaagtctattgaatgactgaagtagagtttcttttttaacacttatatgcacattcttgtgacaggcacagtgaaagatttatcaaggaatgacatggtccccacccatgacactgttaaatccataatttgtgatgcattgtttttagttatctagtgctgctgaacaaaccactccaaacttaatgatgtaaaacaacagcaattttatcatgctcacagacattgtgggcaaggaattcgggacagggcacattggggatggctggtctctgctccatgatgcctaggacctcagctgggagagacttgaacagttgggggctggtgaatccatgtctaagcttcttcattcacatgcctgtcaccttggcagcatggcctagaagcctgggcttagctgggcctgagacccccagcattctcttcaaggttggggaattggaccctacatttgatgggagaattagccagttcatgttgcagaagagcatgtggagtcggagatactttacaagcatctatggaaaatacagtctgaagtgaatgcccaaatgagtggcaccaacactgattattactgggtgacagaggcacatggagaaaatgtcatgagggaggaaatgctgggatttgccttgacctctggctgggggacggggagggatgagaggtccaaggcaagatggataagtgggaataagcagccttgttttggggaaaaagagggacagacctagaatggctggctgggtgaaatggcttgttgtgtctcctaaattagattttacatttttgagggcagagctacttaatattgtatttaccccagaggaagattatttttttcattctctaaattgtttaattaaaactcatagttcatgttaaatttgttcaaactttccatctaatggtgaggtggtaaaggaaataaaacttaccaaaatagaagagggagaaatgaaaaggaaatatgatcaatgatttctgttctttttacttcctacttgcaaagactctggaaatgtaatgatggttcagagtgttctgctataaatcctaacagcttaaacaatctcctgggatcatattggcaaactctaagatgatacaagtatagacttagtttgtctgagcccgaggttcagtgtttggagaaaaataatacctatgtcgagataatatcagataacctataaaagcaggtagcccagtcatgcacattggtgatcaatcaatgttagctgaatccaaatattacgagtgcagatgctgaaaggaacaaaaggaaatctcactcagtcatccatctgccagtatttccaccctttcccgcaaagaggagctcagtgtctgtctctgttattgcatcaggatctcacattatccagtaaacccaaatgctgtaggtaagagatgtaataggtggtatttattaagtggttttaataaagttttgtggataggtatgacaccatttcttttgagcttaaagatgcttaaaatagctaaggttaaaaatgagggaagatctgaaaagaaaaacagtaaagagatgtgagatgtaaacactgaaaggaagtaagggtagagcaaaaaaaaagtaaagcatcaggtaaatatttaataaaatgtttatacatgtatattgactgtaggtgtagggttagtctattgaataaagctgcctttcttaggaatggtggtctcaaaatgcaccagtgccttcctattggctgaatgtccacttctgttctatgcactgtgctaaagggtggacatgctgagatgagtgtgagtggcctctgcaccaaagagttcagtctaattctgggggttggggataaatatgttagccagtaaatgccatttattgctttagatgtcatctcagaaggataaggagcagtggggacaggaggagcaagccatctcctgggggagtcaagaaagatgaggacagagagagaatgtcccttggatccaatatggtggccattagtgaccttgttaaaaccagtaggaatggggtggcaagaaggagagtagaacagactataagaaagaatgagttttgatgaaagtattggaattttgatgaccttttttattacaggtttgggagcaactactttcttcactctctaaactgcaaatcattcagggtaattgtgctggttcagttagcccccaagctgagaagacaggcccactgtggtttgagtaacttggaaatcttgtggggtcagtgttttgactctcttcattttggtcatggttcaggattttcacacaccactaaggtctaggggaagcttctcagctttctggataccctctcagggctcatgaagtggcaggcctgccctgggaaggtcaggattcttctgtaaaagcagagaacactgcatggagcccagagagcccactctctgcgctcttcccttcctatgggctcacacggggaaacagatgctttcctataactctgagcactgaagcagctttgctctgccttggccgaaacatctatccaggaccaaattcttaaaaccccaggggccctggggtgattttcagcccaggccctgaacctgtcataaaatgtaatggatgatatatttttaactgctgagaccagagagttcacataacctatgaagactgaaacaacataatgtttctgcagttttgaagcatttcaaaaaccagaggatggtctctctcattaggcattactagtaagacaaaagttcttaaccatttctgtgcgtggacgcctttggccgttgggaagcgcacgtggatcctttctcagaatatgcttttacatacatagaataaaatacatagaattacaaagaaattcagttatactgaaatggagttatcaaaatttttaaagaccactttatgatataataatataccagctttttcttgatgcatgaaataagaagatctacagacattttgagtactgttaagcataaacaatatttcaaggtgtctacaactataatatagtgtgtaatatctcagatttctatcgacggtagagtcacaggtctttctaatacttttgtggtttgatgcctacattttataatggaaggaaatgctaaatttcagttagaggttaataaaaataaagaaggaaaattcttttcctctatctaaatccacagatgccctgaattctcttcgaggttaagaacttctggtttaagatatgcttttggttgacagtagtaaaacaagccaaaagaagttgaccatttatgtgatgtgcagtaataaattagcaattcagagttgaggagctcattactaatctgtggatagtcctaatcccagcccttttctttctgagctttgccttttgtaaatctcagtgcttcacacacatcagacaaagatattttgtgagtggctctaaaaatgggggcaaaacatgaccctgaggaggcctggggctgatctgagccttaagacttatttgtggagaccttgtgctgttctttttttttttttttaattatactttaagttttagggtacatgtgcacaacgtgcaggtttgttacatatgtattcatgtgccatgttggtgtgctgcacccattaactcgtcatttatcattaagtatatctcctaatgctatccctcccccagccccccaccccacaacagtccccagtatgtgatgttccccttcctgtgtccatgtgttctcattgttcaattcccacatatgagtgagaacatgcggtgtttggttttttgtccttgcgatagtttgctgagaatgatggttttcagcttcatccatgtccctacaaaggacatgaagtcatcattttttatggctgcatagtattccatggtgtatatgtgtcacattttcttaatccagtctatcattgttggacatttgggttggttccaagtctttgctattgtgaatagtgccacaataaacatacgtgtgcatgtgtctttatagcaacatgatttataatcctttgggtatatacccagtaatgggatggctgggtcaaatggtatttctagttctagatctgtgaggaatcaccacactgacttccacaatggttgaactagtttacaatcccaccaacagtgtaaaagtgttcttatctctccacatcctctccagcacctgttgtttcctgactttttaatgatcaccattctaactggtgtgagatggtatctcattgtggttttgatttgcatttctctgatggccactgatgatgagcattgtttcatgtgtcttttggctgcataaatgtcttcttttgagaagtgtctgttgatatcctttgcccacttgttgatggggttgtttgttttcttcttgtaaatttgtttgagttcattgtagattctggatattagccctttgtcagatgagtagattgcaaaaattttctcccattctgtaggttgcctgttcactctgatggtagtttcttttgctgtgcagaagctctttagttcaattagatcccatttgtcaattttggctgttgttgccattgcttttggtgttttagacatgaagtccttgcccatgcctatgtcctgaatggtgttgcctaggttttcttctagggtttttatggttttaggtctaacatttaagtctttaatccatcttgaattaatttttgtataaggtgtaaggaagggatccagtttcagctttctacatatggctagccagttttcccagcaccatttattaaatagggaatcctttccccattgcttgttttcgtcaggtttgtcaaagatcagatagttgtagatatgcggcattatttctgagggctctgttctgttccattgatctatatctctgttttggtaccagtaccatgctgttttggttactgtagccttgtagtatagtttgaagtcaggtagcgtgatgcctccggttttgttcttttggcttaggattgacttggcgatgcgggctcttttttggttccatatgaacttgaaagtagttttttccaattctgtgaagaaagtcattggtagcttgatggggatggcattgaatctataaattaccttgggcagtatggccattttcacgatattgattcttcctacccatgagcatggaatgttcttccatttgtttgtatcctcttttatttcattgagcagtggtttgtagttctccttgaggaggtccttcacatcccttgtaagttggattcctaggtattttattctctttgaagcaattgtgaatgggagttcactcatgatttggctctctgtttgtctgttattggtgtataagaatgcttgtgatttttgcacattgattttgcatcctgagactttgctgaagttgcttatcagcttaaggagattttgggctgagatgatggagttttctagatatacaatcatgtcatctgcaaacagggacaatttgacttcctcttttcctaattgaataccctttatttccttctcctgcctgattgccctggccagaacttccaacactatgttgaataggagtggtgggagagggcatccctgtgttgtgccagttttcaaagggaatgcttccagtttttgcccattcagtatgatattggctgtgcgtttgtcatagatagctcttgttattttgagataggtcccatcaatacctaatccattgagagtttttagcatgaagcattgttgaattttgtcaaaggccttttctgcatctattgagataatcatgtggtttttgtcgctggttctgtttatatgctggattatgtttattgatttgcgtatgttgaaccagccttgcatcccagggatgaagcccacttgatcatggtggataaggcttttgatgtgctgctggattcggtttgccagtattttattgaggatttttacatcgatgttcatcagggatactggtctaaaattctcttttttggttgtgtctctgccaggctttggtatcaggatgatgctggcctcataaaatgaattggggaggattccctctttttctgttgattggaatagtttcagaaggaatggtcccagctcctccttgtacctctggtagaattcggctgtgaatccatctggtcctggatgttgtttggttggtaagctattaattgttgcctcaatttcagagcctgttattggtctattcagagattcaacttcttcctggtttagtcttgggagggtgtatgtgtcgaggaatgtatccatttcttctagattttctagtttatttgcgtagaggtgtttatagtattctctgatggtagtttgtatttctgtgggatcggtggtgatatcccctttatcattttttattgtgtctatttgattcttctctcttttcttcattagtcttgctagcggtctatcaattttgttgatcttttcaaaaaaacagctcctggattcattgatttttttgaagggttttttgtgtctctgtttccttcagttctgctctgatcttggttatttcttgccttctgctagcttttgaatgtgtttgctcttgcttctctagttcttttaattgtgatgttaggttgtcaattttagatctttcctgctttctcttgtgggcatttagtgctgtaaatttccctctacacactgctttgaatgtgtcccagagattctggtatgttgtgtctttgttctcattggtttcaaagaacatctttatttctgccttcattttgttatgtacccagtagtcattcaggagcaggttgttcagtttccatgtagttgagcggttttgagtgaatttcttaatcctgagttctagtttgattgcactgtggtctgagagacagcttgttataatttctgttcttttacatttgctgaggagagctttacttccaactatgtggtcagttttggaacaggtgtggtgtggtgctgaaaagaatgtatattctgttgatttggggtggagagttctgtagatgtctattaggtccacttggtgcagagctgagttcaattcctggatatctttgttaactttctgtctcgttgatctgtctaatgttgacagtggggtgttaaagtctcccattatattgtgtgggagtctgagtctctttgtaggtcactaagggcttgctttatgaatctgggtgctcctgtattgggtgcatatatatttaggatagttagctcttcttgttgaattgatccctttaccattatgtaatggccttctttgtctcttctgatctttgttggtttaaagtctgttttatcagagactaggattgcaacccctgccattttttgttttccgtttgcttggtagatcttcctccatccctttattttgagcctatgtgtgtctctgcacgtgagatgggtctgctgaatacagcacactgatgggtcttgactctttatccaatttgccagtctgtcttttaattggagcatttagcccatttacatttaaggttaatattgttatgtgtgaatttgatcctgtcattatgatgttagctggttattttgctcattagttgatgcagtttcttcctagccttgatggtctttacaatttggcatgtttttgcagtggctggtaatggttgttcctttccatgtttagtgcttccttcaggagctcttttagggcaggcctggtggtgacaaaatctctcagcatttgcttgtctgtaaaggattttatttctccttcacttatgaagcttagtttggctggatatgaaattctgggttgcaaattcttttctttaagaatgttgaatattggcccccactcccatctggcttgtagggtttctgctgagagatccactgttagtctgatgggcttccctttgtgggtaacccgacctttctctctggctgcccttaacattttttccttcatttcagctttggtgaatctgacaattatgtgtcttagagttgctcttctcgaggagtatctttgtggcattctctgtatttcctgaatttgaatgttggcctgccttgctagactggggaagttctcctggataatatcctgcagagtgttttccaacttggttccattttccccgtcactttcaggtacaccaatcagacgtagatttggtcttttcacatagtcccatatttcttggaggctttgttcgtttctttttattcttttttctctaaacttctcttcttgcttcatttcattcatttgatcttccttcactgatatcctttcttctagttgatcgaattggctactgaggcttgggcattcgtcacgtagttctcgtgccatggttttcagctccatcaggtcttttaaggacttctctgcattggttattctagttagccattcatctaatttttttcaaggtttttaacttctttgccatgggttcaaacttcctcctttagctcagagtagtttgatcgtctgaagccttcttctctgaactcatcaaagtcattctccatccagctttgttccgttgctggtgaggagctgcgttcctttggaggaggagaggcactctcatttttagagtttccagtttttctgctctgttttttccccatctttgtggttttatgtacctttggtctttgatgatggtgatgtacagatggggttttggtgtggatgtgctttctgtttgttaggtttccttctaacagtcaggaccctcagctgcaggtctgttggagtttgccagaggtccactccagaccctgtttgcctgggtatcagcagcggaggctgcagaacagtggatattggtgaacagcaaatgtagctgcctgatcattcctctggaagttttgtctcagaggagtacctggccgtgtgaggtgtcagtctgcccctactcggggatgcctcccagttaggctactcgggggccagggacccacttgaggaggcagtctgtccattctcagatctcaagctgcctgctgggagaaccactactctcttcaaagctgtcagacagggacatttaagtctgcagaggtttctgctgccttttgtttggctatcccctacccccagaggtggagtctacagaggcaggcagacctccttgagctccggtaggctccactcagttcgagcttctcagccactttgttaacctactcaagccttggcgatggtgggcgcccctcccccagccttgctgctgccttgcagtttgatctcagactgctgtgctagcaatgagcaaggctccgtgggcgtaggactctccgagctaggcacgggatataatctcctcgtgtgctgtttgctaagactgttggaaaagcgcagtattagggtaggagtgacccgattttccaggtgccatctgtcacccctttctttgactaggaaagggaatgccctgaccccttgtgcttcccaggtgaggtgatgcctcgccctgcttcggctcacgcttggtgtgctgcacccactgtcctgcacccactgtctgacactccccagtgaggtgaacccagtacctcagttggaaatgcagaaatcgcccgtcttctgtgtcactcatgctgggagcagtagactggagctgttcctatttggccgtcttcgctgttatttttaagaataaattttaaaaggacaaagtaaaactccaagttgaacttaatggcaaggaagtgtcaaaatgagactctgcatgtaactccccatgcctctccactactgatatggatctgcctggtccacatcatcctggagtgctagggtgaccctagcactgtatccagctcttctcacctctttaggaattttaagcccacaaattaagtatggaatttattacatggtatcttgcatttcagaagcagaatctgagatggggatttttgccagagatttattgggggagtgctctcagaagtgaggaaaacagaaagggacagagaaaaaaatgttgagtaaggatgtggtctcaggaaaagtctagcctcagcctgatcccgtgcagaagctctggagcagagcttatcccacccagcagcaagggggatggggtgttatcctgctgcatctgccagctagggaatggggcaggtattagttttctaggccacttcaaaaattacaaatttagcagcttaaaacagcataaagttactatctcacagtttttgtcagttaggagtctgagcatggcctgcttagcgtttcacaaggccgtactcaaggtgccagccagatcttttatgcggcttggggtcttgctccaggctctcatggccgttgctggaattcactcctgcagctgtggagcccagggtgacttgcttcttcaagactagcagaagactctttttgctgcttctagtctcttagctcagccttccagtctcttagctcagccttccagtctcttagctcactgctctccaaggattcttgacacttgcactccaacccactctgggtcagaagctattcctccctgtgaaaggggtcacttgagtaggccaattcacgccatcctttctgattcactcaattgagctgattcagaactttaattacatctgcaaactcccctcacctttgccatttaatgtaacatcacaggagtgagaaccatcatatgtccagtccttcctaccctcaaagggagaagattatacaggggcatgggtcactggcatcattttaggattctgcctgtcacagggcgtcacttgcaggcttcgctggaggagatggctcctgtcacccaagggcagttctcctgagaaagttgtgggcataagcaatgcatgtagcggctagggcactgaggtcccgtgacctggttccagcctgctctccttccctgtccatagtccctccctgcccctcccccgtgatcttgccccacagacctttctcaggtggcggtggtgatggtgttgtaggggcaactggcttttttagagtgtcaggagctctccaaggtgcttgacatccatttctctaatcttcacaacaagcatgcaaggttgattctgtcatcccattttacatctgagaaaacaagctcagagagagtaagtaaagtggccaaggttgcagtttgcaagaaatggagcttggaccccctctgaccttgaactggctgacatcaaagttgtcgctttgcctggtcctgtcacctctcttcctcagatgtctagtgtttattagacctccatagtatcttcaccaactgagaaggtgccccatcagcctgaggaactcccagggtcacccctctacaaggattcttgacacttgcacttctacccactctgggtcagaagctattcttccctcattggattgccaccattcttgtaagggcaccttctctgcaccacagttttttgctcacactcctcctatttttctcttctcagcttccctatgcctcatgatgccaggcataaggcacacagcaaccaagtgttggcagaaggcaaattatatggtttggctgtgtccccacccaaatctcatcttgaattttagctcttataattcccacatgctgtgggagggacctggtgggagataattgaatcatgggggtgattttccccatactgttcttatggtagtgaataagtctcatgaggtctgatgcttttataaggggaaactcctttcacttggctctcattctctcttgtctgctgccatgtaagatgtgccttttgccttccaccatggttgtgaggcctccccagccatatggaactgtgagtccattaaacctcttttactttataaattacccagttttgggtatgtctttatcagcagcatgagaacagactaatacaccaattgaggttcctccagagaattaacaaaatgtccatgcactctttcgttgttcccccatacccacagacctgccatccctggccctgcctggatgccggtacctggccactgctgctatattccatgcttttggacaagagcatgttcagtattgtccaggagacccagggagctcaagacagagctgagatccagttcctacagccacagttaacaccccagcccccgacacacacacagacttttcaatgcaaaatcaaaccattcccaaatatccagctacatattgttttacctttgaagagaaaaaagcatcagtggggttatgtgattttcatagatgaacaatttttgcaaatatgttaattgaagagtaattggtgctttcttgaccctcctgagcactgatgcttgccaaagggttatacatttcagactaatgatgatatccattactatatgtgcaattgcttataaactaatatatagtcatattaaaatctctaatctgattgagaaattttcagaaacaaggtacactgattttctcaccacttatttcctgctctcatgacagaatttctggagttctttgaattcacctggtttttggagctctgtcaagtcaatatttataactgaactagttcaaacagttcaagcattgtctcttcctttctggttgaagttctgtcttagaagactgttgtagtcagctgtgcttgtcataaagttttgtttaaaattattttagaattttcttctttggctttaatttaaatttttgtttgtttacttttttttttttttttccccggctcactgcaagctccacctcccaggttcacaccattctcctgcctcagcctcccaagcagctgggactacaggcgcccgccaccaggcctggctaatttttttgtattttttagtagagacagggtttcaccgtgttagccaggatggtctcgatcttctgacctcatgatccacctgcctcggcctcccaaagtgctgggattagaggtgtgagccaccgtgcccagccttgtttactttttaatttataggattgtaaatgaaactatacttggcctcagtttattctctgggaaataggttcttgctacaggtacagtttataataaggatttatttcataatagggagctttttatagattttaatatcatagttgccatttaaaaaattgtattaaaggccgggcgcagtggcttatatctgcaatcccagcattttgggaggccaaggcgggtagatcacctgagattaggagtttgagatcagcctggccaacatggtgaaaaccccgtctctactaaaaatacaaaaaattagctgggcgtggtggtgtgtgcctgaattcccagctactctggaggctggggcaggagaatcacttgaacctgggaggcagagattgcaatgagctgagattgcgccactgcactgcacagagtgaaactctgtcaaaaaaaaaatgcattaaaaatggtaatgatcaccatttattgcttgcctacagtatgtcagtcattatacaaggtatattttataattataaatattatttattatctgattacaaatatgttataccttgcactgtgtcctgtatgtctgttatgtttatttctgaattttccttcctttttcctctccatgctttgatctggatatttcctattgagagaatacactgaggcccagtgtgatttcattcacaatcctataaattaaaaagcaaacaacttctgggtcactggtcgtcttttctgctgtgttcaatctccagtaaaatatgtcagcaccttaaccactgtcctctgcctggtttcttagtctcacagccccgtgctgctgtagaattggcagatgccttgaggacaattgtggcgtacagtaaacatacctcaatatacttatttctgtttgggattttcgcccctcaagtcctcattgcgttattagccctgagctcttaagttttgtcttcacagagtcataagacttccagaaattcagcttagaaactcaagaacttagctttttagccactgcttcactttcagtttcatagcctctcatcccacactgcttacaaatctggaaacacctcaagggaaaagtgcccataaatgttggggttacctccacattctttccttctctttgggaccctatactctgaagtcctggctgtcttgatagttagttccctgataactttatatatttttaatttttttaaatgaacctggcatttcaaacataagttccatgataattttaaacaggggtgtgtgtgtgtatgtgtgtgtgtgtgtgtctgtgtgtgtgtgtgtgtgtgtgtccagcttttcgagttgtccgtgggaggacggtttcagtaagttactctatcattactggaaatgcaaaatcctgttttcttttaaaagagtcttcaagctgatgaaaattttaaagtagcttataacattttaactgtgatcttatttattatgagtatagagataaaggaaaaggcatcccacttctgaagatttctcgtttctaggagtgtctacaagattatcataggtgaaagtagggttggatgcagagaaatagtaagaaaggatggaggatggaggggataaaaagatcacatgtttggtgaatcctcttttaaaaacacttagaagattttccctaaactaattatctggcttaatgctaactgcttatttgctgaccttctgctttatttacaaatttaaagtggggccaacccttcctgttttcctttaatttaccccggcagctgctggttagctaaggaagaaaaaaaacccttttttttttttttttttttttaatggagacaagcagcaattaggtaggcttctaggtcaggtggccagttaggggtgccagggttcccaggtccagctttcttcgggtcatagagtgagggtgggaatcaagtcactcagatatttctcccgaattgaaatgcgtgtcttcctttggctgggcagatgaggtcccctcttctccatctctgctgctgggtcctggtgcaagcccttactctctttccactaaacccatgtggcagcctcctccttagcctgtttctccccagtcctgcacccatcagtccactgccacacggcagctacagggacctttctagaacacagcctcctgctgcctccatgttggcctccctgcccctgtcagagggatttttatttattttatttatttatttttgagacagagtcttgctctgtcacccaggctggagtgcagtagtgtgattgcagctcactgcacctccgcctcctgggttcaagcaattctcctgcctcagcctcctgagtagctgggattataggcgtgctccaccacgcccggctaatttttgtatttttagtagagatggggtttcaccacgttggccaggctggtctcaaacttctgacctcaggtcatccgccttcctcagcctcttaaggtgctgggattacagacgtgagccaccatgcccagccaagagggacttttctataacagcctctaggatcatgctacccccttcccagctctccctagcttttaagatcacataacctgcaaagtgccctgagatctggttctgcatgaatcttctctaccctattgctgcctatcaacttgacttcccacctttgggagtcagatgcagtccgctggacagcccatgccctctccatgtggctataccacccctgccttgcccctgctctctgcctgatgtcctactgtcttttgactgtgcccaggggcatttcctctgggaagcctgccagccctcagtctgaacctttgggtccccaaagcctcccctgtcctggtatgtgttgcactgcgttgtcatctcttgtctgtttcccctgagactcattattccctgaaggtctttcatctctgtttccctgtggcccagcacattgcctggcataaagtaagcacccaataaatttcagatggagcatatgttaagttccctataaaacctcagctgctgcaaattctgccaccagcctgggtgttctcctctgtggggactccttcagttttcagagacaggagactcccatagatttttagcaggaaaaggtagattcttgccttttagtctgtcagaatgacactttattagatgctttagaactgcagaagcttcaattttagaattttcagtttgtagcgttattttttttaagcagtaaaatttcagcgactatggtctgtgccagagccctaagcctctttctccatcctaaggagtttctctgcttaattgcagtgctgagctcagggaagctgcatatccaaaaatgaaaaggaaaccgctaaattgtgctgctacttttcctttgcagctcagataaaacaggcccagtgtgggaagaaggggctgtccttttgggggtgttggcctgtttctaattgctgcaccctcctctgcctccacccatgcctcagtgtggtttgggtcccttctgcccagagctactgggacatgtaataagaagctgcttttcagacttcttaattaaaataggttccggcagccattgccaggaagcagcattcgcacccctacatgtccaaatgcattactcatccaaaataagatatgccacgactcaggtttccctccttagccaccatggcttgaatggctgcatttagaaacagcccttacttcaagcccctatttcttaattatttgtcacttattcgcattcatccttgtgtgtgaaacatttttcccctcaccctatatgctgttatgtaaacaagtaattttttaggatgatgtcagaacctgatgtagttggggtggttttaaaatagtattttatggacagcaagaaaagtagttttgcttctggtttcacttgctagctttgggatggagggacatttatttgagcttctgcacctctgtgatcttgtctataaaacggggggcaatggctggtgctgtggctcacacttttaatcccagcactttgggaagatgaggcagaagaatcacttgaggccaggagttcaagaccaccttgggcaacatagtgagaccccatctctacaaaataaaaaataaataaaagaaataaaagaatgaaagttagctaggcatggtagtatccaactgtagtcccagctactcaggaggctgaggcaggaagattgcttgagcttaagagttcaaggctgcagtgagctatgattgtcccacttctgggaaacagagcaagactctgtctcaaaaaaaaagtggaaggtgggggtcaataatctgccagctcaggtattgtaaggattaagaaagacagtgtctgtgaagagcttggcccagtctctggaacacatttggtagccaggaaatagtaaatgacttctgtttccctacccccatcttcacctcctcccctagaataacaacatcataactgacttatttcatcattaaggatttaaatgcaaaaccttaagatagtcagccttagggaaacactgaagaatttatttttaaacacataaagattgcattcattcatccttctccacaccgcgggcagtcttcaaattctggttagcagagtcagcgggcagggaggatctggatcctggggttgtgtgctttgctcccagaggacatgagtatcaaaggtctgccccgatatctggagttcaagaggcgttttctggaaacaatttgtccaaaggctcccctatcactctcttggagaagtcctgtgttttatttatgctgaatgattgaatctattcccagccgaatgttttcctgaacaccagtaaaaatcatctgccagtcactcgggctcccaccccgggagtcatctgtcccctttgcctggtctcccatgcctcacagctcagcagccacaggcatggccatatctgcctctcttgcccttgccactccacttcatcatggccgtctcctctctggggctgctgcgggagatttccagtctgccctccagtgtctctgcatgcattctactcacctcctctccccccgcagccccgaggaactctgaagaaacacaagcttctgtggccccgtacacgtaggactaccaccgcttacttggaggcagtggcagtaaaaacggaaacaacaaacaaaacagaataaaatcctctttaactttgtttaacttggtgtcccatgcagtctatttaatttcagactcttatttaccccagtcctagggaactgaggttcataggaccaatctgggtgaatgctgctacagtttgtggatgggctgctccccatttgcttgttcaggtagctttgagcccaaacattggtcagcaagggcatccatatagtgacatgctgtatgtcatcaaaaagaaggtgttcctgacatagacaatttccagaatatatgctaagtgactaaagcaaagtgcagcatgagatgccaccatgtgctgcagatgcttggactggatggatacctaagtacccccaaactggcaggcacatctgcctctggggaagggggctgggtgtcggggaggggtgggagcaaattcctccccgtgtgcctcctggggcctttagaacctctacttctttgaacacagtgctactctgctccaaacgcccccaaacttcacacagagagtagtatgaagtcctcatctctgcacttgtggccctgaggttggcctcagcctgcccgcccagcttctcttctcattcttccctgctgccactctcctgtctccccagggactcggctgtttgagccactttcctttgacacgtctcagacttgccctgctccacttggaagtccttggagcagcccacacgcacccccgccgagctcactgtctcagaatgtgggaccacctaccagctttactcctgcgtctaactctaacttgtgagattgtgggggccagagtccccaggaggcagtgacgctgtgtgcagaaaagccaagagctccagggctgaacagatgtgactgaaaatctttaccagccatgtgccctggggaactgagcctttcatttcccctttccttttctgtatattggaggataacaagccttcactcacagggcgtgggtgtgtttctcatctccttgcagcacctagcacagtacctggcatctcatatgttcagggcatgtttgctctcctcccttcctttcccatcgtgactgtcaatcgactgttcccttggggcttgagattcttggattccaaaggaaagaacacagggccaggagtcagaatttcatccttgcctccgctgatgtctaattctgggataacgctgggccactcagtctttggattccctgccctaacacaaaatccatatttatctcaatgcaaaagagatgtggtcatcgaaacactgaatgcaaagggttagcagagtgagcacagatgttctcccatttgccaactggtttctaagaatatttggaggatgagtaaagtaatgtcttccatatgctcaagagaagatgatttagcaccatgcaaggtagagaaggagagcccccacccatcaacagaatgaccttggacaagacactagctgccctaggcctcaattacctcatttaaaatatgaaagtcataaaaccctacctcacgagggtgattgtgaggattatatgaggcaattcatgtagaaggtctttgtaaactgtgaaatgctctacgactgtcagccaggattagtagttaatgcacgtatttgtttattgtttcagcggagggtgcaggacgtcatcagcccgatcgtgtttgaagcagcctacagcctcagtgagcatgtgactggagaggaggagagggaactgccgcctctgacaccagttctccgctggaaaaagggacaaaagattgcccaaaagaatcaggtcagaaccttaaagctcatactcagcacccaaggtggcagctgcacagagcagaaataatggcccaaaagttgagagagccgtgggcctggctgctcaggagaccgcagccaggacacacctcctctctgggtctcccttttctgatctgcaaaatgataaaataaacagtcttaggggttacttgtgactactgtgggacttaaacactttcagacaattctcaggctgttagaagttacaatcccctcgagttcgtgaactggctggccacttggtccctgaacttgcctctgttcctagactgttttcagagcttagattggtggatagtaggtgcttaatgaatgttttattggtgggagaatgagtgaggtgaagaagcaagaatggtagcttgctgaattggcagttgagttacagaatgctcaacccaagagtccctggaaaccagagcactggggcaagtacaggtggtccacactcatcagattctgggatgtgcggctgtgtagagaagctttagtgcgatgggtgtatcactcgtatgaagtaggagtgagcctgtgcctgattttgtgcagcagcgctggccagctctgaggcgtgcagcactgagtgcggtgcaggaatatgcaaggaatctgcaatcccaagtctgtttcaaatcttttcttgaaacccaagatcaccacagattcagaaccctgtggaagatcaggaaaaactgtgggctaacccagcctcctaggcagggttggggcaaagctgtggaaccacctttcacagtgcttcagaccactgtaagtgtaggggaaaactagcagattgtgacccatgccttgtagattagagttgtagactgaaccacagagaagggtttgggatttgagatatccatccaggtgttcacgtaagtgctgagatttttaccaaggcatcgcattatctcccaaagcctctttcccatcatcctaagtggggttccctagaagcagagcctgagaaagggaattgggaacacatggtctaatgatgctgtgctcttagggaaaacctgtaaaggaaaggcatgggggctcaaaatggttgtggtctcagataaagtctggctgagggactctggaacaaaaattacaccaaagagttgtcctcaccttgaggcaagaggggcttcccttttgtgccccatatcattcagccattgactggctgtgggggggaagggaagtgtaaccctccttgaaaggagatcccctcagctgaggatggttctctagagaagaatgcagatgtgagccataagcagcctacacacacatcagccaggagatgggccacagttcacagtgcccactacacatcaaaacacaccctctggggaatgctgccaagaggttttgatttaaaacacgaaccttctttcacaacacaagtgccccaggagagtggcctgtaagtcccactggccattgatacttggaacaggccctgggggagtgagggaggacacgtggtgtctaagcaggtgggcagagtagatgggctggccttactctgaggtgtggagaaggctagagaagagtagaagataaggtgaagaggcagggcaggaagctgatggcttctgccttgactgggaagtacagacctaggtcccctcctgacagggaagtggggagaagaggttggcctggggacacagtaaagcatggtattatggtaacttctacataattggtctctagttctagaattattctgctttctaaggtcaaatcttactggactgataaacttacccatacttgggttacggaagttacccagactcggggtcctgggaagaatttcagggtcctctgtgcttatttgtttctgaattgacccagtgaggtagtcatctaccctgtccagcatcttgctagcctggacatactttccacagtgaacctatctctcattcctgcaagtctgtcagtggcacagatgtggactttctttagtgaaaagcatcttggaacctttactgacatttttagatttaagcagcccaatcaaagccagagatggagggacagattagtattgaaatgatgttcttggtcacttctggttccagatggccaaccaagcacaaatgttgatgtctgtgccttggtaccccattgcaatgattataaatgagtagatcggaacagggaggacaacactgtgaaagaaagggcatcagctaataataagagtccagtaattttctggtatgagtgaagtaaatggaagagtgttagtgggtgaacttgaactgtacatggaagagctggcttcctgcctacccagggaacagagaagctgcagccacagccaggccaacagttacagagggggccagagtaagaagtgggactgcaagtggtggtggtattgagggaggtcagtgaaatgtgaaggttggtatgaagaagggttagagttgacttttcaccattgtccccacccctacaggcttcaggcatgcagaatagcaagcagccaggcatcgccttctctaaagtgttaagtaaactgtttaagatagtgtgggcgacctcgttctcagagaaaagaaagccttacttctggcatttgaagtcaccaacgtaagagctagctttctctcccacaatccacccaaacactttcacagattttctactcagtccttttaccttagtttgaaatatgaatggacaaccaaggaaacccaagattgaggaatatttggtgcatgaaaggaaaggctaaaataaaccaggagaataactaacttaaaaggaaacaaatgatttagggaatataagagattattttaaaaaattttaaaaatgcaacaccttaatgtctatgcagtagacccaaggagatttaggaatatattccattcttttcattttctaatggatgggattctgttcctttttaaagggaggaatgaaaggcaagggaagtgttcttaaaaattaaaaatatatttgcagcaccaaaaactcagtggaagtattagaagacaatggtaaataatttcccaatggaagtgctaaaagacaagtagaaaagaaagctaaagaataaatttacggggtcctatatctccaagtaataagaatactagaaagtaagaataccagtaataagaaaagagaaagaagggggagaaaattatgtaataatagaatagcatgtttcagagttaaagagggagactattttttaaaattggtgtaaacaacaatttacaatcacaataaaccaaaattatcatagacacatcattttgaaatgtcagtgcttcaaagacaaagggaaaattctaaatgtttcgagggcaaagaatgcaggaatgttgatcatggaggataagtcagcttacaacagaatgagagtcagactgagtagtccattagactttttataagcaagattagaaactaaactatgatgaaataaaggcttcaatgttctgagggaaaatgattttgaaattagaattttgttttcagccacacaatcaaagtatgtggtaaaaataaagtcacttttcagataagcaagaacccagaaagtttacctccctagtaactcttccaaggaaattatcttgtacttcaacaaaacaaaaatgacaaccagaaggagcaagatgtgggatacaagaaactctggaactaactctcaaaagtctaatgacaagaaatcccaggatgataactgcagcaagtctaaaaagcagccaagtctattgagaagaggagatcaattaacttccagaagaatgaagctaagcaatagaatgatgagcaagtggcaaatattcagtatatagtgcagattgaatatgtttcttttatgggtaagaaaaaaataaaagcattcaagacctctcagaaaaatagaaataagataattacctgtacagattctccttgactcacgatggggttatgtcccaataaacccatcatgaattaaaaatattgtcagttgaaaatgtatttaatacacctaacctgctgaatatcattgcctagcctaccttaaatgtgttcagaacacttacattagcctacagttgggcaaaagtcatctaacacaaagcttattttacaataaagtgttgaatatctcatgtaatgtattgaacactatactgaaaatgaaaaacaaaatggttgtatgggtactcaccattaacacacacagctgaaagcacactggacctaaagaatatttgaactaaaattaactgctggattatggggctactagtgtaacagggtcatccatttctctctcttctgatgagtctcaagaatagctggtagaagccactgcggtattaacactcgttgatggcttagcaggcatggtgttctgtagaaagctatcagttgtttaccctcctaatcctataactgactgggacctgcagctcactcccactgcccagcatcacaggaagtattgtaccacatattgctaccctgggaaaagcttttgaaataaaaaatttgaaatatggtttctactgaatgcatactaccttcacaccattgtgaagtcaaaaaatcgtaggttgaaccattataagttggagaccgtctctatgtcatggttaaaatataaaacaaattaaaatgtgataaaataaccagttataactatcagatgttttttgtaagcctcatggtaaccacaaggcaaaaacctatagtaatacaaaaataaaaataaaaaagcaaagaaccaaaccataccactagagaaaatcacttgaccacaaaggaagatagcaagaaaggaagaaaggaacaaaggatctacaaaacaactagaaaacaacaaaattgcagtagtaagtccttacttatcaataattatcttaaatgtaaatggattaaactctccaatcaaaagacatggagtggttaaatggatttaaaaaaaaaaaaacaaaaaacaagacctaactatatgctgcttataagagactcacttcacctgtaaggacacacataaaatgaaagcaaagggatgaaaaaaattctatgcaaatggaaaccaacacagagcaggagtagactttaagtcaaaaatagactttaagtcaaaaactgtaaaaacagacgaagatcattatacaatgataaagggatcagttcagcaagaggacataacaattgtaaatatatatgcacccaacaccagagaaactaaatatataaagcaaatattaatagatcttatgagagagttagattgcagtacattaatattagggaatttcagtaccccactttctgcaatggacagatcatccagacagaaaatcaataaggaaacatcagacttaaactacactctagaataaatacgtctaacagacatatacacaacagtccatccaacagcgacagaatacacattcttctcaactgcacatggaacactctccaggatggatcacatagtaggccacaaaataaatcttaataaatttagccttgaaatatcaagtatcttttctgaccacaatggtataaaacttgaaataattaacaggaggaacttcagaaaattcacaaatacgtggaaattaaataacatggtcctgaatgaccattgggttaatgaaataattcaaagggaaatttaagaatttcttaagacaaatgaaaatggaaacacagcatacaaaaacttaaaatgtggtaggattttgagtaagtagaagagtataaagaagaatgttgatcctagaaatattctatctgaagtagaagttgaatattcctggactttaactttgcaactgtagaggaggatgtataatcatgacacttgtcttggctcaactgtgagcaataatcatgaaccataataaaattagcactatttattggttttcaatatttataattaagccaaaatcagagctatggtgatagcataaaatgcaaatgtcattaaacttgattatataaaggtaaaagtagaataagataagttttcttaatatcttaatcttttaaattgatgagtcaagagattgcaaaacttgatgaaacaggaaatcactgttggcttaaaattgcagaggtcatcagtagagcaacacttcctaaagtgtgattcctgaaccagcagcatcaacctctcttgggattttgtgagaaatgaaaattgtttttattttattttattttattttatttttttcctaaatttcttatttccttctctttttttaaagttttattattattatactttaagttttagggtacatgtgcacaacgtgcaggtttgttacatatgtatacatgtgccatgttggtgtgctgcacccattaactagtcatttagcattaggtatatctcctaatgctatcccacccccctcccccaaccccacaaccgtccccggtgtgtgatgttccccttcctgtgtccatgtgttctcattgttcaattcccacctatgagtgagaacatgcagtgtttggtttttttgtccttgcgatagtttgctgagaatgatggtttccagtttcatccatgtccctacaaaggacacgaagtcatcattttttatggctgcatagtattccatggtgtatatgtgccacattttcttaatccagtctatcgttgttggacatttaggttggttccaagtctttgctattgtgaatagtgctgctataaacatacatgtgcatgtgtctttatagcagcatgatttataatcctttgggtatatacccagtaatgggatggctgggtcaaatggcatttctggttctagatccctgaggaatcgccatattgacttccacaatggttgaactagttgacagtcccaccaacagtgtaaaagtgttcctatttctccacatcctctccagcacctgttgtttcctgactttttaatgatcaccattctaactggtgtgagatggtatctcattgtggttttgatttgcatttctctgatggccactgatgatgagcatttcttcatgtgttttttggctgcataaatgtcttcttttgagaaatgtctgttcatatccctcacccactttttgatggggttgtttgtttttttcttgtaaatttgtttgagttcattgtagattctggatattagccctttgtcagatgagtaggttgcagaaattttctcccattctgtaggttgcctgttcactctgatggtagtttcttttgctgtgcagaagctctttagtttaattagatcccatttatcaattttggcttatgttgccattgcttttggtgatttagacatgaagtccttgcccatgcctatgtcctgaatggtattgcctaggttttcttctagggtttttatggttttaggtctaacatttaagtctttaatccatcttgaattaatttttgtataaggtgtaaggaagggatccagtttcagctttctacatatggctagccagttttcccagcaccatttattaaatagggaatcctttccccattgcttgtttttgtcaggtttgtcaaagatcagatagttgtagatatgcggcgttatttctgagggctctgttctgttccattggtctatatctctgttttggtaccagtaccatgctgttttggttactgtagccttgtagtataatttaaagtcaggtagcgtgacgcctccagctttgttcttttggcttaggattgacttggcgatgcgggctcttttttggttccatatgaacttgaaagtagttttttccaattctgtgaagaaagtcattggtagcttgatggggatggcattgaatctataaattaccttgggcagtatggccattttcacgatattgattcttcctacctacgagcatggaatgttcttccgtttgtttgtatcctcttttatttcattgagcagtggtttgtagttctccttgaggaggtccttcacatcccttgtaagttggattcctaggtattttattctctttgaagcaattgtgaatgggagttcactcatgatttggctctctgtttgtctgttattggtgtataagaatgcttgtgatttttgtacattgattttgtatcctgagagtttgctgaagttgcttatcagcttgaggagatatggggctgagacgaaggggttttctacatatacaatcatgtcatctgcaaagagggacaatttgagaaaattcttgggcccaccccagacccactgaatcagaagctgatggggtgggccccagcaaactatgtttttgtttttgtttttgtttttgtttttgtgttttgagacaaagaatcctctgtcacacaggctggagtgcagtgacaggaactcggcccactgtaacctccacctcccaggttcaagtgattctcctgcctcagcctcctgagtagctaggattacaggtgcacgccactatgcctggccaatttttgtatgtttagtagagacaagttttcactatgttggccaggctggtcttgaactcctgacctcaggtgatctgtccgccttgacctcccaaagtgttgggattacaggtgtgagccaccgtgcccggccagcaatccgtgttttaacaagatggctgggtgattctcatgcagctaaagtatgagaactgatacagtagaggagttaaactaataatttgcccatcaaaattatggaggtgaaggagtggggatcgttatgtgagataaattcctgtctatcatggaaggaatttagtaaaataatgtctagatctgataaatcaacgagtagtagtatcagcatgttttctagagatatggaaataatcatcaaaagaaacataaacggacgtgggtaataatgagtaataatggttgcccctggagaggaggactcagtatggcgaggtatgtggcagggggttattatttttctaaccatgtgattctttggttgaaattaaaataaaagaaaaaattgttcttagattgggaagattgtccaggagcctgagagaagttctgggagagcagttctttcttattgtccttttcctgattatggggaaaaaaaaaaaaaaaaaaaagataatcttccagatgttggctcagtttgaggaggaggaaagattctgagagtgaggcccactgcaggaagcagagctgatctttaacctgtgtatatatacacaacagtttgacacagagcatctcacctctttcataggaaggaataaattcatcagaactctctaggtcatgttgccagataacattagggttccactactttaaatgccttgatctcttcactgagcccatgttggtacccaggactatacagaagggtggatcaaatcatgatgaccttttagagttggggtctgcccccactgatggcctaattaaagtggaatcgctgcacagactgtgtgtgtaacatggagatagtgaccagtacatgttaagtacaggcttactgattaatctgaggctttttgctatgagttaggaatgtgcaggacaggcaggagaccaagccttccctctatagggtacatagtcctgggagaagacgggttccaggatagggctttggcactaggctctggtgagtgaatagtgggattgctgctaatgctgagattggattgggattctgggcgctctggggacggtggagcttgaatgctacaagcctccgtacatacagcctgatgggcacacattgcaccttcaaaatttaaggaaagcaaagacctgcatctgtctcatcagaaagggaggcatatttgatagcaggaaaaagacaacctttttttcattaaccagaggagtattttaaaagactataaagctggaagcaattcaattgtgtgtctactttatgtaagacctcgatgaaaaaataaatcattgctgccttcattggagtcacagacagtccaggaataatttacaaagtgagatttagattagtgtgtaagaatttcactgcagaggccacttctggctgaggagaagatgttctatggagaaagggagaattggccagagccttaaaggtggagtaggatttgggtcctcagggaatggaggggctgatggatgctaaaggtctctcacgtggctgaatatctagtgagggaaaggggagaggccatctggactggagattcagtcatgcagtctgaagccacttgttcactggctgaggagttggatgtgattctacggtggacagaccatggcatattttgcagtttggggagatcgtagatgtgcctcagggagattggtgtgcctgggtatggggaggccagttaagaaagagcttgttgcaggggcctttgcaggtgagtccctggggagtctgtgtgataccccccagagagttgactcctaattaattgctagttggtctcagctgctgaaacagagggtatggaactaaatgaaacaatcatgggaagtcctggctggtctgtgtgctgggaagggagcaatgctgtccttggactggtcacctgaaggtcctttatccctcctcctcagctgagcataccaatggtgatgacagaggccctgtcttcaatccctgtacacagaatagcgctctgaaaattataactcttctcacgcttcatcagcaggcccccaaagagacctggctacagcagggcttccaggtctttcactgcggtaggcagaatggccccccaaagatgtccatgccctaatttctggagcctgtgatttggatacgttacatggcaaaagggactttgcagttgtaattaaggtgatggacttccaaatggggagaggagcctggattttccaggtgggtccaatctagtcacacgagcccttaatagcagcaaacttcctccagctggaggtgggaggaatgaggcggaataggaggtcagagagacttgaagcatgcctttgctgatgttgaagatggagtatgtgatgtgacgagaatgtggacaaccttaaggggctgggagaggcttccaggtgactgtctgcaaggaaacggggcctcagtcctacaaccacacagaaccaggtgcttccaaaaacccgaacaaagctggaagtggattctcccccagggcctctagataatcgtccagaccagctgacaccttgatttcggcctgtagaacctggagcagacccagacaacccaccgacctctgacttacagaactgtgagataatagatttgtgttattttgagcagctgaactccggtaacttattactgcagcaatagaaaataatagacacacaatacagcccacacctccagaaccccggggcttctttcctccctgggctctctggggaaggagcacaggctgtgcagtgagatcagggccctggcccagagcactcaccctttagagcctgtttcctcacctgtcactgggggtgccatcggctgctctgcctgcctctgggtggtggtgggattacatgagggaaatgtgagaagcccggaaatgatgaggcagcactggatcctgctgttcccttcctgggaagccggcttcctggtgttgtgaggagaggatgaggccgtcatgggagcaggtctgacctgggctctgaggaagcaggtgctctgctgcctttccacatcctttcctctgaggggggtcccgtctctgcaggcccgtgggtgggctccccggtgggacgcaatggcaccatcttaggcaggagtccccaactcctggatcagtaccagtccggccacacagcatgaggtgggcagcgggccagcgagtgttaccgcctgagcgcccctcctgtcagatgagcagaggcattagattctcacaggaacatgaaccctacacatgtgagggatctagattgtgccgaaaccatcccgccccctccaccgtccgttcatggaaaaattatctttcacaaaactggtccctggtgccataaaggttggagaacactggtctaagggttctggcaggctctcagatgaacctctctggatctttagggtgtctggccctcacgtgtcaggcccaaagatgcctgttagtctgtcgcagagggagaagatctggggaggacccatataaccagaactcgggagccagccgcaccaccatgagcccagatagcatgagtcccttctcttttctccatctctgctgccattccctaggccaggccaccatcatttgtcacctagaccaggtcacatccctgcataacctcctcccgctgaggagctcccttccccctcagaagaaaatccggacacatgctaaggcccacgagagcctgtacagtggggctcctgcctcgccagcgccacccgcatactgcattcccaccaccctcaaacttaccaggcctctgcctgcctcaggccctttgcatatgctgatacctcatctagaaagcactttgccatgcttttcccgtggccagctcttcattttttaggtctcagcctaaatgttgcctcctcaaagaaccattctcccactaccctgtatttcctgactcagctgcctttctttgttttgacacagggtctcattctgtcacttaggctggagtgcagtggtgtgatcatggctcactgcagcctcgactttccaggctcaagtgatcctcccacctcagcctcccaagtagctgggaccactggtgtgtgccaccacgcctggctatttaaaaaaaaaaatttttttttctggacacagggtttccccatgttgcccaggctggtcttgaactcctaggctcaaggaatcctcctgcctcagcctccctaagtgctgggattacaggcatgagccaccgtgcatggccttagctgcctatttgattccttcgtgacatctaacagaacgtgttatttcgtctacttgttattgtatttacctctctagaatggaagcccagtgagggaagggatctattttatcttatttgctattgatccgcaacacctggcagagaacctggcctatagtggatgcttagtaaatagtaaatagttgaaagagcccttctggaagaacacaaggctagttcctttggcaaaaattgggcatcatatcagagcttcttcactagcagattcagcagagctataaaattaaaagaaatgtgttctgtaatccctctgggaattccccacgggcaagagagcatgatgtgtgatttgcagtgacatatctataccacggtatgtttgtagtgactacttttcaaaagacaagatggaggatatacagctggtgaaagaaaaggtgtcggctttgttgagaagtcttactttgttgtctttcaagtgaaaagtgagctattttagtctaatggtaatttttaactatgttgaagccatacactttgggtctccattgtgctggaaatcgtcactacagctcctcccaccccacacccctcaatgcatgcatataggaatatagctcatgctatggaaatccactgtttgcacagcctggacattaggtaatagtttcccggctgaggtgcccagctggcttaacatgccattatttacagctctaaggtttattttcattattatatttaaacgtctctgcagaaggaatggaaggctaagagggtgggagagtagaagaggagagggagaagagtcactccagacgtcagaaccagacaggctcctgagaccgtgcaaactgggggatttcagattgcacacttggagtcagggcagcagtttggctcagcaggaggggaaaggggtgttagaggaaaaggctcctgccctccaatgttgtttgacccagatcaaccctactcttatgggtatcagcttctgggtaaatactcttttcaaagagggcaccatggcagaacacatgtgaaaaccatctagtttgaagtatgtgtgagaaaaacaactaattcacccttctcactgaccagtggagaagtctggccttatctgtctgtctcaggcttcttctccaaggttaaccccaacgggaaaggagaggggactcatcaaaggttagaccatgtcctgaagtgacctgttgaatttgcaaaacttctttttcagtgttatgttttatttttgcaatttttgtggggggaaaatgcattctaggcttctgaaaccctttttagaagaaaatcatggtttcctcaaactcttcaagcttattgagttttcttctgtattatcctgtcctattgaaaaccttgtgcaaaagtatgtgtggggtgagaggtgtttaaacacacccggtggacagtgtctggctggggaggaaacgttagcctctcttttcttatcttatgagataatttaggaaatcaagtacaaggcccttgctgtgtgcacttatacctggagccttatttaggggatgttcttgcagatagatggggagaagtcttgctgggatcctctctggttttaaggcattttttttctcactcccagttgcctgcccatgtctggtttagcagcttttagaaacgtggctggcatccttttttcttttctctgacagcaccagcccctttatttgaacttcctagctgttttctgcctcttctgactaattaacagcaactaaaaaagaaaaatgaaacatagaacacaaaaaattccagggtgaaaaaggagaatttctagtcctggggtgcaaaagtccctagaagagagttttgagctgaaatgaaaagttgtgattatagagagacatgaaatgtgtcccataaaaggccacctagtcccaggcagatccaggaagagcactgggctgggagtcccatggggccagggcctcaccaagcagtcagccctgctcagttatcacaggggttgaactggattgcctaaatgatgcctttagatggatggaactggagtccattatcttaagtgaaacaactcagacacagaaagacaaataccacatgttctcgtttataagtgggagctaaataatgtgtccacatagaagcagattgtgggatgatggacaatggaggggtggggaagttggagctgggtggatgatgggaggttgcttgttgggtgcaatgtgcattggcccagtgatggatgcaccaaaggccctgactttgccatgacagaatatatcaatgtggcaaaactgcacttgtatcccatgaatatataccatgtttttaaaaatgttgcctttgggcagaggggataattctgcaaactgcagagccatggagtaaaaaaaacacccaagatagcagaacttgtcatttctagtttttccacaggaccataaagcaaaattggtgccgggtttgtatttaaagggaaaccaagagggtttttttatccttccatggtttcaaaatctggaaggacaatttgtacagaccctgagatagaaggattcctcagctttaatttcatgaacgatttgcctttcattgattcttgaggatatgaatgttttagaaagcaacagtgtatgccttgattttaagaggcaatgagccttttccttccttcgtttaggcatggggctgaatggagctgaaattcctgcactcttataacgtgccacatgaagggcagttttggattctgggaaaacagcccattgaaacagaattgggagggagaaacctcttacactcaggtcatggtatttatatgaatacaaaaaaaaatttaaatactgtgctaggtgctgggggttataaacatgaattacatgattagggcctctggaaacttgtgtggggctatagaaggaacaccagttcagaaatgtcactcctgtcatccagacaggatgcttcaccataggggcagagaccttctgctaagtcataccgcatatcaagaaatatattgctaggccaggcacggtggctcacgcgtgtaatcccagcagtttgggaggctgagacgggcagatcacttgagatcaggaattagagaccagcctggcaacatggggaaaccccatctctactaaaaacacaaaaattagcggggcatggtggtacgtgcctgtaatcctagctactcaggaggctgaggcacgagacttgaacccaggaggtagaggttgcagttagccaagatcgtgccactgcactccagcttgggcgacagaacaagactcatctcaaaaaaaaaatgcattgatcaaatcagcttaaaaatagccttcttgtttgctcttcttggtgtgggattattcagtccaattcttctactttttttaggcctcagcatgggatttggttgtcatatcaaccctataaacagtgttgaatccatgtcaataattgtattttttaaaagcaaatatcaccaagtccaagaaactgatcctcctctgaacatgatagctggactaggctaagaatcctatttcctgttagatcagaagtgaagattttctggtacagatttgggtgggagaaatgagctacccttcccaaggccttagcacctagatgacatcctctctgaagtcaccctcagccaggagcggacactgagctgctatttctgaatcacatgtccccaaagctgccctggccttggtgaccatggcactgtaagagaagcacagccagccccagcgtccttactctgactcagaggaaaatgcaacttgagctggattcattgaaatcttttttttcctggcctgaaggaaatgaagaaacatagccaaatattctaaaacaggattcaacaaacagcccataggccaaatccaccactgcctgtttttgtaaataaagttttattggaacacatctatgcccattcccttatgtattatctatggctgcttttgctctacaacagcagagttgagtagtgtgactgagaccgtatagcctacaagcccaaaacatatactgtctcacccttttcagaaaaagttgccagccttgttctaaaagaagtagagtaaggatttagtgagaagctggagaaaatattttcaaagacaactgtattctccagggaaacctgagatgaagaccaaggtgaggaaggagccagcagagaaatcgagtccatgaggctgaggaggccactggatgtccagtcttcagctctctgaagcctgagacaggaaacagttgtctcccgagagaaaggtttgaacctcctttaactagggaggaataagagatgatggcttcttagatctgtttacatttgctggaaaaacttcttccagggaaataactagacagggctttggccaactagcaggtgaagtctggagggaggtggaagagactgcttccaagctgggttccgatttgtctgattgaagcagccaagcttgtgtttgccagaggacttaggaggatgtggataaaatcaggctgaggcctttttttaaaggcccaagctggagctattgggattgttccctcagaggaaaatcaggagtttgggccattggcttcatggagaacctgtactttgtaccaaggagaagtcatttctacttggtttttgaaactgcattgtcatctagtattccaaggctttagtctgtccaccctcctgctccagagagatgcctttcagttccttaggaaacaaattggccatttgcccaaagagactaatccaggactagaacacaggcactgagtttcaacctcaggctccccagtgcgtgactcaggtctcttgattccatggtgtattgtttttttacctattaaacaattgcattcctagcctatggaaggtcttacctaagccaagactttggcagggattggattgtgcagcccatttttgttaatagcattgcccaagttagggaaggccattaggttggctgagtattctggtattctattgctgcataacaaactctgaaatttagtagcttaaaataacatttattttgttcatgaatttgatttcattgttttttaatgtatgtaaggtatataaaatgatgttttgatgtacatttacatagtgaaatggctactatggtcaagcaaatgaacatatccattgcctaacatagtttttttttttttttgatagtaagagcacttggaatctactttattgtcaaatttccagtatataatacaatattgtcaacatagtcatcacgctatacattcaatctctaaattttttcatgctacctaaccaaaactttgtacctttgaccaacatctccccattccctactccctaccccctccccgacccctggtaactatcagagtttcactttctggttctgtgtatttaacttgtttagattccgcaataagtgagatcatacaatatttttctttctttttgtgacttgtttcacttagcataatgtcctccagtttcatccatgttatcaaaaatggcaggatctcctttttaaaggctgaataatattccattgtatgtttatatatgtgtatatatatatatgtgtgtgtgtgtagtatatatacatatatacacaccacaatttctttatccattcacctgttgacaaacacttaggttgattccatgtcttagctgttgtgaataatgctgcaatgaacatggaaatgcaaatatttctatgaggtactgatttcattctctttgagtatatacccagaagaggaattgcagggtcatatagtagttctatttttattttttttgaggaacctccatacttttttcataatggctgtaccaatttacattcctaccaacaatgtataagggttcccttttctccatgccctcactaacactttttatctcttgtcgtttttatagtagccatcctaactgttgtgaggtgatatttcattgtgacttcgatttgaatttccctgatgattagtgatgtggatatttcagcagaaaccttgcaggtcagaagagagtggggtgatatattcaaagtattgatggaaacagtgcctcatacctgtaatcacaacactttgggaggctgaagcaggaagatcacttgagcctaggagtttgagactagcctgggcaacataatgagaccttgtctttacaaaaaataaacagaaaattatccaggcatggtggcatgtggctgtagttccagctacttgggaggctgaggtaggaggatcgcttgagcccaggaggtagaggctgcagtgagccaagatgatgccactgcactgcagcctgggtgacagagtgagaccctgtctctaataaattaataaaataaaatttaaaaaccctactagccaacaatactatacccagtaaacctgtgcttctcaagttgaaatgaaaggacactaaatagcacaagagagcataataaagaaggaaactcgttggtaaaggtaagtatatggacaaaatcagaacactatattactataaaggtgatgagtaaatagcttttatgtctatgaagaaagttaaaagacaaaagtattttaaaaaccattataagtattaactaaattatgttaatgggtacataatataaatagatataaactgaggcatcaatagcatgtaacttggggggagcagagggaaaatcagagtttttatgcaagtaaagttacattgtgaacttataacagactgttacaaattatttcgtgtaagctcctggtaaccaccaagaaaatacctatggaagttatatatataaaaaaagaaaggaatcaaaacctatcgatacaaaaaaaaaaaagaaacaaaacaaaagaaaaccgcaagggagaaaaagagggacaaaagaacaagacacatagaaaatagtcaccaaaatggcaatagtaaatctgtctctatatttactttaaatgtaaaaagactaaccttcccaataaaaagatacagcatgactgaatagattattaaaaaaaacaacaacaaccaggatcaaactgtatgctgtctacaagaagctcacttttagattcaaggacacacagagagatggaaaaaggtagtccatgcaaataccaaccaaaagagagcaggagtggttaatacttatatcaacaaaatagactttaattcaaaaactgtctctagagacaaaggtcatttcttaatgacaaagggtcaattcaacaggaagacataacaattataaatgcacccagcatcagagcacctaagtatatacaacactgacagatctgcaaggagaaattgatagcactataataataggagatttcagtaccccactctcaataatggataggacatctagacagaaaatcagtaaagaagcagtagacttgaacaactggacctgtgtaacaaatggacctagctggcatatacagaactgttcagccaacagtggaagaacattcatttttctcaagtagccatggaacattctccaggatagatcacatattaggtcacaaaacaaatcttagcaaatttcagatcgaaatcataccaagtatcttttccaaccacaatggaatgaaactagaaatcagtaacagcaagaaaatgggaaaattgtttgtgaattcatttgtgaatttgcaatttggcagagcttgatcaacacagctctctgttccatataatgtctatcagctggggcaactcaatgggattggaggacatctctgaggttttcactgtcatggtgactcacgtagcctgcaagttgatgtggcagtcagtgtctcctgtgagcctctgcatggacagcttgtgtttcttgcagagtggctaaattctaagaacaaatgccccaagaaaattaggaggaagctctattgctttttatgacctagtctcagaagtcacatagtgtcacttccactgtagccaaaagtccacccagattccaggtaagggagcattagaccccacctctctatgggagtagtttcaaagtcacattgtaaggagtgccatcatcgagatattgttgcattgatttttggaaaataatttacctgcacagaggtaaattcacatcaattctttgtctccttatttcaccatccattaatgtttgtttgtttgtttgttttgagatggagttttgttcttattgcccaggctggagtgcaatggttggtctcggctcactgcaccctctctctcctgggttcaagcaattctcctgcctcagcctcccaagtagctgggattacaggcacccaccaccacacccggctaatttttgcatttttagtagagacagggtttcaccaagttggccaggctggtctcaaactcctgacttcaggtgatcacccgcctcagcctcccaaagtgctgggattacaggtgtgagccaccatgcctggccccaccatccacacccagccccaccatccattaattaagcttcatggtgttcactcagtcacactgttgtcgctctcatttgccaatgttaaatagtgatgcacagtgcctaagacaaaatcgctatcactgcaagctcctacccctggctaaatgctaatctggatttatgggacagtgacgagtgctattattttcattttataaatgaggaaactgagtcctggagggaagaaaagtcaattttcttaatgtaatacaattaaaataggattacactttgaatttccttatttcttaactagtattttatctttccatgattgtgcttaattttatcttatcagtacaagcactcatataacctgtagggatatttgtgtacatgtgcatgtgtgcatatacacacacgcactgtgtgtgtgtatatgtcaaactcagtgcttgcctttgttggatggaaattcagcagcactggaggactagacagctagaaaagccagtttcagggacaggaaatagtagagttcaaggaaaagttaggacaaggaaaatgagtctttacaaagcaaccaattcctcgtgagaagtctttgcatctcacatggctaagagacagtactttggttaggggcctggagctttggttttgatgaacagtgtgctggtattggctctaagctggggcatccaccatttggctccccatttgagtggtcactctgtctctcagagcaatgtgtggtctttcggtgttgataaagcagcaactacatgccaggccctaagggcaggcacagaggcaagcaagaccagtacagtgccccctgcaatcctcttgggacatcattttagcaggggagactaccattgaacatgtaatgataaaattgattagttatgattgagatgagcagtaggaggaaaaagtgtgtggaactgtgagagctcacgatgggcctgaacttgcccagggactcagagaagtggtctggatttgcttgttgaagggtgagaggacatgtactaggtgaaccagctggaggaatctggggatccacttgtggggaggccctgggtgggaagttgtaaggacaaccagagtgatagctggcatgagaaagccagggtgacagaggtgaggagggcacatgccagatctggcagcctgcatgtcaccagatggatttaggtcacatcctgttcttccgttctcacctctttcacctccatctccacctccacctctaccccttcacctctccatgcctcacaaagttggactgtcttgcctgtgagacaggaaaggcatgtgtgatgaggggactgtacactaggggccagtccaggttttgtgagacctgaggcttatatagtagagggtggggtcttgaaggaaaaaaaaaaaaggtgaaattatgaagacaaagtttgtgcaaggcttccctaggggccatgtcagctggggacctctaagctgaagtttcactagtgtggtggggaagctccctttggcaccttccctctgtcctcaaagctcataaagcccacctttcatcttgcctgagacgttcatgccatccttacacccacttcctcctgttttcttcttagttaagatggcaaagaaagagcaaatatattgaaatctcctggaaatttggctctctccttgaccccagtagtgtccaaaagaacacaggaatttcctctttttgcccaagacttccatgatattttccctgataatcaaggaagggagtgttggctgggacacttttttcttttggaaatgtggcaggggaatatgaattttcataggcgaaattactctgtctggtcgagtctagactgttcgttggccagcacgtttgctggcgcccacactgacactctgaggtgctgcctggacttattctctgggcagggaagaaataacctggaactacattttggggaaaaaactcacgaacatgagcagtgacaaggaagaagtttaataatgagtaaattacaactaaaagttgtcaacaggctcttctctccaaattccactgaaatgagcaaagccatctaacagtagtgaagagtctctgtcatctggaacttggggaagctactgtccatagatctgaaatgtcagagaggttgagacagattgaggggaagactaacaagccctccatggaccgtagaagaaagccctaacccctctccaaatgctgctgctgatctcctggcaagcctccacagataggcccaggcccaggcacagccagcaagctctctggaaatatttgggttttgacatgccaagacttggccccagtaagggctgggtggggctttggctgttgaggcccagtcttggttagagaaaaggcactgtgtccctgttaactgctggctgccccaccaacaaactggaaagaatctcccccagtctgttgtgattccctcagcctgatggcctaattgcctttgccttttcctgttaatactgacaattcaatacagtcccattgctcaggcagaacctatttcatatataaatttcctgcatccccaaggcagagcaaatagggggaaatgaccaaactataatctgagagttctttactcaactggattatcattcatctaagagcatctgaaagacagtctcacacaagcaaagactgaaaggacatccaccaccacgtacctctcttgaaaaaactgcttggagaagcacttcagtagactagggaatgaatcaaataagtaatgcactgacaaaatcaaaaccacagttgacttaggcttccttggagcttggaagaaccccttcccacgctggagagctggctttttggaggtgggagtagaagccctgaggggctcaggggaggaattcccactgatttgcaagaaaggaattggccactgtgtactcgtttgccactcaatcctgccctaaccttcctctcctgtctttctcacagactgtttttgaaaggaattgccgttcagaggactgtgccgcagacctgcagcttcagggtaaactgctgctctccaggtatgtcggtgtttccttcagagcattgttctcaggctcctttttcttgaccccaggtcccaaacctgaatgtgcagatttccccactgaagaggataaacagagttgatgggttacagtaatattctgtggttttaaaaaaatgtatgttacaaaataattataacaaaagctttgttgggaagattgtttaggtttttttgtgtgttgattgcaattccacatatctcacaatgtagcttgtatttctaatttctatgagtatttgaggggtggctattttatgcttgctgattgtattaagttgaatcatatgaaattgccaatatttgaacttttggacaatttcatatgtatgattcatcctattattaaataaaggtttatgccctcctgcctccacacacacacacacacacacacacacacacacacacacacactagtgtatgttttaacaagtaacatttctgtggcaggagagggctgaaggagaggggcaggctgccctgatccaagtgagcagatagtctccttattgtttcagggtttcctcccgcactacatgaatcccccaaggctaaaggtgaaccgtacagcggccttctgtttcctctttgccaaccttttattttagacttcatttaggatgaaggtgctggtcctgatcatttagcctcatttcacagaatggcttccttttgaaacagttccttctgaaagactgttttagccttggggccagaaacccctctattagttttattaccatttctgaaaaacagtcactagttttggtagttatttttcaaaatgcatagtgtatcccttacttaaaactatgagagttaagtttggatgaaatgacatgaatatactattatgaaccagtgcctacactaggacattttttttattgttatactttaagttccaggatacatgtgccgaacgtgcaggtttgttacataggtatacacatgccatggtggtttgctgcacccatcaacctgtcatctacattaggtatttctcctaatgctatccctcccctaaccccccacccctgacaggccccggtgtgtgatattcccctccctgtgtccctgtgttgtcattgttcaactcccacttatgactaagaacatgcagcatttggttttctgttcttgtgttaatttgctgagaataatggtttacaccttcatccatgtccctgcaaaggacatgaactcatccttttttatggctgcatagtgttctatggtgtatctgtgccacattttctttatccagtctatcattgatgggcatttgggttggttctaagtctttgctattgtaaagagtgctgcaataaacatatgtgtgcatgtgtctttatagtagaatgattcataatcctttgggtatgtatacccagtaatgggatggctgggtcaaatggtatttctggttctaaatccttgaggaattgccacactgttttccacaatagttgaactaatttacactcccaccaacagtgtaaaagcattcctatttctccacatcctctccagcacctgttgttttcttgactttttaatgattgccattctaactggcgtgacatggtatctcattgtggttttgatttgcatttctgtaatgaccaatgatgatgagcattttttcttatatttgttggccgcataaatgtcttcttttgagaagtgtctgttcatatctttcgcctactttttgatggggttgttttttttcttgtaaatttgttttagttctttgtagattctggatattagccctttgtcagatggatagattgcaaaaattttctcccattctgtaggttgcctgttcactctgatgatagtttcttttgctgtgcagaagctctttagtttagttagatcccatttatcaattctggcttttgttgccattgcttttggtgttttagtcatgaagtctttgcccatgcctatgtcctgaatggtattgcctaggttttcttctagagtttttatggttttaggtcttacgtttaactctttaatccatcttgagttaatttttgtataaagtgtaaggaaagggtccagtttcagttttctgcatatggctaaccagttttcccaacaccatttattaagtagggaatcctttccccattgcttgtttttgtcaggtttgtcaaagatcagatgattgtagatgtgtggtgttatttctaggcctctgttctgttccattggtctatatctctgttttggtaccagtaccatgctgttttggttactgtggccttgtagtatagtttgaagtcaggtagcatgatgcctccagctttgttcttttggcttaggattgccttggctatagggattcttttttggttccatatgaaatttaaagtagttttttctaattccatgaagaaagtcagttatagcttgatggggattgcattgactctataaattactttgagcagtatggccattttcacgatattgattctttgtttccatgagcacagactgttttttcatttgtttgtgtcctcccttatttccttgagcagtggtttgtagttctcttgaagaggtccttcacatctcttgtaagttggattcctaggtattttattctgtttgtagcaattgtgaatgggagttcactcatgatttggctctctgtttgtctattattggtgtacaggaatgcttgtgatttttgcacattgattttgtatcctgagactgctgaagttgcttatcagcttaaggagattttgggctgagactatggggttttctaaatatacaatcatgttgtctgcaaacagagacaatttgacttcctcttttcctatttgaataccctttttttccttctcttgcctgattgccctggccagaacttccaatactatgttgaataggagtgatgagcgagggcatccttgtcttgtgccagttttcagagggaatgcttccagcttttgcccattcagtatgatattggctgtgggtttgtcataaacagctcttatttttttgagatatgttccatcaatacctggtttattgagagtttttagcatgaaggggtgttgaattttgttgaagcccttttctgcatctattgagataatcatgtgtttttttttcattggttctgtttatgtgatggattatgtttattgatttgcatatgttgaaccagccttgcatcccagggatgaagccgacttgattgtggtggataaactttttgatgtgcggctggattcagtttgccagtattttattgaggattttagcattgatgttcatcagggatattgacatgaaattttcctttttcgttgtgtctctgccaggttttggtatcagatgatgctggcctcataaaatgagttagggaggagtccctcttgttctattgaatggaatagtttcagaaggaatgataccagatcctctttgtacctctggtagaattcagttgtgaatccgcctggtcctgggctttttttggttggtaggctattaattactacctcaattttagaactcgtttttggtctactcagggattcgacttcttcctggtttagttttgggagggtgtatgtgtccaggaatttatccatttcttctagattttctagtttatttgcatagaagtgtttatagtattctctgatggtagtttgtatttctgtaggattggtggtaatatcccctttatcattttttgttgtttctgtttgattctctgttttcttctttattagtgtggctagtggtctcttttgttgatcttttcaaaaaaaaaaaaaccagctcctggatttgtttattttttttttgaagggtttttcatgtctctatctccttcagttctgttctgatcttaattatctcttgtcttctgctagcttttgaatttgtttgctcttacttctctagttcttttaattatgaagttagggtgtcaattttagatctttcctgctttctcctgtgggcatttagtgctataaattttcctctaaacactgctttaggtgtgtcccagcaattctggtatgttgtgtctttgttctcattggtttcaaagaacttatttatttctgccttaatttcattatttacccagtagtcattcaggaggccattgttcagtttccatgtagttgtgcagttttgagtgagtttcttaatcttgagttctaatttgatttcactgtggtctgagagactgttatgatttctgttcttttgcatttgctgaggagtgttttacttccaattacatggtcaattttagaataagtgtgatgaggtactgagaagaatgtatattctgctgatttggggtggaaagttctgtagatgtctgttaggtctgcttggtccagaactgagttcaagttctgaatatccttgttaattttctgtctcatgatctaatatttgacagtggagtgttaaagtctcccactattattgtgtgggagtctaagtctctttgtaggtctctaagaacttgctttatgaatctgtgtgctcctgtattgggtgcatatatattgatgatagttagctcttcttgttgcatgatcccttcaccattatgtaatgccattctttatgtttttttgatctttgttgatttaaagtctgttttatcagagactaggattgcaacccctactctcttttgctttccatttgcttggtaaatattctaccatccctttattttgagcctatatgtgtctttgcacatgaaatgggtctcctgaatacagcacactgatgggtcttgactcttcatccaatttgccagtctgtgtcttttaattgggtcatttagcccatttacatttaaggttaatattgttatgtgtgaatttgaccctttcattatgatgctagccaattattttgcccattaattgatgcagcttcttcatagtgttgatggtctttacaatttggcgtgtttttgcagtggctggtactggtttttcctttccatgtttagtgcttccttcgggagctcttgtaaggcaggcctggtggtgacaaaatctcagagcatttgcttctctgtaaaaaagtttcttcttcgcttatgaagcttagtttggctggatatgaaattctggtttgaaaattcttaaagaatgttgaatattggcccccactctctgctggcttgtagggtttctgcggaaagattcactgttagtctgatgggcttccctttgtgggtaacccaacctttctctctggctgcccttaacattttttccttcatttcaaccttggtgaatctgatgattatgtgtcttgaggttggtcttcctgaggagtatctctgtagtgttctctgtatttcctgaatttgaatgttagcctgtctttctaggttggggaagttctcctggataatatcctgaagagtgttttccaacttggttccattctcctcatcactttcagatacaccaatcaaatgtaggtttggtcttttcacttagtcccattatttcttggaggctttgttcatttcttttcattcttttttctctaatcttgtcctcatgctttatttcattaagttgattttcagtctctgatatcctttcttctgcttgatcgatttggctgttgatacttgtgtatgcttcatgaagttctcgtgctgtgtttgtcagctccattgggtcatttatgttcttctctaaactggttattttagtttgcaatttctgtagcctgttttcaaggttcttagcatccttgaattgggttagaacatgctcctttagctcagaggagtttgttattacccactttctgaagcttacttctgtcaattcatcagactcattctccatccagttttgttcccttgctggtgaggagttgtgatcctttggaggagaagaggcattctgatttttggaattttcaacctttttgtgctagtttttcctcatcttcatggatttatctacctttggtctttatgttggtgactttcagatggggtttctgtatggacgtacactagtacattttaacttatgatggcacatgatctttcattcatcaaaggaaagtaatactaagattccttttcttcagtttgagtttactggaggaagatgatgtaacacacacacacacacacacacacgcacacacacacacacaaatagtcctccaaaccacttaaatattaattagcattacttttacttagggcaatagtggtagattaaaatagcacacgttttgccaagcttacaaaattacttaaaactcatggcatggatattagaattgtttcacattagtacgaaggacctcctgggattattagaggaactgactttaaagaagtttcataaatttgcagctcattaattttaattttaaataggccttccacaaagtgttttagggaaaaaataacaagaaacaaaaatatatggatttgttttgtcttgaggcagactggaaatgctggaaatttattttggatcgtagaaaaacttcatgtggtgggaaaatgttcacttgctccaaggtcaggtattaagttagcaaagtcctaatgcttttgctacccattagtggatgatcaaatccatctctattgaattgtgcttttcttatattaagatgtaaaattcaaggctcagtatagcacctggtggctaaagctgcctccactgccccagtctggcctttcaagtgtggtcagagctagttatcctctgtgggcccagtaatcaataatgcttgaacaactagtgtggtggccaggacccagtccccccatatgtatcagctaccaattgccacaaaaaaggctgaataaaaaagtcaccccaaaactcgatgatatgaacagcaatcactgattcccatggattttcaggtcagctggcccaggctggactcagctggaccttggctgatttgtccatgcatctgggttcagcagagggtaggttctaggcttgggtgacaccattcagctctactccctgtgtctttcattttttctttggaaccagtggacaagcctgggcatattctcacagcataacagaggtacaagaaggcatgcagaaatgtgcaatgactcttaaggcctgggctcagaactggtgcacttttcctccagccttattctattggccacagcaagtcacatggccaaacccaaagtcaagggacaggaagttagtgagaggaattacaaagccacacagcaaagggcctgagtataaggaggaggtgaagacttgggacccataatgcaattgactatactatataaacagcaaggtagccctgtctcttatcctgatgccttgttgttatcagggctatttcagtctttattgcaatgccgtctctctggaattcagacatgagatctggagactgggtgagaagattttctgaacctcagaaacaatgcctttggaccgaagctctcagcctcttaggttgggttatttctcagaggacccctggcctctcaaaatagccttttggccgaatcctccattaaagaaaccttcgttgtacttttgggcccatagctgttctcacaggaaccatcagagaaatgttcattgatacttagataacaaacctgtggttcagttatatgggatttatccagacctttggatgttcactcttcagagccagggacaatgtgagggaagatacaatcagttaagtgctagtggaaaccagggtctgaatttggttggcaaaggcatagtggctccaagcagaggtaaactgctttggttatcattgagctctcttgattcattcttctctgggatggaatgtgccctcctttcttgttcaagccaggcaagtgctaggcactgggctgcagaagtgagcagtatgtgagccctgctctcctgctgtgagcagagcaagaggctgggagatagtggtaccacacagtgagtgctaggtgggttactccagggctctggagcagcttccaagaggtggtgttgagaggaatgaggactcacgcattccgagcagagggaaaatgtgagcagaagtatggagaacaggactcccatgaagatctgcaggtgtctggaatgaaggaggcagtcaggagaacacagtgagagacagggaaggagaaagggagagaaaccagattgtggaacacttatgagtctggacttcatcttgaagccagtgggagtacagccaagttgtagtgtaagtgcttttaacctaacaagaatacagccagggggccaggcgcagtggctgtgcctgtaatcccagcactttgggcggctgaggcagatggattgcttgagctcaggagtttgagactagcctgggcaacatgtcaaaactccgtctctaaaaaaacatacaaaaattagccaggcgtggcagcaagcgcctctagtcccagctactcgggaggctgaggtgggaggatcacttgagcctgggaagcagaggttgcaatgagctgagatggcaccactgcactccagcctgggtgaccgggggcaaaaaaataataataataatgcagctgggcacactccaggagccagggtggggaagggagaggagaacattgagatggtataggtcattttaccctctattcctctcagtgaaagtacgttccagcttgagttttgagtttgctcctctctccaaccataacagttcctgcttccctgccttgggtaggtctgtggggcagctgcccttcatctcagtgcaggagcagccttttcagggttggacttatgagagatgttgtgctgatttccaccatggtgcccccctcccagggcttcacaagggcaacttggacacaatttttgctttccgtgatgtctttagaacttagctctcctgttagccgtgaccttactcactgtacgaaaagtcgaagcaaaggggtcacagagaaagatttctctgatgactgtgtagacagttggtccatggtgttgtggctggaggcctctgaatacccaccagactgaggagcctttgtcttaagacagagggaaggacatctgggagtgattgtgtcacccagagtggccagagatcaagccataggaaatgctgtctgtgaccaggattcatggatgtttttattttcctctctggagagcatgaattctggcaggcctgtgatctcttaaaacaatcaactcttcaattagaagttcatgatctttaatgggcttgagtccagttccaaaacaggccattgtcaaaacgtccaggaacagggatgaaacttgtttaaaagtttctattaagcaggactgaaaattccatttgtaaaaggatgcaactatgttttgtctttttgaatactcacagtacctaagaaagcatcacatatgataaagaaaaagactatggcaagtgagctttaaaaaaattctttttttgatgcattccatcagaaatcagtggaacatttcattgctgtctggctagccaactccgataaaataaggacttttaagggagatggaaagacacagcaggatatctgtaaagccagaatcatctggtggcaacatataattgtcctatggttgtaaccttgatagtgctgttaccatgggggttgggtggtggggcgaagtgcatttcccaaaactgttggctagctgagggatgagagctccatccatgaaaaccagtcttccagaggaggatccccaaacccagagagctatttagagtttgaaacaaattgttctccttctcaaaagtggcagaatggttagaatcatcaactgcacagcctaggtcagaagtgaagtttgtcctgttttatgaagggaaagacacccttgtttagtgagcactgaccaagcactagataccccactgaatactccatatacataaaagcactgaagtatcttaccagctgcataaccttgagcaagttgcttaacatctctgcctgttttctcctctgtgaaatggggaaaataacagcagcaccttataaggttattttgcatattaattaattaatacatatccaagtgcttctaaaagtgcttagcatataaggaaacactcagtagtgaaaactagcattattatttcatttaatcctcaacaacactgagaataaatattcttatactctttttactgaggcggtgcagaggctcaggaaggccaggttacttgctcaaggctcatgttgtatgggaaagttaaagcttggaatgtctgattctacatcgcgctctcctcctgtacattggcttctgttgtctctgggttcagctatcagctggctctagaccagaggtactaaggctagagaccttgggtaaaaagtcttcctctctttgaaagccccaatccagagaggaggtagatgggcaaaaaatccaccagcaaagatagctgccatccctcccctccattctccccatgtgctgtctgacctggaggccttgttcaatagcttttcctcctggagacacaagcaatctgtcctgctgggtcagtggcagtccttgcattgagtcagcacattcttttttttttttttttttttttagacggagtttcgctcttgttgcccaggctggcaatggcacaatctcagctcaccataacctccacctcccgggctcaagcgattctcctgcctcagcctcccgagtagctggtgttacaggcatgcaccaccatgcctggctaattttctatttttagtaaagacagggtttctccatgttggtcaggctggtctcgagcttcccatcttggcctcccaaaatgttgggattacaggcatgaaccaccgcgcctggccgagtcagcacattctttatctatgtaggttgcattttctctccttggagagcctcagattcaatggtgagcttatggctggcatgccagcagtttcctaaaatgtaatatcatcactattattgttattatatgagggaaggtgaataggaactcatcagaaacctggaaaatgttgtcagaacattagccgtgtaatttttttccccttcattgtctgcaccagctctgaagaaaaaatgcagaagtttgttgatttggagtagctggcttttttttttttttttttagatggagttttgctcttgtcacccaggctggagtagagtggtgtgatctcagctcgctgcaaccttctccgcctgggttcaagcgattctcctgcctcagcctcccgagtagctgggattacaggtacccaccatcatgcccagctaatttttgtatttttttagtagagatggggtttcaccatgttgtccaggctagtctcgaactcctgacctcaggtgatccacccaccttggcctcccaaagtgctgggattacaggtgtgagccactgtgcctggcctagctggctttaatggttgctgtttctggaatctctggctataggaatggatttctcaatggtatattcttgaaagaaaggcaaaatgctcaaccaaatggaactttttgaataagagttgacagattgctcatccttgccctcctcagaacaagtgtttgccgtttctctgatgtgggccttctttttttttccgaaaaagtctcactttgttgcccaggctggagtacagtggcgctatcttggctcactacaatttccacctcccaggttccagtgattctcctgcctcactcagcctcctgagtagctgggattataggcgcccaccaccatgcccagctaatttttatattttttagtagagatggggtttcaccatattggccaggcgggtctcgaaatcctgatctcaagcaatccacctgccttggcctcccaaagtgctgggattacaggcgtgagccaccgtgcccagcctgatgtgggctttctaggagggggcagcagatgcctctcctcacatcccagccacgcatcaaggatgaatggacatgtgggtgtcttccgtgggagttacctggcggagggtgggatttaggccccagggaaggtgaggagcagtgtaagggacagtcacactctgggaaagacatcgaagggtgacatgcccttccagagagcccagcttctgttcacctgatgagaggtgacacaatgctacggtgttcattcgtttgacaaatgtggatggagcacttgctatgggtatgccagacctggtggaaatagacacataatgctgcatcacaatgctcccagtctagaaggggagacacacatgaaaacaggtatcactaactatagtcatgatcacgatgggaatatgagggagttccccggaagcacaagggaggcagcactctacatggtctgaggttgagttctcctagaagcagaccatgagacaaggatttgagtgcaaataattgagtgagcagtgcaggaaatgaagaagtaaggaagtacacagggaagcctgcggtgaggatgtgccatagcacttgtatatcagttacttactgctgtaacaaatcaccccagaactccatgacttaaaccagccaccatttgtttagctcctgattctgtggccagctgttgaggctaggctcagctgtttgggtcttctggtctcatttgggccccctcttgcatctgcaggcaacctcgggttggttgggtgcctggctgttggtttgtggttcgctggcgttcctccgcatggtctctcctcctccagcaggctagcccaggattactcttacagtgtggccagggcccaaaatggagagcagcagtgcactagacctcatgaggcctagttccagagcaaatatattctcacttttgctacattctgttgatcaaagcaaatgtcacagggtcgcatggaaataaactctgcttcctgatgggaggagctgcaaagtcacatggcaaagggtgtgatccagagaggctgtcaatcagtgcatcatcccctgctcccacagtggatgattggcactttgtcctgcagggaaacgtacctcttggaatgactatatctgagaagtgaaggagctggagtgtttgtaccccaattcctgagattcactggttgagggctactctgggttaggtgggtggggacagttagctccctggcacttgcatccttgtctagctatgggaaaaggcccttagatacaaaaatgcagacactggcagctgaaagtcagcaaaagcattggggtcagggtggggagtgtgggaggggatggcagggacatggatgatatctcctgtacccgctttcttaaagactctcagttgatgaatttattctgaaattccaacaggagtatcatatcaccttttgacatggaggcttcttcccattagcttcctaggaatactttcatttcatgttttgccaaacacccaacattctccagtactatgataactattctctattgcattcgtctggacccttttttccccttcactagcaagcataacaatatattattgcacacatgcagaagggcatttggctttacagcaaacctatgaaccatgtatagggctccaagttttgttcccattcgctgaggacagcagcaaaggcagataagggatgtgtccacagcacgtccacaggcagagaggataagatccctgagccctgcatcatcctgggagtgacgtgggccaagcctagccatgcagcagaactctgtgtttcttaggagccctggctccagcgcagctcaggcgtaagcacaacccatgactctgggatgcccctcaattgtcttacaaagtaactcaggcattgatgtggggtagagacaagcccagcacacaagttcttccaggttgggggattttatgtgtgtacttggagccagagcatttctggtgcagaataggaagctgacagacagggattagagtcacttatctgaggtcaaaaaaattaaatagcagaggcaggagaaacacctggtgggaggctccaaagcctgatattctagcaatttgacccatgggccctcactttaaataaccattgcagcttggggaacctggcctgtctttaggtggaaacaagttttggaaattcctcctattgcagaaagcatttgatttgcagtttcctgaatgcgaggctccaagtgtagggaccgccacccaaggacgtttttctctgttgggcagactcaaagcactgaggggagcttttcagggcccaccatacatgagcaacagatagctctccctacagataccatatttcagggacagccccttccctcctgagcagacactggctgagattttccagcttcgactttctagatggtgagaggatggggatgctcagagggacagtgaaggcactgaggcagtaactgtggcaaccatagaagaggctggccacgtgctcatagcggccttcctcctgagacacccgggaaggctgagtctacctcacaggtgtgcctgataaaatttttttgggcagtgttttccttggcttccaaacatagccatccattggaggttttatgtggaagcatctttccagcaggcacaatgacatggctatttcccttgtgactggacgcaaggaaaggatctatgaagagaatgtagccccgaatccctcccttctctcaacttggagcagacagggagccatgtgtggtttccttgctaagatttttgcagtttattctgtgtggctgtgtgtgttggtcccttgccaataatcctagactcacccatcccggcacaggcttgttactgtgggccaagccaaattctgaagcagcgcagttgtttgttgtctgaactcagtcttccccaacacatacttttcttgttgtcctgcacacaccctctcatcagcacccctcccaagtttgttctgagccacctgatataacctcaggtgaacaagaaggctgccctgtggctcttcacggatgaaaagccaaaggcagctgtggcttcgctttgtccccagtagtcactggccacggtgagacctgggtttaacatgacctgcccataaatcagtttgctgcaattgcagtgagagggaaggtaccttgtagaaaacctctagattttatgagcttgtttccctgactgcattccagagccacgtgtgagacttgggtttaacgtgacctgtccgtaaatcattttgctgaaattgcagtgagagggaaggtaccaggtagagaacctctagattttatgagcttgcttccctgactccattccaggtgatcttgatccaaaaatgacgaggctgggtggttgccattggtgtcacacccacatcccttgctgtgcaggtgcactgctcccagctgctgtgctggctgctagctgctcacagtggcccgtcctttggtctggaaagtcacccttgccctgcctgggagggtgacttgttagccaatggctggctgatttggggtgtggattaactccctggtgcagtttatgctgcacagctccccttggtgtctggttgaggctagattccccctgtgcccacagccttggtccactcctgccctgtccctgccccagcctggttccctggctcgccaacagatccctggatctctgccacaagctctggcttccagggaagggagcctatcctgagatgcggtagaacctcatgttttatttatctgctcttagatctcctgtccgggcaggctgattgctttttaggattccaagtttcaaaaggaaatcaaatccaatgtatttatcagacattagtgggagagaaaaaaaaacagttgctcattggctttttatttgccctcttggaattgcagaggattttgttatttttatatttaaaaaccagacttgtggagtaatgtgtgggagaccccttcaggctggtccaggggactttgtgtctttagagattgctctggacacctcttccactgaggctttgtttttaaagaggactttccagacccaagggaatggaagggggctcccttgagagaaatggctttcatacaaaatgtccttactggtggggaactgaagacaggtacagtccttactgcataaggggacagatgatgttcagttacagtcataagcctttctcaccaggagcactggactctcctttaagaaagttttctgtgataatgagatttgaactggaagaaatgctgttctttcagttaacagttgtgttttttccaagaaaaaaaagaaatacaaatgttaaaacttttttttttttttctggtgctaaagaacaatttcacctcctaagccaagaaggaaaaaattctcatctaaaccgccaggcttaaaggtggctccttgtcagtcctgaggtggtagaattgaggtgaatgaagtcaaccacagtttctaatgtcttcttatatgccttcagaaacaccatgctcacctttcctcctgctgtcctaggctgagcctgccatccctccttccctctgtccatcacagcctccccttagggtcattaactcagtccctaccactcaccttcccataggacaggtgttcttaacctggagtctatgtcctcttgctgatctgtgaacccggataaggaaatgattgcattttgttttcactaacttcacactgaaatttaacatcatattcaattatgaatgtaggaaacagactacagtaatattaccaggacctgtgactctgtcccaaatagaaatcacaggtattgtcaaatcaagttagagttattgcagatatttcaaactaccatttacattcatccctccttcagagttatagcattagatttacctccagatctttttatttaatatgttttttttaaagcatattgctaaactacacatttgtgctctcccctttcccatagggctacctcacctcccaggagaaaagattcaaaatctaggagattcataatttcaatatattccattgcttgtgactatttatggccgtatttggttcctgagctagaaacagaaaagttatggccatgacagaattacttgtcaagggactatgatggccctgctaacctgggctttcttgagctgtctgccccgctagctttgatgaaatgcacatacactgcttgcattttctgtgcaatggccaagtgtaacaggcagcacacatgtggcagatcgtagcagcgggcccttgccgggtcaagtcatacatcgctgcacaccggggctgtcttaggacattggacctccgagcagcctgcagatcttgggaattcctctgccccctaaagtattctttgtctttaatccagttgttacagtgagtgaacctgatttgttccagatgtcctaagatttagtgattccggaaactactcctaaagtcaaggctgatgaggatttgaattcctctgttagctgggaaccagcagttcttttcacagttaaacagatgaggcaggaggagggagactgagctgccttgagggacagggaggggcccactgactggcttatttgccttgttagaaagaggatggcctttgaagcaaatatcgattctaccactacatggctggggccaaagtcagctgggcagggacatggacgtgctattttttttaaagtaatacatatttaccttaattatctgaatgttgttgctagggaaaccactattttggctcagatcatcttagtaaatgcttttttctctcactttttgagcataaaactggcccaggtgggtacctatgagggaggtggaggtatttctggcttcctataagtgagtttttcaaaccagaaattcagtcccaggaatgatttccctgacccactgtaaattttaattgaggtgcgttacaggggtgcactatgatctctctctggagttaataaccatatggatctgttttgcctgattagaagggatttctaaagcatgatgagatggggaagcacaattcaaactacatggcatagtaactcactcccagaggaagttaaaacatgtatacatacatatagaatgttctgtttaatattattggtttatgcagtatttgaatatataaatatgaatataaagccacgtacagttatggatttaaaacaaaagcagaacttaattaatgttgctgtttggatttttttcaagtgtatttgaatgcagacaagtatccagatagatgctagtggaagtctgggacaagctgtataagggtatcaacccagggttcagctggagctgggccagactactaggttgtgtatttagagaaactagggcaggactgctggagaagaagctgagtggtgccaaggtagggcagtgatatggtttggctgtgtccccacctaaatctcgtcttgaattgtagctcccgtaattcccacatgttgtggcaggaacccggtgggaggtaaataaatcatgggggcgggtctttcctgtgttgttcttgtaatagtgaataagtctcacgagatctgatggttttataaaggggagttcccctgcacacactctcttgcctgccaccatgtaagacgtgactttgcttctcattcaccttccgccatggttgtgaggcctccccagccatgtggaactgtgagtcaattaaacctctttcctttataaattacccagtctcaagtatatctttattagcagtatgagaacaggctaatacaggcgggataggcacacctgagaaggaggacagggtcagataaggtggtaagctttgaacagaagaaagcgtatcataggggatgttgagcttgttgggatgaggagcatccaatgggctagagcaggtggtttagggctgaggctgtaaaccacaggggattacctatgtttatctggggcaagttgcaggataaccacaggacaagactagtagttggacagaaataccaatttttattattctagaatagattaaaatataaaataaaattagattttctctaatatatttagaattgaacctttttgggtacaatattcttttttagtatttcttggtgatttttttttttacaacaaaaaatagagcaatacctttcttggttagtaaaataaatccctaaatatttgccacaatctctagaatcttctaaatcaggaaattttaatgattttcacagcagtgaaaattgatattcatattctaaataattccatgtttcactgaaatctgcaggaatcgaaaacaataggcagtcactaactaaaatgggacagcaagacagaaacagtttcctatccctgtaggaaagagaaatctcggagctttcattgcatgaaaaccgactccattttagtacctcgttgcactttaggctttccttgtccagagttctcacacatgacagtgagctccaactacaacctattccaagctgagagtaatggactgagaatctgaaaacatgacacatcaatccattccccacctttcccctgtgagactcaaaaaaacatttcccaggctcccttgcagataagcttcttgggaagttcagccagtggcatcactggtgtgagattggagaaagggaggaggagaaaagtcagggtgtttctcctcaactccactcactttaagcagcatctctggcagtagctacttctcctccaccgtcttagctccctcttggcagtcccagtcccagtcacaatcacaacacctcctccctcagtccctccaactctaagggtgtcagcagttgcttctgatctcagcttttccttatcttaccttgtttgctcttctggttcttttcacacctttgtacctggttccccattttaatcccttctatgaactacctggcatgggttctgctttcctctctggactctgactaatacatagtgggtttgaatcctggtactgccactagttactaaataagttattaagttgtctaccttatttagtcctcaatgtctttgcaaaatggggaggaggttggtctgtaatgaattctgagatcccttgaagctttgaaaatccgtgagtctctaaattttgatctcataatacatattcatgaaatgagtgtatttttctagctccattacagagatagtttttattatttgctttctaggacatggccttagccttcataatactgtttgtttacagatttcatgaaggcatttaccctggcattgtaccactaaaggctgatgttggcggcattattcttaggagacatagaaatgttgtggttttgagaatgggcttttatattatttggcgtagattattaaagaacagttacctgtgtcatgaaggagaggcccccagactggcactttgaatgcaaattcttctgtgacaaatccaggggactttggaataactctcagatatggcagtagacttaactgtaaaagctcccagcccacagaggtgagcagaggctgaggagtaaacaccataccaacattctgggacaaaatagcctgaatgctgttgtaccttggaaatgcaatagcagctgccttcctaggtggggaagctgagagcagcctcttacaggagtgcatgccctatagacagaggctcatgaacttgtgcttgctgacatgtatatcttcttcagttggtccctagtgagtctacccaaagtgaattgcactggggaaattcagaaatatacacccctcagattcaacaagggtggtatcttgtgtgtttcctttaagttataccagtttatggcaggggcaatgttcaaaatagttaagaacctgcacagcatgagcacacctacctttaagaacagttgccagtcatagagaactggtacagctcccctggtgcaacccactgatggtcagtctggggccaggggtgtctttggtcacccacacccacatttggctggactgtgaggcctgggacttgaaccacatcagtagaaattgaggctatggcacctgggatgtctccttgtgacagttacgcaagaaggaaagtgaacagaatgtggatcccaagggttgggtagggtttgtccagagccttgggtcctttccagaaggagcttgggcccctgtaattcagagatattcagattaactgatctggtctcctgccagtgacaggcctcactcactggaccattctcctattcagaaagctgacataggatcctgtagcaggaatgatcagtgctggctgcatcccttttatatttatgtgctatgctggtatgcagctactagtaactatatctctttgccttttctgcctaccaagtatcttgccagaggtactgggagtagatgtgcagccccccgcctttgcagtagccctcaaccaatgactgactagagtggacacgtaaatattccctcatcccacaaatgggataactctgttctgctcatgtgttgcacagtttcccagagctccccagcaagattaagttccaggtgctcagggagctgactggcttgatgttgctgcctttgctggttgcctgtccttctgtgtctcactctaccccttccctactggtgttttatggaaccacctctggaataaacaacttgctttcaaacctgtctccagctctgcatctgggggcgcctgcactgacattctttattccctagatctgtgtggcttgctacttttttctcccaccacatcacaggtaatgaatgaggctcatttgcacaacatacaactttggacatcagattttggtgaaactcaaaattacttggtgagaaagaaaagcacacatatgttacgctttttttttcagcatttcacaatattcactaaagcattttataagcaagtgagttgtaggagctaaatatgatcaatttttaaaaactactttttttttttttttttttgagatggaatcttgctcttttgccagactggagtgcagtggtgtgatctcggctcactgcaatttctgcctcccgggttccagccattctcctgcctcagcctcctaagtagctgggactacaggtgtgcaccaccacacccagctgatttttgtatttttagtagagacagggtttcaccatgttggccaggatggtctcaatctcttgatctcatgatccacccgccttggcctcccaaagtgctgggattacaggcatgagtcatcacgcccggcccaaaactatttactttcatttttacccaaatttatttcccctggacgtctacttcacaagcagtaacataagcaagtatgtatcattaaagatttatcacaaatcaaccatattatatcgtaagtaaagtaaaactggtgaaacaaatttaatgcagtatatcccaaaagtaattatttgagcatgtaatcaatattaaaacaactgtggagatttttacatctttgagtatctgctgtctttgaaaactcatgtgtatgttaaacttaattcagaccagccacattttaagcgctcaaatgccacatgttatctgtagcaaccatatggggcagctctggtctagcacatgaacttcagagttgtcccactcaataggcaagggagctggggtaattatacagcagttcccatcagtcattgagggttgctgcagagcatgtcagaggcttaattcttaggcactttcctggcctgcagaaaaaagccctctgacaaagagatggggatactgactagatagaactgcagtctgtgcaggttacacagtgataagaccccaggtggaaccacttatagctgactacattttttaatatcttcactttggtgttttattattgtcaaattacttgcaataatgtatcttaagttggtcactcaagaaaacttggttaaattcatgggcctagaagatcaacatcaaatctttgtcttcaagacctaagggaatctggatgtgccctacacatatctacttgcctctcgctaatctttctgctaagagtgtccttctcctgcccctttccatgttatttctgcccaccttcatcctctgatcatgtttatttttctctctggctggaatgtactccctgtttttctgcccatcaataggcagagcattttacaagcaagtgagttttaggatcattctttcagatgtggctcaattgctacctgtctctggaagcttcatgtaataacttcagtcaacagtgatatcttttccctgagtttctcttgccccttgatcttcacctgttcctttggcaggtcttatcaacttcatggtttatttcctgggtaattcatttaccagcatgcattcaggaggtgcctgacagtcctcacttattccctgtagcttaattaacaccgtctcttaattcttcatgttataatcaatttatttggtattttttgctcatatctctcatagaaagacaacagatgagcaattttggttttatggtttactcatgtttgtaattttaaactctgaaaattgaaaagctttgatagttgtcaacaaagtacccagaaagaaggttgcccatgagagtggctaaagacatctagagtcatctcaaatgcctccacaaatttcaaagaaaattgtcaagagaaaagttaagcacctcagtagcatttgtaaagagatgacaccttatgttctaaatattctcccagtattctaaaatattctaaatgctaaggaaataaacacaattttatttataatcttatagccaagtatgtttcatatacattgatactatttagttgcatttttatatgctttaggagcaatgggaaaggcaaaggagcactgactggaccaggggttagagctctgcccttgtctgctgagtggccttggggaagtcatttaactgtctgcctttatctgcaaaatggtgacccaaatgggcccccttccagctgtcaaattccatgtctgattttatgatgtctgccctttttaagaatgggaagcattgtttgtgatttcacattgcaggggctatttacatgtatgatttgcatcattgattttatgatacattgttgagagtatctgtgatttttttggaagctgaatccttactgagggcatgctgcccctagttatgatattgctcctaggaagaataaaatctgcttcacaatgtcctttttggtatgatttccatgattgagaaaactggggattgtatgtgtagtacatctggtttatccacttgtctgtccatggacactttgggttgtgtctacccttggctactgtgaatagtgctgctatgaacatgggggaacaaatgtctctttgagttcctgctttcagttcactgggtaataaacccaaaagtataatttttgggttatatgacaattctatgtttaattattttgagaaatgttcatattgttttccaagcagccactcgattttacgttcctaccaacagtgcacaagggtttcaatttctccacattcttgacaattcttgtcttctgtttttttgatagttgccatcctaatagtcatgaagtgggaaaaaatagtttttaaaaagtaacagatggataaacaactaagagaaagaaggaaggagtgaaggatggacggatggacagacttggctgccctatactattatcctagtcatcattgttaaatatagttgtggttggtagatacaataccgataataataatgatggtgtaatgagaatttttttaatgcaaatatagttggatgcatttgattaacacttgtgctagcctttactcaggctagatttatgatggcagcaaaagaaaaggtcatggtttttatgtctaagacttaaggaaaatctaagtgatccaacagaatattattaagcaccatccaaaaaattatctggatagaagaggaaatttttgctttagttgccttagtgattcagcatatgtggttgatatggaaatgtattgcatttacccaacaaggaactttgaatggtaatcctaatgtacagtgatgaatgaggacagaaaacaagttctacagagattttctggcttgacacagctgccaagatgtcatcagtaacatcttccattgagtatagtgaatgaattggtgctaaacttaagtacaaacccaataacgcagtcaaaaaaaagccagctgctataagatatacttgggtaggatttttaataacaaatgagcaatatattttcagcaggctatatatatgctgtaagataagctttatagaagcagtacactttgtatcttatgttgactactaataatgattttcatttaaaagcacagcaaagagatccatgtacaaagtaatataacccacttaaaagactgcacaagcaaattaaaataaatggggaaatttctcagggaataaaatttcttgaagattagaaacactgttcctcaataaataagcacccctggaatgtttagcacaaaaactctatgcttgatcgttttactatttcagcaggactgtcagagaggttggtctttgtggagtcctgttcctttcaggtgtttgtaaactttcttgccaaagcccttcccgactgagatggagttgatattagagccatggctgggacaaccttcatgccaaaggaggtgtgctgctagttgcaactcagaccctgcatggcccgggtgacctcagttgggtgggttcccctttctggggctcaacttcttcatctgtaaaatgtgaagggggagctgatgatctgttgtggggatgtcatggatgttcattcattcaagtgttcactgaacacctgctaggagagaccaacctctctgacagtcctgctgaaagatgaaaacaatcaggcacggggtttttatgctgaacattccacggtgcttagttatttattgaagaagaatctttctgatattcaaggaattttattccctgagaaattatgtgccaggcactactctgtcactaggagttcaacgataagcaaagccagagaagggtcctacccctgatgtttagattctagtaggggatagacagtcctcaaccaaaaagccccacaaacaaatgcataaccacaacttcgataagtgccatgaagggttgatggggcacatggggggtggggggctcataatgggaggatttatttcacctaggcagggagatcaggaaggatcccctggggacatgatagtcagggggctggagaatgtgggttatgttggagaggaatgagttttgaagggataggagttgctgggttctcataccagcacagcgtcttctctctcttcatctcaatttcctcatctctctaatatgggcctaatatcaagaccctttctcagtgttgtgaggtttcagaaggatgacatatttgacaacacccaatatcatgctggcacatcacattttcatttcatttctaaaaataactttggaagcagagatatgctgttttagtcaaagacttttttagctttggagaaagaatgaaaccccagctttgagactcctctaaaaaaaatctgagttcacattctgccctggaagttgcctggctgcttcccttaatcacagagccttgtttgaatcacttgactttgaaatcccaggaatgactttgctgtgtgattaagtgacagaggcccaaggtttggggattggcagaagtttagatgtccctggcctgatcccttaccctttacatataaggaaaggaagctgatcacatgaacaactaaactggaatgaggaggcagcccctcctccatggtcctgggctcatctatactgtctccctgccaaatattccatggaaaccttggacactgtctgatgtcaggactacttatgaatgcctgtccacttccttctcaagataaagctaggttagcactctctcataactcaagcctgaggtttattcttttaatcttccaaaagcaaacagaagaacagaaataacctatccactgtttaagattaaaatggccaacaataataaataattgccacaatagcttgagatcagggtcttaatttattggaggccgttcaagaatttgcagctcttaagttaatttttcacatcttgtttggatcctcagagcccgtgcttccaaagcaaggccatcatatttctcattgcacatgttattcttgttgatgtgccagacatgcaggagagtgaggtcctctcttcacagatgggtaatgaggattccacccccccagaaattagtatttcaaagtatttttgcctatggagattttgaagagttctcttcttttgcatggtgtattagctgtattaatggttgcaaacaagaaaaacgtatgctggttaatttaagcagaaaaggaatttattaaaaggatgtggggtggttcagagcatagacaagaaggctggggaaccaacacaggcaggaaacagaggaggcaagtcttagtccagggttccacctctgggccctttactcctctgtagctacttcagatgatccctggtgtctctgtgcaaccctcaaaatttgtagccctgggtgggagcatctgttctcacatcgctgccacttgatcacccttagatcacatgatttcacttaggcaagtgcccacaccctagtgatcaagaagaggggaaagagagggtctgccccctttctgctgatgtgccgccccacctatcttgagattcccccaaaacacgaggatgtcaggatgctgagtggccaaaaataacaaccgttcattatacaaacccttatatccttaattacgtcttccattaactggttatccgattaaaactggccactcacatggatttattttgttcaaaggtcgcatcacacaataatcatcagtctctcatgcatcttcatccttgtcatcttcagcctcagccttatcaccgttctcatcctagccccgttcactcacccctgtcctgggcccccatttccctccatctcctcacctctcaaacgttcacctctttctcctccaactcccagtctttcaccctacttctatttcactacaaaatagaagcaatcacagaggaattcccgcatgttcctaccacccatctactaatgcatcttcagctcacctccagccaggcgagaacagtcattcatcagaccccagcaattgttgcctgtcgtgttttcattaattgttgcctctctaatggatcattcccattagcttgcaaatatgctatgataattcccatcttaataaaaaagagcaaaaaaactccctggagcccacttcccccaccagctaccatccaatttctctgttctcctttagagaaaaactcctccaaatagttgtctgtcctcattgcttccatttgttctcctcctacatctctgaaactctctccagttaggctttcctcccatcgtgccacttcagcagttcttatcaaggtcaccagtgacctccagaaggctgattccaatggccagttctaattattcccattgttctggcctgtctgccatattggacaaaattgatccttcctttcttgagactgtcctctgtgaccatgtggatgactcctctctcgattttcctcttccttctctagccatgcttttccagtcttgttggctgacacctcctcatcttcaactcctaaatgtgagtcctcatttctatctatactcatttcctagtgatcgtttctagtctgtcccaaatgtatcctagcccagacccctccttcaactccagactcatgcatccacctgcctcaaaatctcctttaaaacccaataggcatttggattttctctgctgaaccttctcaacccagtctttcccatctcaataaatgacaacttttctcttctagttattgaatccaaaatccttgaagcagtccttgactcctcttttcctaacacccttcatccagtccatgagaaaaatctgttggcatgacctttgaaatgtgtccagaatatgaccccttctcaccccctcagctgccatcaccctggccttcacgttcatcttctcacacctggattgtcacaagagcctcctactcaggccccctgttcctctcctggccactccacagaccgttcacatcatagccaatgcgagcctcctttaaacactaacgtcaagtcacgctgctcctctgctcagagccctgaaggggcttccgagggtcaaaccaaggtccctgtgctggccctcaaggccctgtgggatctgctgccccaactccctcagtccctctgagctcaatccttcctgctctctttatcactcctctccagctgcactgacctccttgctgttacctgcacatgccaggcacacgcccacctcaggacttctcctttgctagtccccacataccgtgtttcttgctccccttctttcttcgggtttgtactgagaagtcacctcatcagtgagacttccctgatcaccttattgtaaattgcaccccacctcccttgtaagtctggcatgttctatcttccttaccctttgtaagttttctccacagttcttaccacaatctgacagacatatttgcttctttctatgtgtgttttctctctccctgaagctaccaggactctgttttctttgctgctacttccctagcacggagtagtggctggcacatggtaggcactcagaaataaccgcatgaattcatgtacaaatgaatcccacgcttaggttgttaagtgccttatagtttttgaagtttgatgtacaagatttcatgtgagcctctaaacagtctagtgagttaggcaaggtagaaccctgtgctttacatgaggaagctgaggccctagagctaactgattgcccaaggacacatggctagttaatggggctcctggaacttgtagttctgatctcggtttctgccccccaccttcaactaccccctgtgcctcatgttatattagtgtaggcctcagggcattcattgctgtctatttttcgttacagtatggatgagaaaaccctgtatctagctttgggggctgtgaagaacatctccctaaacatctctatctccaacctcggagatgatgcctatgatgccaacgtgtccttcaatgtttcccgggagctcttcttcatcaacatgtggcagaaggtaaggagggcatccctgtaaaaagagcagttgttccatctggtgcgcttgctgactttcattattgcctggaataggcaatgattctacaagcactaatcctttctgtggactatcatttagaatgattagaacttttttcttcctgggcttagaaaacatgttggtatagccaaagaagcagccgtaaatgcccacagagtgccagagaagtgtctgtatttatgtagtctcccatcccttctctcttgtggaatcctctccctatggttttacatctggccccttcttggagatgatacagttgctgtctccagcacacacatgttctagagaattccagttttaggtcagtagttgtgaaagtaagggcagatcactgcttgtcgtgttagttattatgtatgatgtacttgatgtttctagtagagggtcactgctttggcctgtgctttggattatttatttatttattttttgagacaagtctcgctctgtcacccaggctggagtgcagtgccacaatctcggctcactgcaacctccacctcctgagttcaagtgatcctcccacctcatcctcccgagtagctgggactacaggtgtgcacctggctaatttttgtattttttggtagagacagggttttgccatgttggccaggctggtctggaaatcctgacctcaagtgatccgcctgcctcagcctcccaaagtgctgggattacaggtgtgacccaccgcccctggccttcctaacatatttgagtgaattgaggtagttaaattatttccacaaattgagtgagtttttttagagtaaattaatttgaatgaagtgaagtttatatagcatgactcaaaggtacagtgctggtattctcccctacccataatcatcccgagtgtaccacctctcagaggaagtgaacaggcttccctgcagacaacaagggggaacaagtggacaaaagtcgactctgctctacccagtgttgctctaactgctgatagctgttcagctgggactgcttgcagctttttaatatttacagcattgaacggggttgccttgttctttatgttaaaatggaaccaaaatcactttctgtggaaaaccttcactctgcccaccgatgagcactgggcatacattgagcaggtcaacggcgtttgttcaggcacatattctgtggcctcaatagtgttgacaggtttgtgccaagcctgcccagcttaggggacagctgaaatgctcagagccaccaacagtagaggcactccaaaactttccaagaagtcatctcagattccctgctgcttcatagcttttaggagctccagggttgagggaggccacaaaagcaatcaaggactgcaggaggggtgtgctttccatccactttctatattctaaaaattaccgctggattaagcccagtcaagagagaaccaagtatctgtatggttcaagtatcgctggccacacacacagtatcttttacagaatcgcatgtgctgtgatgccatctccctgtgcagggtgggttggtaggtgggggaaaggggcttccttggggatttgatctgtggaactcatctctgtggtaactgaaaagatgtaattggcaactggctcattacattacacagatttctctcactcaggacccatgcgagaaatttccttccagcctcatttaagctatttccagacttagaaatagctgtccctttgcctgagaattttggcttgtttttaccttgtgactgactaggcttcattctctttattggctgctagaaagctcagagctgaccccactctgtcagtatataggacttagtcttactattttataaactcactagcctcctgtatcttgctttgctccccctttaccatgcttttctttttagcttggagattgcataatattctaccatatggatatactgtggatttaccttaaaaattcctcttattctgtatttaggttattcccagtttctatattaagtaaaattgtgagaaatgtcttttatggagattagtaccagtaaatgatcatatccttagctctataacttttcagagggtgtgaagtcacatttttgaccacctactatacaccagggactttttgcatctcgtccgcatcccctcttcactgcatgaggcacaatgtgtgtgaattattggaggagcactctcaggagaagaggggcgagggagcagggaggggcaggggatgggctgggagggatgtgctgtcgggtcaaagctagccttggtctgatttatgggctgggaagaggtggggaagccctggagcataaatcactctgcagaattgtccccccttgaagctgctggggacagcatcattttctacccctgtatcgtcattggccactggagggacgcaggcgtggtgagtagcctcccaagcatgctggacaaggaggctctaggaagtcaaagacaatgtgcctgggaaggccacaggtacaagccattggccactgtagctggccatgggaaaaatgggagcacatcattttgatctctttgccattgaattccagcaacctttgaaacctttgtcacaaggaaccctaggtttcagttcgacagaaacttgacaaagcatcaggctcttcgggacgtggtgagtgttagctccagagtggtgatggagcagggaggtatcttgtagctgctgtggaggcagggccagccagaaacgcagatgggcaagacgaccctcagggtggcaggaaaaggaagggaaaagaaacagaaactacccttccaggactccagccacgctgcaaggttgataaacagcggatgtaaatggcatcacccagcaccgggtaggattctgacaggacccagtggctagtgaggggcaccaggagagcccccccaacctgcttaacaacccacaggcctaacaggaccaacatgggcctgtgaaatattctaatgggtaaactaagaaaagcatgactaagatacagagggaaagcataagttttaaaaagattattaatagaaaacaaaagtaaattttacagagcatctactttttgatgaaagtcaaaaaaaatgaacaaagtggaagatcagacagtagaacaatagactgtatgaaaatggaatggactgggaggcaagcaaaaataaatgttatggatgggataaagaaatgttacaatgaaaccaggaaatcagtggcagaattaaaatatgttatagtcaggaaagagcagaatcagcagaacagaaaattgatttaatgatgcggaggtgtttttgagaggctctgagaattcagagaaaaagaacaaagcaataaaaaaggatgacatgaggactatattgtggaaggtagaaactggaaaacagcaaagagaaaatggttccagaataattggaacagaagccattccttagacagcaaaggaggatctccatttcctgaaatgggtgcagcagacaccaggcaaaaatatttaaaacattttaatgtctacaaatagcttcatgaaatttttaattttaaggatatgaaaatgatactattaacacttagcagaaaacaaagaaaccagtttctacagacttttctgtaacattaatgtccaaaattagaacagtatattccattgtgaattttaaattcaacacacagccaacttgccctccattgtgacgtcaaaataaagatatactcagatatatgagaattcataggctattacctcttccagtttggatttccccaaaagcataccctgatacaatgatacaggtacaggtagtttatttgggggtgggcgatctcagtgttgagtttagacaggaaagagaggaaagacaggaaggcgtgcatttataagcaggttactgccgtaggcaccttgggcttgtcttcctcagaccctccaagagactgtgtgtaacaaacctcacatccacttcactccaggatgaggaagctgctggaggaccgatcccccagctcctgtcattcatcatggagaaccattccctgggcatgaactctctggcacttccagccttctctaagtaggtccacactgcctggggccaggaagcaactcaggcagaaagatgtgggaagcctttgacctggaggggcatggcttcaggtgaccagaactgtggctggttctggggaatgtgagcgaggtgctggccacatctgctatagtaaccatgagagcttcctgaaaagtagttatttactgataaactactcaagaatacaaaagtagttgaataaaaagtgtgccacagccaaataagcatagaatgaagcaaaacaatttttataaatatttacaatagtaagcaaatgtaaaaaaaagtattgccatggtaaatgcataatttaaaagattaataaaaataatcccataatctcagttataccaataacaatttgagaagaaagttgacattgtgactcctctgcttcactttcttcaggaaggagttcagactcctcagctcctcatgagaggccgtcctgagcctggtcctgcctgcctgcctttctccccagacccctggctcaccatgcccccacatactcacttgaatcagtcgccacttaataccaaagctgcctttacccaggaatcacccccaccccccatttttgtttaatgaactactatgtccttaaatctcagcttagggagcccgtgtgcaggctcctcacctggctgcacaggatctgtccacagaatagatggatggatggatggatgggtgggtgggtggctgaatggttagataggtaggtaggtagatgactggctgggtgactgggtggatgagtgggtggatagttatgtggataggtgagtggggatggctggctgggtggatgagtgggtatgtgggtggatgggcaggtgagtggatgactggctgggtggatgggtgtgtgagtggatggctggctgggtggatgagtggatgggtgagtggatggctggctgggtggatgggtgggcgggtaggtggatggatgattattcattttgtgcaaagttacagagactcaaggcccaggcctccaaggttacctatcttctctgtcatcacacagtccattagttatgtattagcttctaagactgaatacaaaatatcccctgcaatggatttttctgtcttctaatgcaaaactactttcatagatttattctggattattttttcctttgagggaaggctgcttataaaaacatggggtacacatggatgaccatctgctggcttttttctctcctaaataaagctaacttgaaaacacattataaaagagggcttaatttgttggtggctactctgctggctggcgtgtgctgtccagccagagcacagggtattatggccagcaactgggtttcctcaggggcaggcccagtgcaccgtgttgcctgccgggcaaggaaccagcaaagcctcactacagagtgacaattcctggggtgccctgtgggagcagtgagagggagctcctggggccggggggtgctgcatggttaaaaaggagcataaggaagaatagataaccactgcatcacaccagggtcaccattcacactgggttccatgtaaacgacacctccacagaatataatgtgagtggtgtccctggagatgtacagctctatggccctggagtcaaggtaaagcctcattttaattttttgccctggagccgtttggcacaaaggactttggctcttcttgcctttgtcaaacagccatgaatttgtttggacagcagttgttgaatgcctgctaaatgctagggactgttccagccacaaggagacacaaagatctagtccctgctcccagggagctcatggcctattggggccaaaggcatgtcagtaagcaattaaagcacaaggtgccagctgctctacagaggtgctgaaacgttgtttgaagcacagatatgacaaggtgaagcaagtcattaccacagtggctagtgccatgttggacagaatccttggataagtgcttaaggtacatggatgagcctccaaaggatctgatgtcagctgattcctacattgcagagctagggtgggtggaatgagtcagtttatttggctggtgaaggaggaacctaggttggagcagggatgagagggtagaagagagcaaaggaggaggggcaggagagaacccggtaggatggaaagaggctgcccatgttgaacaaagggccagtaacatttctggtggcagggagatgtcaggacattttagaaatctgatgcctgctgttacaggcctgtcaggactttaccactcataggttctaagaaatctcccctccccacctcattctgttttgtttttagcccattctggatttctgcactcatgcatgcctcatgtgaccagggataggcagggagaaaaactcaaggggctggggttatgtgtacatcttcatggtattgactgttatggcatgcatggaaacagacctggacatgaaaggataagcttcaagccaggtgcatgagggctcccagctgacttttgggtgcaaacaggatgcaacagcttgccacagagtgatagaggaggccatgctaggagagaagggagaacaagcagggcaggcaccctggcccgactcttacacacagtgtgagatgctctcttggtttgggtctcccagatggcgaggaattcagggaaatttctttatttgggagatgcaagaaataatggtagggggttgaagtgatatagtagggaggtgaaacaatggtagggaggtgaagttatataggcaggaggcagtgaatgaaaagtgagctgttaaaccaactactacagtgggcaatggggcttattcctgcagggcaacactaggaagagtaagggagctgggggttttatactcctttccccaagtgtcaagaattgaggtctcctggggctatttatattctccagtactcctgccctcccatatgcatggcaggagagacctacatggttttggaaaaatgctcttgggtgcagagatgccgtaatatagcccctggcagctggaagtgggctggagcaccctgagagtgcaagtaatgtggtcagggctcaccagcctctgccagagaggcccacaggattagaagtatctctaacctgagcacctcactttctagactcctagaagttgtgggttggtctgatagagcctcgctgaggttcttatacaagatctagtagcatacacctcacagtgtgcaggagttgggtgaggcaggtgtggtatgtgggtgaagaggaccagggtggggcaggaggaagcagtgaagacagtgggaagatggagggttccagcttcacccacagggcagcaggctcacagcagcattcagtggttgccaggtgggagtgaggcccagcacactctattttctaataaaaccgagagatcttatgactttggcagctaattaaaatgttttctgaacatcgtatgagccaaacaaaacatgtccagtgaccacctccagcctgcaggccaccagcctgtgacctccagcctggctgttttccgtatgttctagtccggatctgcatttctggtagaactagtctgtctgcagccttactgtgtttcatgttctccccttggcaacagataaattagtcaaagagatgagagtttggggcttcaagtgtccgagtgtctggggaaggagaggagtggagagggtcaaccggaatgtagtgtccatggaatttttagaactcatgatgttttgaaaactatttgctggctggaatatttgtacttcacagtgattgcaagaagcagctaaactggagtttgaattttagaagctgctagaagtaaaataacaggcaaccagtgtgaaatagagggaaagtgtagctttggtgaccagcagatgcagagttgagattccaactctgtttcttgtggccagtgtggccttggctcaagggtcttctctctgtgcctcagtttctttctctataaagtgggattgtgccaaggattaaatgagtcctacaccatcatgtacagtcccacttgtatatgatgggtactaccatggtagtcccgactctgccacacatgagcttatactttatagctcattcatttactcagaagagatatactgatcacctacttcagaccaagattaaatgctgagggggaagaggaaaataaggcaagaatataaaacatagaatgtatgtcagggggtgataactcttccttttaagccaaaaattatcagtcattgtcttaatgaaggattgagagagagagagagtgtgtgtgtgtgtgtgtgtgtgtgtgtgtgtctacatactgtaaaaaaaaatagagacagtgttaaactgacatctcttaatttaatgagttgcttgtacttaagaaaataaaattatatgaaaattaatgtgaagcagtaaatataggtcagtcaataaatgtctgtgttggcttttgtgactcctgattttattaaaataatgcttgttgattttttttttcccatttacttaccattttgcttaagtattggagtttttggtttagggatattgactttttaaaaccaagatatataattgttcaaatatgtgatgcacgtaatacataatagcgaagtttagataatgaggagaataatgccctccaaaaacaatggcagggggctaggtcctgactctttcagactgggcagggaggcatctggcccaaagggctggaggagtgcggtatgggattcagactttttatcaggtaggcagtaagtgaggtcttgactgagagaacagagaacgaagaacagaggctagagacatcttagaggaagaacaaagaaacagtgctgacaggccaggaaggtcagagactcagtgttgggactgctggaagaaagacaagtgaggaagaggggtgattgtgaactcagcagggagaacccagatcctctactcctgatcatgctctagcgcacagagcactgtaagctcgtgaggaatgtgcttcgtacctggcatcggttggccataagtcactgaatttggctaataagatgttgcattgtctctgatctccttgagagactgagatagatggataggccctaggtccttatttcctccatgggagggtattgtgggaggggtgatgatgttcgaagggaagctcatttttgctgtttctaaggagtataatttgagttccaaattaaactggtcttccaagttggggtttggaggcagtaaagcaccaggtcaactttcaaggctttcagtggctaattttttatgacagaaggcatcgagggcttgtaagtttgtttttcttatcaagtgattcttcagattatatctacctttaccacagaaagggtggtccctttctttcaggagtggttctctcttcactttcaaggcaaaccgctcaagatggcaccaggtgataaaacagatccacttgctaatctggatagagcaggaaggacttaaacatttatgtgtttgtatacctttatttgagggagtgctttggcctgtttttagacagaaggttccatacagaaactgcatctgggcaggagaacaaagcaaattgtgttacagccgggaaaccaagcattgagcaacagaatggttcttaggcagaagtgagcctcatccctcagtgctgggacagattacagccttccttcactgccgctttcattcagcgcagggactgattttcattgtgttctgctttctctggtgtctcttgtcaagttaatagtagcctcaagtaaaattcaacccttagatgtttatagtcatcttggcctggccattaagatgatgaatgaacttgctgcttgccctggtaagagagccctgagggtggatgccgatacttagaaaataataagtcttttccgcccccttcctgtctttaatccagtgccccaagccccctggtgactttaccttgaacttcctgtataacgccaggtagaaaagcctcacctggctggaagcccactcgaggctctaacacaacagcaagctctttatcttgctttgttggtcttccccatccgcttatcagatggaaactcggcattcctcagagacccttcagtgtttctcagttgcttctgcaggcccttcccttcctccttgagaggacaagagaaggtggcggggagcaggcacccccagcctgtgtttgtatttcctcacctggattacctgtggcccttgcatcagggagagcccagccttgagtgaaactgcctgggagacaggctgggcgcttcctgcggcagtcggcagtgaggaagtggtggagaaacgcagatgtccatttcaaatcacaaggcggcttcagtattccgccgcggggctcagctttcacgtatatgaaaagcttcatttgtgtattcactgcgtttggaaggaaggctatgttttgctttagaaatgtcaacagagctgtagttacgacaaggatcaattaagaaggacgtttcccagagccgcaagacttgagtgaatctgtggggggaatttagaaaacatgtgttaaacctctagatttctttttttctaactaactgcaaaacagcaatttaataatttcctcttttaaggggaaaggggggagtcttggattttaaatcttcctaaagcagcacagcatctcttgaaaagaaagccatgaaagactactaagctaaggcgaataaaataaaattttcaaaaatcgagaacttcagtgtcctagtctgggtttccctgagcagatcctgagatgagggctcacatgcaagtggttcataaaggatgtgtttccgggggaagacaggtagggagtggagagacgcaggacagggcaggactgaaactcaggcagggtccctcagagcgtggcctcagcctgatgctgcaagggggatcagaggtgtgagttacgccaaggtactgttccatctccagcttaggaagctgagttttgttctcccgtaaacaccagtcattggttaagggccacttagggaggaataagtggtagaaagtggtcctaggcactttccacccaggggtgaagtgtagacagtggggcttcaatagcttaagggcagaagaagacccacggttctggctcttggagccaaacgaagactgaagccacagtgtgcatgtaaagggagtccaaggagcattgggtggggcattgaaattgtttgctacagtcggtttaccttcaactggtttccttcttgttctgaaggatatattacaagcatattgacaaaagtctttgaactcttgaggtgtttgtatgatattctgtgtcagttgcacatgggatgtttctaccagcatctgaattggggaattgacatatacagatgcccgtggaatttaacagagaatgtgaatgtacggctacagtccgtcaccatccagcttgccagggctgtcatttcatccttttgaggccaggcttacagacagtctgggcttccactgcccccatgctctgcctgtgatgtgtggtggcctctggcattgttgtaactcaggcacctgagcataactagtgagcctgtcctgctctcccaagcaagtctgtgtttaaaatcagttaggaatatgttgggctgcatgtaacagaaaagccaccttttttagcagctgatccttgtgagacttttatttttctttggtaataataaaataagaaatgggcatttcagggctagtatgcacctgtgtggtacccacaggaaccccattccttctgtctttcctctcagcctgtcttcataggggttttcatctccatactccaaggctgggctttccctgatggtgctttttggtttccgcttccaacactacagctgcattccaagcaagaaggagaaggacaaagggcaaaaggtctgcctccttttaaagagctttcctaaagctccacttgacattttccacatatatctcattggccagcaccatgccacaaggtggggtggcaaatgaattttctcagctgggcacattgctactctagacagagtcagagttgtgtttattgggaggaagggaagagtggccattgggaagcaccagcagagtcagcagggcagagacctgagagaggtagtttgtgagtgtgtatccctgagatacgtagcagaactggggaaggactgcccagtgagtctactcccttcagtatttgtcagatcctgctcaattataagatgatctttatctgtccgccttatctatcttcactgacgtgtatttcttattttcacaaaatgaagccatttcaacgatgttgtcaatgtgtttggatttctgtccttcaacagaggtgccacagctccatactaggtcaatccatgcaataaagaccaagttccagaacccctgtccttcagaccatttggtatatataatttccaggcccttcttcactgttctgtttatcactccctgtgctgtctctagtttggcatcttcctttttaaaatagaacccaggcttgaactgcaattcaaccagcccagcatagttattattgtcccgagtctaaacatgatatttctgttaatgtggtagccacagcacaattctatttattcttgaggcattccctcttttattttcttggtctttttgtgttatttggaagtgtaatcatgtcatttatacccttgctactcgaatatggtccatgaaccagcatggtgacgtcacctgggagtgtgttagaaatgcagaatctcaggccgcagccctccggggtcaggatatgcattttaacaagatcgttgggtatctgtatgaaaatgaaaaattgaaaccagggcgagatatccagggcctcagaggaaaatctcaaaatggtcagggaggtcccttcttagagatgagaaagtcactcagaggctgccatggcctaagactgagacaaagagaatatgtctgtatacaactaaagaaaaagagaaaaggttcgctgggccagagagtggctagagactcgattgtactcagacttgctgtattaccaacaggtaatgtacaggacagtcatgacctacacctggctaaatccagtagtcatttttcagtcttctttctggacccgtcagcatctattagtacaaataacgactacttctgttattattattattattattattattattattattattattatactttaagttctagggtacatgtgcacaacgtgcaggtttgttacataggtatacatgtgccatgttggtttgctgcacccattaactcatcatttacattagatatttctcctaatgctgtccctccccttgcccccaaccccacgacaggcccccatgtgtgatgttccccttcttgtgtccaagtgttctcattgttcaattcccacctatgagtgagaacatggggtgtttggttttctatccttgtgatagtttgctcagaatgatggtttccagcttcatccatgtccctgcaaaggacatgaactcatccctttttatggctacatagtattccatggtgtatatgtgccacattttcttaatctagtctattattgatggacatttgggttggttccaagtttttgctattggaaatagtgctgcaataaacatacgtgtgcatgttctttatagcagcatgatttataatcctttgggtatacacccaataatgggatggctgggtcaaatggtgtttctagttctagatccttgaggaatcaccacactgtcttccacaatggttgaactagttgacagtcccaccaacagtgtaaaagcattcctatttctccacatcctctccagcatctgtggtttcctgactttttaatgattgccattctaactggtgtgagatgatatcttattgtggttttgatttgcatttctctgatggccagtgatgatgagcattttttcatgtgtcttttggctgcataaatgtcttcttttgagaagtgtctgttcatatcctttgcccacttttggatggcattgtttgttttttttcttgtacatttgtttaagttctttgtagattctggatattagccctttgtcagatgggtagattgcaaaaattttctcccattttgtaggttgcctgttcactctgatggtagtttcctttgctgtgcagaagctctttagtttaattagatcccatttgtcaattttggcttttgttgccattgcttttggtgttttagacatgaagtccttgcctatgcctatgtcctgaatgatattgcctaggttttcttctagggtttttatggttttaggtctaacatctaagtttttaatctatcttgaattaatttttgtataaggtgtaaggaagagatcccgttttccatcatatgaatatgccacaatatgttttctccattatcctgatgatggacattgaagttgtttctggttttatcttttgtgaataaggatactaagaacatttttataccagttttcgtgtgcatgttttttttcatttattgagtaaatgctagtgagtgtaggtgctggctcaaagggtcactgtttagctttattagaaactgccaaatagcttttcaaagtggttctgccttttacaccctcaccagcaatgtataagagtttgagttggtccccatccttgtatattcagtattgtcagtcatttttattttagccattctggtgtgtaattgtgtttctttgtgatttagagctgcatctcccatatgactaataaacacgttttcacgtgcccctcagccattgggacacttattttagcctgttcaagtcttctgcactcccttcttctggggatacttttcttctcctgtgctgtggtacactcctcaccccaattcttctcactcgccactccttttctgcttcctttgttggggtctccttatcttgccaacctttcaacattggagagcctcagggtgcggtcctgagaatgcttttcttctgtgtatacgcattccctggatgaactggtcaagtctcataacttcatatcatggacatgctgacaactcccaaattttcccctccagcccagagctcactcctgaactccagcgttgggtaccaaattgcctgtttggcctctccacttgctgtctaacacatttctcacacttaagatgtccaaaatgagttcctgatcctcctgacacctgttccatttgtaggaaacagtaactccatccttcttggctctcccttttctctcatacaccacatctatttctcaaacaccctgttggctgatcctacagagtatctcataatccagccagttctcaccatcaccattggttccatcttggtccaagtcaccatcgtcttttgcctcattattgattggcaatagccttcttcataattggtttccgtgcttccacctttacctcttacactcctcctcttacactcctttgctcagaagtctccagtggcttctcatctcattgtaaagcttagttttttataatacctctaaggccctagaagatctgaccccgttgctgcctctctgaacatgtgtcctgtcactttcttccttgtagcctcagtggcctccttctgttccttgaaacacactaagcttatccctgcctcagggcgttgacactggctcttcccttaaataggcacatagcccactccccatttccttcttgtctgtgcttaaatgtcacctgattagaaatatcctactactccaaacaccctatctgtcctctttatcttgcttttctctatagaacctatgaccatctggcatactatttttttgttttgttttcttgaaacagagtctccctctgtcacccagactggagtgcagtggcatgatcttggctcactgcaacctccgcctccctggttcaagcaattctcctcctcaacctcccaagtagctgggattataggtgcatgctaccatgctcagctaattttttgtctttttagtagagatggggtttcaccatgttggctaggctggtctcgaattcctggcctcaagtgatcctccctccttggcctcccaaagtgctgggatgacaggtgtgagccactgcacctagccggacatactatttgtttgttgctggttgtcttagtcctcctaccggaattaggttaggtttctacatataatatgcaatgacttttttgagacaaggtctcactctgttgcccaggatagagtgcagtgacatgatcttggctcactgcaacctccacctcccaggctcaagcgatcctcccagcctccggagtagttgggaatacaggcatgcaccaccacacctgggtaatttttgtattttctgtagagatgggggttttgccatgttgcccaggctggtcttgaactcctgagctcaagtgatccacccacctcagcctcccaaagtgctggagattacagagtgagccaccacacccggcctggaatgactttttattcattgattcatacctagtaactgcagcagtgcctggatgtgtggtaggatctcaatctttgttgaataaactaatggatggtgggcaaataaatggatagaagatgggtatatctatctttctctgtactttatgagcactctttcaattattgttttatattacaccagtaatttttaagtagtgttaaaaactagtaaacaatgtaggggtttggagaaaaatgctaattccttatctcccggaaaagggaaaccatcaggaatcagaaatggagaaatgcttcccccacctggtgattgcatcttgctgtatgggatcaggcctgaaaagtgagttaagtctgttggtgctggaactcatcactgaggaacagcctatgtctgtgccttcaggggtgacagacagtggaccaaggccatgcctgcatattcctccctggacccctcattcaaagccagaatctctttcctgccagagcagtcctttgtccacatgggtttctgcagtagcccaagtttgcaggcccttgatagggctggagtgtgagctgtaatcctatgggcttgaaataatctctgctatgggctctttaaaataaccccaagtaacactcatgtcttatttaggtatccccagaagcaaaccctgagataagaattcaagtgtaaagtacctgtagtttgtttgggaggtgaagatagggggatatattaggaagtgagacagagaaaagaaaacaggagaaaaggacagagtgtcaagccagccacaactatgggcagctgggcttactcccactggggaaccctgggtccacagagcaagctccttggggttcttctgcctgcgtggtgaggagtctggggcctttatccacctgctcccagcagctgttgattgagggctgctcctgaaggcattaagatcttgacacttctggcctgttgtttgcaggggcagagcagttttatgacaagaaaaagtcctcaggtgaaaaaatgcaggtgtcagcaggtggagacacagggcaggggatctggaggaacatcagtggggtctgcgacaacctgtgaccacctcacagacaaggtgacttctggcttctcagtgactcagccacacttctctttttcactcactcttctttctggtcctcactaagacaaaatacagaatacagagcagcagttcacgggctatagcatttgaggagattaaatacaggcctccaaccacacaggccatctggaagctttggcctccagatgaggacataacgaggtcatctctgctttcagggagctctcagagtctcaggaacagatgtacatggtccatcagagtgtggctcagggcccagggtgggttggggaaaaggtgagttatttagcattggaggagcctgtttgtagccatggctgccaacatgcatgagccacttagaagggcttagggtggtgagggtacaggtctacctgtgaagctgagtgatagtcacggtaattacagtcacctactatagcctcacaatgagccattataaaaatgaggaaactggggctccagaaagatttctcagccccaggacggtgcagccaggaaatatcatagctgggatttgagcccagcttgtctggacactgagcctgtgttttgcacactatgcacacacttctcccagatgaagatttgccttcatccaaggggaatgtctgtgtgagacagtggcagcctctgatgggttcctgccgattggcaaggtggttagagctgtgtattgagaggtcttctccaaggtatcagtttttctctgggagggttaaagaaggaccttgcaaagcccatggcctttgaatagagagctctgttctgtttgcagtgactcccctcaaaaggcagaatgcaattctctaaagggaaaaaaaaatgaggtggctgctctctggggttaagcagagaaaaccgtcaggcaggagaggtggggctgtatttgagagggtgggagtggcccaggagacctcacggtacagtcagctgcaggagaggagctgctaaccctcatcttaagaatatcactctcttgacaatcacagttgggaaatgtgtaatctcagggtgcctccttgcccgggcatcttcattataaaagcttagtctttctaaatgcagccaagctctcctctgacaagagatgtgagaattccgttgacactcactgaccacctagaaaccagagacccagaaacccaaaggtgggtcacatggtcgccctgtccctggggaatgcacaggaaaagagctctgcctcccggaaggttccaggtgttggggtaaatagagatcctgctgctgcctctactcccttactggtctccctggggacatatttgaacatattttactcataaattctcatctcagggtctgtttctaaccagacctaaaacagacaggtcccccccttttttaatcagtaactttggtttattacagcagaaacttcccaaattactgatctgaccaattagatatgttttaatttttttatgaccggaatcttttccttcaaatgaacctgtttggattctcttatctgtgcaatacaacctaatgtaagtctactttgtaagtatttgttctgagattatttgttctgaaggaggcccaatccagttcagttaaatctgaagtttttgatcaattgggttgctgagattacaactttctttttcattaactattagtacttaaaatattgacatgctaagtttttagtcttctcttttttgacctataaaaaaggtcaattatatcttaaaagtttcaccttctatttggctattgtgtatcattctttaaatatctggctgggttcaacttgctaagattttatttagtatatttgtatctatagtcataaacaagatttctctgtaattttctttcttgtcaggttttggtgtcagatttctgctagtgtttgcaaaaataagcagaaagcttgcacttttctctgttctctgaagacatacaaccaacatagttgcaacagcaggcagtgagagctgacccttactgagagcttgtttatgtgccagaggctgctcaacactttttattaacgtgtttaaccctcacagcaacccagtgaggtatgtgcagttaccatctcagttttcctgatgaggaaaccatggcttagcaagcttaaggaggtgactcaacttccttagtgagtggtggggctgggattcaggcacaggcaggctggtacttaatctctctcctacaaataccagcttccttggtgagtattggggctggggttcaggcacaggcaggctgactccagtgtgctctaatgcatcttctttgcataaagaggcttatttacatgtcttttggggtatgctggctgctcacgtggctttgtagacattaccctctggagtgccaggtgctttgtgaattagatctttcttattacatcacggccagttttttgtggaggggggcaatgggcaaggaagcattgatgaattttctgagacagctgcgatttgtctaaacaaggcttttccttcagtacccaaggattctggcacacagacccagctccccaccagcctcccctggaatgagctttcctgaggtgcccgcgtgtctccactccaggtcctggaaagctggcagcagcctcactcttgggttttcctctctggaattaatttgtccccaagtgaactcaaataaaaggaagagcacctatgagagctttgcctttgactggggctgggaaggtggaaatagcatggtctatcctgttttctcatttgcccgttgagcactgaacgactggaagtagagtatgatgtgaagtcttaccctttgtgagtcagggggcttgggctgtctgcacacactgtctccaactccaccaccaccatccaactcaggcccaatatcactgggaaaaacccagatcccctacagaaatacaacaccggtgacttgctggatgctggtggctttgtgctattggcatggtgggtctgaaactcttgtagacaccaaagaaattggtaggttatggaatgattgattatatcctgtgtcagctggaatcctgcgacatgttctagtttcctagtgtgcagagtacaatgtgggcaatgctgggttgtagaacatctgtgattttcatgggataaaagcccttatttttgttttgttttattttaagtcaaaagcaatttctaccagtaagagactgaatgaataacaggaagccccttgtttgcatggttcagaactaggcattgcaaagataaccatttactctgatttcagaggtctaaaggtgttagttcccctcttagaagtaccaaacttacaaatgggaaagtggatgcttagaatggcatgaatgttggctggcttgatcatgagtgggatcacgatggcattcactctttcattcagcaaagttatgtgttaacaggtattaagtataccgttatcatttttccttactttagaagataagccaaaaaatttgaccttaatgaaaatagaggatttttaatggagatcagaattttcacttataaaagtaccatttacacatttcgtcactgctgacagtcattagctagtggatagatccaagctttaaatctgaatcttgtcataggaggatggaagctcaagttgttaaaggcctaaaaggttgcatgttacatatagaacaaggccctgggaaaggaaatggtctgttgaaagtcacaaggccaaatggcataccaggtttttggtccttgtttaagaaaaccaaatgtaggttcagaatagtttcttctttcttccacgtctctgaaagtccagcttcgtgtgggagagctctgaggccctctcccagccctcgtttttcagctcggggttaccacgtgtattccgtgaaatgctctacctgctttctgtatcggctttctagccagttgcagtgtacaatattagttttggctttgggaaatgaggtttctttgacttggctggaagtatacagcaaccattttatttttcttgtgcctcatgaattaatagggcagtgagaggaaagagcatgcatactgagcatctgagcttttttaaagcaacgattcacccagctttctagtataaaaaacttcctctggcccaccccgagcaaaccctcattcactgctcagtcctcccatttgttcatctggaaagaaggaatgttctagtggggccaggccccatgtggtatcttccttttctgaagtcatccattcattctcttcctggtggggacttaaggttggaggcagcaaaaagtggaaagactggtagatagtctgtcagctctgtggggtgggtgtgccatttggggggaaatgaaaccagaggaagtttggctttgcagagtgaggacccaggcaagttcattttttacactctggttccatctccttccccctgcacacatgagtcagctcccaggaggaccccgtgtccttgactcttccttgctgtctcttcaagctatcaatatgccctctctctatcttctccctctggaattctccctttccgtctcagttggactatctggactttttgattctgcttcttcccaaagtgctcttttcagtccattgtttttcctgagatgtaatgactcaagggtaaatggtacctgtcagttgcaacgcctgaaaccatagatgcataggtgcaggtggtttatttgagtagcgccccagaaagtaagaaagaaggaagaaaaggagggtatgtctttgaggtcactgccattggtgctaagacttttttgagaagcatatagaaagtcacctagaaatgcttacctataggacaggagactggagcactcacgccccagctccaatcccaggttgttaagggccacctccaaggaatggattgtcctgccctggccaggggtgtcattgagtttgggtgccctcagaatgctactgaagatggtacaaagctgaaatcatcagagttgggccagaaagaagtgacacagaacatctaaggcatatcataaaccatttctgaccctgatctcggaacaggatcccagaacagttcaacctgtaattgctttctgacatttgagcaaaagcatcagtagctcttctcatgaccacaatcagtttactaggatttttccataggctcaaagaaaagacagtctatgttctaagtacagatgaagaagtaaaagtttgtgttctggaggggtggggcttcaatctagaccttgcctctttctgatcactgttcttgacactggatctaaattaagaaaaacattaaatctaaaaatgtctaaaaagttaggacatttaacctatactatacaagaagttatcagctaagcaaataaaatccagactttgaaaaaggtaaataaggaactgatttactttaatcacaagttccttctgcttacaaaatgattcatactgaaatttttaaaaaatttcttaacagagtttagtgcaattcacataaaaaatgtacttcagtaatttgcaaatatttacttaaggatttagtaatttagtaatgtttagtaattttttcaacaagttcttttctgtttaagtgggttctcagaagtggttgcaccttcagcaggcaaggaaaatatttatttgaagacgtttatgaaacacctcccttgtttttattatgtttgtgttcttcttatatttctttttatttgcagtaccctcaagtactttgaaggtttggggacagtaaataaaattgatggccattttttgtcatgcatcttctgaattggtatgtttttctgtgttcagaatgtcattcctcagcccccaggggacataagtacaaagtgaaatgaggcgatgtcaggatcacctgtgcacattctgcttctctccaggccctggcttctcttctttccggtagatgaacttgagcacatgatctcaccacttggagcctagtaaaatccatgctactgttctgcaattgttcttttattctttctctctactaatgttttcacctatggatgtcagttctacttctccttggggctttaactaaaaaggaagaattgtctgtggcttcttagaaagtggtgtgtggacaggcaagggctgccctgcccttggctggcagcacaggctctgcaaagggggtgggtgagtgaccacatcatcatggctaccccttcccgagtgcttcctgtgggctaggcagggcccaggtagctcaaaggtgttcccatttgttcttcacagcagctctgaattcattagcataacaaaccacccccaaatctagtgggcttaatacagcaatcatttctatttgctcataactctaggggttagctaggcagtttttcagttctgggccaggctcggctgttcttggccaaccttactcatgtgtctgtggttagctgcaggtcagctggaacccaaatgttgtctggaacaaggggagtgatttagctagtggctctcatccccagcaggctggcccaggctcctgtagggttccaaaagagtgagtagaagttccaaggctttttgaaatctaggcctggaacagacagcatcatttctgctgcattctgttggtgagagcaagtcatgatttcagctcaaattcaaggtgggggaataaaatctacctcgtgatgggagtagctgcgaagtcaaaactgcaagggatgtagttaaagggagggttggagagtgggcgtttttgcaaactatctaccccaacctctgagcggtaggtataattatcccagtggttctcaaccaagggtaattttgtctcctaagacacagttcacaacttttggagaaatttttggtttccacaactagttcagcgctattagcatctagtgggtatgccagggatgctgctaaataccccacaatgcacaggacagctccccacacaacaaggaattatccaacaatgcacaggacagctccccacacaacaaggaattatccaacaatgcacaggacagctccccacacaacaaggaattatccaacaatgcacaggacagctccccacacaacaaggaattatccaacaatgcacaggacagctccccacacaacaaggaattatccaacaatgcacaggacagctccccacacaacaaggaattatccaacaatgcacaggacagctccccacacaacaaggaattatccaacaatgcacaggacagctccccacacaacaaggaattatccaacaatgcacaggacagctccccacacaaccaagaattatccaacaatgcacaggacagctccccacacaacaaggaattatccaacaatgcacaggacagctccccacacaacaaggaattatccaacaatgcacaggacagctccccacacaaccaaggaattatccaacaatgcacaggacagctccccacacaaccaaaaattatccaacaatgcacaggacagctccccacacaacaaggaattatccaacaatgcacaggacagctccccacacaacaaggaattatccaacaatgcacaggacagctccccacacaacaaggaattatccaacaatgcacaggacagctccccacacaacaaggaattatccaacaatgcacaggacagctccccacacaacaaggaattatccaacaatgcacaggacagctccccacacaacaaggaattatccaacaatgcacaggacagctctccacacaacaaagaattatccaacaatgcacaggacagctccccatacaacaaagaattatccagccccaatgccaacagcattgaggctgagaaaccctggattatccctttttacacatgagatgagggtcttacaggtcttctaagtggtggagcctaggtttaatcccatttccgtactcttcagcactcactgtgctagtatccctctcaggcgtatgaatacgtcaagccacttcagcatgatggcgtttaagttttagcttgtctacaaagcagcacaatacagtggttaagagtagggttttgtcaccagactttctggcttaaatctgctcccatcccagcaccacttaatatgtgttgtaccttgggcaagttcaatgatgtctctgccttggccttagttttcttcttcttttttttaatgctgcctcaattacagaacagatgcctaagttttcttatctgtgagactgagctaagaataatgttgaccttataaatttgttgcaaagattaaattagacattcatgtaaagcacttaggaccatacctgagacatagtagcctttagttatttttgtctaattcttctttccctgatacagtgcccaccataaatccccagtcatggtgctgacctggcatgtgaagctggctgggaggaaagagatttttctctcccagcaaagtagtaaacaggctctctcaagcattcatccatctggggagcttggcacacaggacagatcctttctcttaagtgtcccaaggccaaccctgaaccatggaagccttcatttaccatcagtttttctttcaaaacttctgcaagggcataaaaatgggggactaaatagggaccaaataagtgagtccatgctttggaaatgatgacctgagagtgtgaggaaggggagagccaggagctgagtggcagcattgcgggagggctcttcctcccttggttggcagatgggcgggtgtgactgaggctcaccatgggtggactgagcagacgcctgccctcacacacaaccccatgctttcagaagaaggcgtcagacctccttgtatgggaacatcatcaccttcacgctttgtctttaatttgagaagcttatgtggaaggaaacagcacattcttgtgagaagataggttttggaaagtccggagtagacagcatgaatccagggtttctaaagtataccctctccatgcttgctactcaggaagcagaggcaggagaatcgcttgaacccaagaggcggaagttgcagtgagccaagatagcgccactgcactccagcctgggtgacaagcgcgaaactctgtgaaactttcattctgacagtaggaagaggaaaagactctggctgactccttgtgatagagcaaaccaagttgagtgttgtatttacttttctggatttattttcacaaatattcagctcagaatgtgccagggaggggaggaacacaggagctgtattggccacagccatgtgcgtcatcccaggggacacttatgtgagccctgtggagcaggaattgttattcccatcttacaggggtgacagcttagctcagaaagcttgcagtttgctccacgttacaaagctagtaagtagcagagctgagattggaacccccgtccgtctaatggcaatgcttcctcttttgctattctgcctcacaattaaatggagtaggacctgatccccgacatcgagaaactgacggtgttgtcaagaaataaatatcccccccccacacacataaatagagaacaataaaagataacgtcggaggatgaacccacgagcgtggtttgtgtgggaggatgtcttgatcctgggctcgcagggctgtccgctgaacatgacagttatcctggcttcacagtaacctttcagaggtgctctgagtcctgaacatcggagatagattctttatctggggagtgactacataatttaaccatttgttattttttattttatcagactgggatcctttaggagctgaaagggacagtatgaataattagccctaggacaacaggcagaaaccgggactgccccaggcagttaagatgcatggtgaccccacttaatggccaaaatacaaggaaggcttggtgtctccgcagcttcctgaagagggaatgaggggcaaggctctggcctcgcagccagctgagggagcgcttctctttccactgtctgattctgggtctctgcttcctcatctggatagcagccctaacacccactgtattagttatctgttgctgtgtcacaaatcacatgtcaaaacctagtagcttaaaacaacattgattagccctcatagtgggttggggattccagagtggttctggctcgaggtctcttatgagactgcagtcaggatgttggctggggatgcagttgtctgaaggctccactggaggatctgcttcccttgtggcccctcgcttggctggctgttggccacaggccacagagcactcaggaccaaggactggagtggtggaaccctcgtccttcattaacacaagcagggcaggaggatgagggtttgtacctgctgttggcaggggggcctcagttcttcagttcttctccatatgggtccctccaacaggtagctcaagtgttccaccatgtagtgactgactttccccaatgaaaccatccaggagagcaagaactgggcagaagctcgcctttccatgacctctcagaagtcacatagcatcacttctgccacattctgtttttcaaaatcgagccactaagtctggcctacattcaaggggaggagaatcatagctcactgtaaccttgaactcttgggctcaagtaatccttccacctcagcctctggagtagctgggactatagtcacgtgccaccacgtcctgctcattttttaatttttcgtagagatggtgtcttgctgtgttgcccaggctggcctcaaactcctggcctcaagtgaccctcccacctgagcctctcacagtgctaggattataggtgtgagccagtgcaccttgcctaggcttcacctttcaaagggaggagtgtcaaataatttgtgaacatattttaaaaccactgtacttagggtcaatgttctacacttataagttaagtaccatgtgtaaagtgcctgcagcagtacctggcacccattaaaaacagaatcttggccctccagagtccagcagctgcacttctgaatgctggtgggcacggacggggtttgatgtccagtaagcctgagcagccctgcaaatacagatgagcccaagtcacctgtacagttggggcctgaggaagttaggtcagttctgaggctcccccagatgtgggacactcctcacggacaagttcagtgttgtatttacttttctggatttattttcacaaatattcagcttagaatgtgccagggaggggaggaacatacctcctatgcggcaggagctgtattgggcacagccacgagtgtcatcccagggaactcatgtgagccctgtggagcaggctctgagcctcccccagatgtgggacactcctcaagggtttccaggtgaccacagagggtcccacctcagtgtggacatttccatgtgtcctcctgaaaccctctggtgagcatccccacccaccctttggtgtctggagccatggtggctggttgtccttcccacttaggggaaccaggcctcagaactacagctcagaggcctactctgtgggctgtccttttttctagggccttgattaaatttgcttctctgaacactgtgaggtatctgtacttgttttaactcttctagtgacagcaatagaaaacctaaattggtgtaggtaaaagagaatgtagggttttgcaaactgaaagtacctggggttggcttcgaccacagcttctggttggacctctggaagttgtcatagtgtctctttctctctctccatctgtcagcttctcttcctccttttggcttcgttctcaaacaggctctctgtcccttcagggtggcaaaatggttgccaggctacagtaaataaataatctcatttcctaaaagttcttgcaaaaatgtcatagagtctgattggtccaattgagttaagcctgggtcgcatgcccacctcctaacgggttgggagtgaggtggagtggggaggggatggctccccagagggaagggtagatggatgtgggtggcaagaaacatgtctgccatggtattgttatcctcatttaccaatgaagtgttggcactcagagcaggcaagtagcttggccagagtctcacagataatagcaggtgcagaccgtcatcctcctgccccactagtgttgatgaaggacgagggtctcacctttccagtccttggtcctgagtgctctgtggccatcttccacttaaagctctaggacagaccagcagctctggaagtgactggattaaaaccccaccaactgaagacagtggcgtgggatgatggctcgctgatgggagacagaatttctgtctctcctgtcagaagccctttgaagaactcagctgtctggacaacaaaagtgggagcttttgttgtctagaagttcatgtgacctttcctttcaccttttagtgctgcctaagtgtaagatttaagcacagcattcttttcccatgtgtcatttttcagcagttaaaaatccatcagctgaggccacacaaagttggcactccctcctccaccaaccctcagctaaaaggttcagtggaagggactgatgctgtctccagatgcagactggggccatggattgagccacagagggaggagggaggagggtctcaaattaaaaagacaagaaacaaacaatctccccaaataagcagaaagtctgagcgtggaactgagctggttggagctggggagggggtgcgggaggtactttcagcactccctcgtgagatcatggaacagggcaggaaatctgaacctgctgccaaagaaaactcgctttgccttttgtaaaaagcctgtcgagctttcttcacaagggagctgctggtggggactcacaaatgggcatgctgcctgccagcaagggtctcctggccagccctaaaggcccgggctgctctgcttacagccacacggctgtttctgagctgaggatgaccctccaggtggctgagattccctccaatctttttatttctggttgggaaaccctacacagaccagtgtctgtctcacggtttaaaaggctgcatgcaaaacatttcctcccctggtagaaatgctgcattgagccacagccctccctctgcagcctgtgcagtgtcaaggggacagtggctgcatgatgatgtgcctagcagggtgtcccccatcaggacagtcacaggggtggaacaaatgcaggagccatggagccaaactgaactgggttggaatcccagtttcagccacttaatagttacatggatattgccaagtagcctgagttctcagaggcttgatatcctcatctgtaaggtgggaagtataagacctacctcacggtgtcagtgttaaataagacagggcaaaatgatgaaggtactctgtaaatgtatgtccattccttcctcctcctctgggttccttttcagcacttcctcaccacagcaccattcttaagttttctagccccatttattttagaaggggaactggaggcagcttggagggaggtaacatctggatgtcgcagtgacagctggtggctggtgaggagtccacaggtcaggggcaacgggccctgcagacttctcagcatcccctgctcagaaggggctctcagagtccatgggctcagcaggctgattcttcccctctcctatgagaccatcctccatgtgggtcccatccaggaagctgcttccctcccaagggaaggaagccaccagtgtttctagaatctacatcagtgccactcaaagcgtggtctcctgaccactagcatccacaccagctggggcctggtcagaaaaacaaccgtgggctcctccccagacctattgagtcaaactctgggggtagtcccagcagtctgtgttttagcaagcctccatgactcgaatgtgtgccacagttggagagccactgtgctacgggcaggttatcccagagcaaaggaaggaaaacctcctctgcacaatgcactctgaaggccccactgaatacgggcatctgtgaggcagcatgggacctgatcactctaccatatatagctgttgtgtgaccttggaaagttccctcaccctctctgggtctctgtgtcctcatctgcaaaatggaacaatcataatactggattgaggatgagaagcatcaatctgttcatcctagcaaaatgtttagcaaaatgccacgtgttcagagctcaggacaggttagctccatcctgttaatgttgaggcagcccacccaggttaagggtctcattctgagagtggctttggacagcttgagaatctacaactgtaggtgacagagcaaagaaaactcttgaaaagtttctcttagagcctaatagcaataaccattaccatggtggcagccaccagagtaactcattatatcattccagcaacgctgtgggttaggagttactatctgtatttttacagggaggtacttaaggcaccacttgataagtggtagagccaagtcagtttgaaaaaaacataatcattgtgcaatgacaatttgagacattttcagggtcccagttccatcccctaggaatctgtaaagaggagagtggcttcaacctgctgttcagggcctctgccctcattccctggaggctggtttggacagtgtgagaggcatccttcccaaagcagacaaagagaaaacacatgggaatggtaattaaatgagtccatgtttaaggggcacttaagtggattaaaatcaatatgtagtcacataagtctgctaagccatccttaatgtttggcgggtggatttctttgtttaaaaaatcctggtttgcttgaaactggctgccccattgaagcatgagataggacgagagattcccaggacctggaagaccacttgctcagagtctgaaatgtttacactgcctctgactggcatctctataccagaaaggagaagagggggactagatgtttttgtgtgatagtctctttcctgctatcttaggctgagttccctaaaacaaaatcctgagatgagacatcatgtaaaaataatttgttaggaagtgttctcaggggaatgggaagtagagcttcaaagggaaggaggccaaacaaggatgtgatatcaagcaaagtccccaggagacagaaagaaggtgggtgactttggcaccgtctaaagtataggtcacatctcactgtcccaatcagggacaaaagagcatggctgaggattcccccaaggggatgtgaattctcaagcacttccatctctccatgttcatgcaaagaaggtgccaggagccccgtggccatcctcccacaaaagacacacaggtggtggcatctggggggtcaatgtgcatggttgtgcatggtagagacccctggatggagctccatgatgtgggatttacatcccgcccatactctgctgtgagagagatggtatgcagccagtccagccatctgaagcagaacgaaaaaatggtatggaaagcaaggcacctgaaaaaattttcaaagggagaaaaagaatgagcaaaactatcctgtagaggagagagacattgaaaatgacatatacagacacagaaaaggttgctcagtcaacaacttctgcaggctcaaagcatgggaagtaatcagtaaatggccaatttatctctccctcacagccaagccaactcctaacataattggaagtttaatatattccaacaagttcagaacaagcatactagatcttaaggcaatctcatggccctgcagctcatcctttttttcaaagaaattaattttcaaaaaatgactctattgagattgaatttagatcttatccattgccataaccaaaagcaacccttactatttgtgtgtgcaagtcgttttaaacagctggcccattaactgaaaaatgtcaaaaacaaatataggagaaaagtaagataatcttggaaggcaaagcctgtctccctatattgttcttaaaaatacaaaagggacacataacttcatcatttaattatattaggaggtccgtcattcagtgctcttgtaaaactgtcttgcccttgttctaattgcgtattgatcaccgaggttcttggcatcgggcttttctttgatgtgtgcatgatcagaacacactaagagacagcctgtgtgctccttcctgtcctcgtgggcatttcctaaagcttcagccctaagctggtatatgtttctctgttacatcaactgccaaggcaattactttacatctgatatttaatggaaaagcttctgaggacagggctatactcacatacctccacacctggcacagtagatgagctcactatctgttgaataagttcgtgacagaacagaagttctactgcagccacaaaggcctattcacagtctttaagcctgatgaagttctgaataagtaaacccttagctacatcaggcagtttatgaatggtgttttttgttactgtcatttgtaatagcttttgacctatgtgtttgtattagtccgttttcacactgctataacgaactacccgagactgggcaatttatgaagaaagaggtttaactgattgacagttccacaggcttcacaggaagcacgactaggaggcctcaggaaacttacaatcacggcagaaggtgaacggaagcaagaaccttcttcacatggtggcaggagagaagggggctggtgggggagtgccacacacttttaaaccttcagatctcatgagaactcactcactatcacaagaacaataaggggaaaatccacctccatgatccagtcaccttccaccagatccctccttaaattcaacatgagatttgggtagggacacaaatccagaccatatcagtgtgcaaatgatgagctaattttcccactaaagtaagcactggtatggtacatagtatgactatggtagtccagtattggattccataatttaaataactagtagactttttagttagttgaaaggtaaaacaatggtaataacaatgagctgtaaaatacgacctgtggggtgggaatggggacagccaatgcttctctggtaaagggaggccagtttcagcccctggtgcaacagcacccccatgcattcatcatgtgagatgataagtgtctttccttgaaccagttcttcttcttcctcctaggctgggaacttctccttggagacagcaggaactgtgttacaaaggcatatggcccaacaaaggacactgaggctactcagtaattattaaatgagagcatgaacaaaggaatgtaagatgtaacagaaaacatacgtgtctcacacatgagaattattgtgtagaagctgtttcccatttgagacaaaataagaaacacttgttgaacgagtagatgggcttcctctgggagcacagcaggtaggcacccatgttggagccagccatggtctgcagagttcatttctctgagtccctgccccagaggcacatgacataggaggctccagacaactgactcaaagacagagaggaccataataccagggttcctcagtcctcaccagcataagaatcccagagaaggcattttttttctcacatactctaggtctcaatctcttaacttcaaaaatggcagtggctacattagctcttgggaccagtgtttcaaaggctagtgtagaacacttgcctcagatgattcaagatccaggtttcctgactctgcttctgctgtaaagaatcccactctggaggctggggcctgcaatctgcatctttaacaagcccaccagagaatttcaatgcagtttcacttttgagggtttttaacttgattgtccatcagaaccacctggggagctttcagcaaatgcatgccgacgccacatgcattgattctgcggccacacagaggggcctgcatctgggtcttttttacaaagcttttcataggattgtcatcgtcacctttccagcactgttatgcaaattggagagactcatgccaaggtgaagggcttggtgagagcagccaggtcttctatgcagtgatcagcctgcacagctgggtgtggcatctctggctcccaggtggttccagtgcacacccccagttaagaaccaatgaagaatgttgcttgttaacaacctttgaaggctttttagcaaaaacaaagtgtcatattgggattcatctgtggcagtttgcagaacatatcaggggagagaggtgtgtgcaaggcatccaccaggaggccgttttgtgctggtctaggtaagaggagattggagctgacctgttgaagcaacaaagagaaagggaggaaggatcatcctagaagtggataccagttctttaagaagagtcctgagatgtacccaggagtagcaaagtggatgtgccaacccgagggaagagattagtaagctgctgccccctgagacagggctccatgagctgacaggttgatctgtggagatacactctgaaggtgctagactaggaagaggtcctctcaggccccatcccttcatcttcagccaaaggaagttcagcagtagctgcccctggcctctgttctcagtccacagctccaccagcccagttgcttgtgcagagggagaggatgtgggagagatgctgtcaacaccctccatgtcccctccacccaccctggaggccgcctatgacagttcgccataggcgaactgtttctctggttaggaactttctctggctacaggagtgtgctgcacccgagtcaggagggctggaagtgcaggatagttaacgtccccagtacagttttctaccaaggagagaccggtgagatggatagatgccccagctttctcacccgttgatgacacacttcactaccctctcctggagctccctgagatcactgcccatacaaactaattgcaccccaatgcttgtcccaaagtctgctcagataagggccgtgtgaatagacaggtcttcagttccagaaaagtgtatactcacacaggaaatatctctcaaataacatgggcagtgtatatgttatttttctggagggcagagggcatcatgaggaaggtggtcttcgtggggtgaatatcatgtttcctccagggagggctcagtgacatggagcagtgcttctcaaatgtccatgttcgcagaggttagcttctaactcatcaggtctagggtggggcctgagaatctgcatttctaacagtgagcatgtccagggaccacactttgagtagcaagaccttcacagcttcaagttgcaaaccagttttgaatgagcagagtagaagggggtttgcaggtgagaaggaactcttcaccatgagtacatttctatgaagatttctggccaggattttagtaagtacctgagccccttcaaacatttgactcccgcataaccttttcatccaaacaccattcatgagttgtttttatgccatgaggttaaattctttcctatcatttcaggggaggtccccacttgttgagttttccgtcagcctataaggcaaaggaaaagagtgatagaaaataaaaataacttgattcattagatggaattcaacttgaattcttagtttgttgactaagaatttgcagcctccgaggaaattttttttaattgaagaaaaactaatttttaaaaatctgaaaataattcgtttgtgactatttaacagaaggaaaaacttcctgagtgagcatcaaatactttaattacttcttaggcttcagaagggatggcttgctagtctttgtactttgggctttctgttacgactggttgacttagatttatttgtttatttagcttcttaatttcatatcctgtggtcctgaagaggacaatcaccaggatttaggggagtgtttttgtctttattcactttggaaaaatgtaaagattagtcctaagcagggttgattcaccgcactacagagggacacgttaggaacgagacagcttattcaagtgcttttgaatttgtattggttttttaaaatgtaagattatttttacttattttaaatctttcaaagcacttttttcctcagggccaagtggactctttgggaggagacctcgccgtctccatttgatcacataattgcttctgatgccagccagtctgcaactgccagtgattggcacagggttatttcatgtgcacttcaatcaaatttcttttcttgcctttttttttttttttttttttttttaagaaaaaatctcactgtggcacccaggctggagtgcagtggtgcaatcatatctcactgcaaccttcaattcctgggcctgtgatcttcccacctcaactcccaagtagctgggaccacaggtgtgtgccaccacctctggctaatttttatttttgttgagacagggtcttactatgttgtctaggctggccttgaactcctggcctcaagtgaacctcctgccttggcctcccaaaatgccgggattacaggtgtgagccatccatacctggcctccaaatttcactacctaacttgggagaggaattttgcattagcagttacatggttcatctgcctcaaacatttgttttgactctagcttttgcttgtttcacttttttaagcttggaaagaacaaacttagaatagtgtaggccttggcttccacatggatgttttgacaaaatttcaaggaagcaactggctttgtagtgctttctttgtcctgcttctccaaattccccaagtgcatgggtaatcacctctggttccctcggagtgttcgtggccagctccttcccagccttgccagcccattgtctgcatttggcatctgcgctggagtcactgtgtgctccagttccttaaggatacttttagtttatctgatctgtgctccacacctcttcagactccatttccatgaatgttttgggagaggtgaggaagaaaccttttctgctcattgttgcgcgttccccaccccaggccccgtctgatctattcttacatcacaactaaaaatattcttaaaaatgtgaatcagatggtatgactcccctgctcagaaccctccagtgccttccctctgtacttggaaccaagtccaaactcctgatgagcagcagggctccgcatggcctggcctttcatctgttgcttcccaaacgtgtggcctctggttggtttctggaactcaccatgcctttccccacacatgctggttcttctgccagggacactcttcactctcccttcatgtgcttagccccttcttagcttgcaggtctcagctaaatggtacctcctcaaaagggccttccctccacctataccaggtataatgctgtttgcctccttcagaatgcctctcacaggctgtgattactttaaacagattcgttgagatatagttcagatgccatgcaattaacccttttaatgtatacaattcagtgggtttgagtatattttcagagttgtgcatctattgccagagtcaattttagaacatttcattacctcaaaaagaaccaccatacttcttagctgtcgtaccccttcccctatttccaccagccaaaggcaaccagaaatctactttctttctctctagatttgcctattctggacattgtgtataagtggaatcatttatatgaaatggagccagtcctttgtgactggcttctgtcacttagcgtaatgttttcagagttcatttgtttgtggcatatgtcatacttcattctttttcatggctgaataatattccattgtatggatataccacattgtgtttattcattcatcagttgctggacattagattgtttccagtttttggctattacaaattatgctgctatcaatatttgtgtacacatttttgtgtgggctcatgtttttatttctcttgggtacatacctaagagtgggattgctgggttacatggtaacttatatttcactgttaagaaactgccaggctgcttttcaaagccactatactattttacattcccatcagtagtatgtaatggttccagtttgtccacatctagtccagcatttgttattgtttgtctttttgattgtagccattctaatgagtaggaagtagcatctctttgtggttttgatttagatttccctgaaggttaatgatgttgagcatcttttcatgtgattattggccatctgtatgtattttttggaaaaactattcagatcctttacccatttgatagttaggttacttatctttttattattgagctgcaagactttttaaaaatgtatcctaaagttcctattagacatatgatttaaaatattctcatcctgtggattttttcactttcttaatggtgtcctttgaaacacatgagttttaaattttgatgatatccagattatccagttttttttgctacttttgtaattattattattatttttattattattatttgaggcagagtctcgatgtgtcacccaggatgaaatgcagtagtgcgatctcggctcactgcaatctccgcctgctgggttcaattgatccttccacctcagcctcccaagtagctggggctacagatgtgtgctactacaactgggctaatttttgtgtttttagtagagacagggttttgttatgttggccaggctggtcacaaactcctggccccaagtgatccacctgccttggcctcccaaggtgctgggattacaggcatgagacactgtgccctgccagttatttttcatttccttttgaattttttgtttttgccatctccccgtgtaggctgcatgtgctgcgacggcagcgctgtgtttgccattgtagccccatcccctagaacagggcgtgatatagggcagcggtcagtgaatagctcttcagtgagttagtaaacaaagtggttctcaaaatgtaaaattcttccttgactcactaagcaaccttctgattgcaactgctttccctttttggcctccaagacaggaattctctggccctgctgacaggagccccatgttgcacagggcaactatgtcactcattggaaattaacatgtctgccctctgacttcagtatttctcccaggagcagaggatggaagttcttcacagctggatctgctgtatcattcagaagctggcttcagagcctgtgtagctggaagcctcgggctcacatcaaggaagggaatgccactcagcctctgggcacacagctgcaacttcccctggtgctgtctctcttggtgctaccctatactagccttgtcctgaaacatctaccccattcatttcaccctctctgctactatgtcactgcctctcccatcacagtattccacccaaatgaggcaaattcttatcctttcaagacctaccctagagtcaccttttttgatatatttgcttttttatttactccaccaggcaaagagggtggcaccctgctatgagctcttggaacaatttatttataagttccttatagcctggatcgtattcaaccaatagtttttccccctctattaaaatgcgttaatttggagtctttgcttactaaatgctgtctcctttttttttgagacagagtttcgctcttgttgcccagcctagagtgcaatggtgcaaactcggcttactgcaacctctgcctcctgggtccaagcgattctcctgcctcagcctcccaagtagctgggattacaggcatctgcccaccacgcccagctaattttttgtatttttattagagacggagtttcaccatgttggccaggctggtctcaaacgcctgacctcaggtgatccacccacctcagcctcccaaattgctgggattacagtcgtgagccactgagcccggtcaaaatcccttcttacctgtcatttgtattctccccattctgtgtctgacatcttgtaggtgtttgttagatgattggtgagtgaattaatgaatgtacagatggatgatgtataagtcctttcagagggaaactttgagtatgttaagaccccaggaaggcttatacttgatctttgtatccagaatgttgccaacattctggatacaaagaaaagcaccctctctgtgacttctcagatcccatctgcctctgatctttcatgacccctgctggattgactacatgagcctctttcagaagtttgactagcaaatcaacaaaacagttcaccctctgcatctctgctcagggatcaacaggagtgcttgcttatgtggcttcattccagtgggaggttcatattttcttagttatgtatcatgtagtcttccttgattcaagagtaccatgacttgtgtttgttctgactccaggactatccatgagtaaccctcagccaagagtgtatcatcagggcctgagcaagtggcaggagacaaggtatagtgtgaatctagtacatggaagagaatgtcttgacagctggggtctgtaattcatatgctgttcaaatgacaggccttttccccacacctgtgtgtattcaaagcaccatgtcatgttctgtagggagataggcaggggagttgggtcaggagaaggaagttaagattgaaggagaacatgcagaggagctttgggaaggaatgtgcccggctcacatcctggctccatcatttaccaactgggaaaccctgggcaagtgatataacttcacattccagtttcctcctcataaaaatggaaataaagagaaggtgtacatagagtttttagataatggatttaaaacactacctggcacacagtaaaccattactaagtagaggctatgtactccatcctacacgcatcagcagtggcagtccagcaatactcctataaggcacatgttatgacttcattttactggtaaggaactggaggcttagagaaaggatggttaatttgcctgacaacacattgctggtatatatctgagccaataatcaaaattgggacactaatgccaaaggttttacaatttctatgctgcaggctcaggtgtttttcttcatgggtaggaactttatggctcaagcccgaaggattcccctctgggaatacgactgttctggtaaggttcaagctgactcatcattgagtgctgctaataaagtgtttgctgagaatgttttctgttaactcattgagccaggttattaagaacctgtgctcacctctgacacctcagttgattggggaatttgggatgaagtgcttccaaaatttatttgaattctaaattaactaagtgagttaacgtggaagccgcttttaccagcccacaagggtcacgcttgttgtgtctggaagaaggaaagggtcttagaggaacacaaattgccagactgacagtcagatatggagacaccagggtcatcttcagtttaacaaacacatgtcagaactagaaagttggaagtgagacttcaaactctacctagcattgagcataagcaggtcactgaccacaaagatattctgttcccaaagagcaccatattcgtggtcaagtaaggccagagtctagactgacatcaaatgcttgtatgattgggaggaaggagcccgaaggccaaagaggctcactaatttcattattcgattcttccaaccactgcacgttacaaacagggctgtagcctgggtctactggccaagcttccggggctgggacaggcaaggtatgtctggatgagagaaggtctttgccaagacaagcatctcttgtgccaggcagaccagcaaatgagctgcttcttgcagccccttctttggcatctcccataagccaaggcctattcatttaataaatgcagactcaggagctactaagtgccaggctcggtgccagacactgagaatacggaaatgagtacgcataaatcaagtgtgcttttcatcactgtgtttttaaaaatgttaactgatgatttcctgatcctgagagtaatgtgcagatgctccttgaactatgttggggttatgtcctgataaacccatagttagttgaaaatatcataagttgaaaatgcatttaatacactcagcctacgaaacatcatagcttagcctagcctacttaaacatgcttagaacagttccattaacctacagttgggcagaatcatctggcaacacagccctccatagagtatcgattgtttaccctggtgatgatgtggctgacgaggtgctacagctcgctgcgctggccagcatcttgagagtattgtacagctttctaccactttccactgaatacctattgtttttacaccatcagaaagttgaaaaatcttaagtagaaccatcataagtcagggactatctgtatggtagtagaaatttttaattgaatcttctgtaatcttcagcaagaaaccctgagaatattgaacgtctttgccagacaaggaaaagtgggactggggaaaaggccagttatgtgaatcctcttaaaatagggtctaaaattttataataaaaatgtattttaaaagttttgattgagactttgcctgaaatgtgaaactgaaaattacgaaattaggtttattttatcctgcatttattcagtggcactcaaaacattgtaattataattgtcaaagatatcttagaccaaaggcaaaagattatttgctttattagagtctttaaaataacagtgccctaacttctgaaacaaaagaaggaattgagtgctggataggcagcttttgaatgtgaattttcctactatttcataagataacatcctttgcttcatattttgtctggttttcggtacaatcacaaaaggatcattttaacaatggtcacttttttctaagggcttctcttgatcttttttatttaaatctttgtcttctgaagcatcttaaagtagtatccaggagaattttgactccttcaacagttaactgatctaactctgccagatccagatttatcagtggttttgcagtggttttatccatttttcaacatcactttcattgatttcatgaaagtctgcatcttttagagcaagatttctgcttcactctgtatttgatttgcattgtattgtagtcagataatcagatgtctgcactagcagtcagggacattagatagacagtttgctcactggtccgcgttcccagtcagctaagagtctcataaccatcagccttgataaatgctaatgttaagttctctaagttaaagccagtgtaggcaatgattggaacttggaagcaatcagagcacagaagaagcctggtccctggaatctctcccatatgcatcctggtggataccaagtgcctggcagaagtcataggcaactcccaaccagagcgctctccactgacatgttgcttagagctggggacagcttagattagccatatctccccaaaatttgtatttttaattgaattgattttttaaattgaatccattttaaacatgggattttatttttatttaaagaattaccttgtgggtatgtctgtgactcttgggtgcctgcctggctgccaagaagacatgtggctccatgatgactctgctttttaaggttatgccctgggcatgatctgaaaccaggagaacaaagtgggtactggtgttgccttgaatgaagtgctcccctaatgggggaagccttgcaacctttataaactgcagtcaggactgttttctcttccttagtatggatttaaacaagaatcataaacacgtgagctttctcctcatcctccttttgttgcctctccccacctgggagcaaatgcctaggactttccaagtggttctcggtgccagcagcctcataagggaagagtattatctgagttcaggttcatcagaagcagcacccgagatggactctcatgaaggggatttattggggcaagaggagcgaagggagcagaatgaggaggggaagaaaccaaacaggcatgtgggctcagctggagtctgcttcacccagtcctatgggagctctggaacattaattgtacaacagagttggtcttgtcttgaggcaaaggggacatccttgggtacccacatcaatcagaggctacggaatgcttttggggaaggtgtcataacctcccaggcaaagcgactccattcaagctgttgtacttatctagtaaggggttctgagtggagcaccaccagcatccacacaaggagtggtactgcttgccaaagcccatgctctgatacacctctgggcctccttggaaatcacagtagtagaagagaggggtatagaattaaaaacatttggtcagggcagttgacatggccagtataaacagctatgttggtgctgacaggcagcagaagggtaatccatgacatcccttcctgtaacaccatcccggagcacatgagtcatgaaccataagctcagctctcttgttcctagagatgatgtctttggtttactcttttggcctgtcctcaccaagatccaaccagaattttgaaatttttatttgactgagtaaggtggaagagagaccagaaatagttaaataaatgctgatataaatgttacgttctagcatttgggaattaacaaaaataaggtagctgagcagcttttgaatgatcaaaagtactgttgtcttaggtcaaagctaattaaactgaggtttcctcgagttccagagtacatttttgaagacatttatttcacacatgcaaaaactgaagaagtctttggggcaataaatctttttgatttcttttttttttttttttttttttgagacagagtcttgctctgtcaccaggctggagtgcagtggtgcgatctcggctcactgcaacctccacctcccaggttcaagtgattctcctgccgcagccttctgagtagctgggactacaggcatgcaccaccacacccagctaatttttatatttgtagtagaaacagggtttcaccatgttggccaggatggtctcaatttcttgacctcgtgaaccgcctgcctcggcctcccagagtgctgggattacaggcatgagccacagcgcccagccaataaatctttacttcaagaacagacctttgacttaaaattaaagcttctctcctggtttgaaaggaattcccagtgaggtattgggcattacaagagaaactggaaacagagttaggtaagcatgtaatatatgtatatgtgtatgtgtgagatacacacacacacatacacttatatatatttgcttatcctgggacactcttgagactaattataccagaatgacagaaatgaaccaggaccgtccccaggaaaccaagagaactaaagtcatccaagactttggcttgctgcctctgatgtccacaggccaattagccaggatttagggtagtgtctacttgggacagttgtgggtgttgcttctggcaggaggaatatgaggaagaagatggtagggaaaggccatctatggtgaatcattaatgccatgcagttcttgagacagcatttgagaaattattctctggttttccttattgaaattgccaatgcctgttctctaggttctaagagcagccctcacacttgccatcacacagctatgtaaacacctatgtctctgctgggaggtccccacctcttctgaactctgagctctacgaggacagcgattaacatctctcagatatgttctctcagtgctgaaatgtggtgtgtgatacgacaactcagctacccagtgcatgctcagggcgcgttctgaatcctgtgccatttgcatgttacatacatgagcttgccatccatgagtgtttggggacaagacagaggaagaaaaccttgggggaagggctaaggaaaggtgctccttgacagtgaggacaacttaaacagaggtgtgaacataagagcaggcagggtgtgtgtagaatagtagcatatacgtgccacggggcaggggtggaagaaccacaacagaacaggatgggccaaaatggaagctgggatcttaagatttgagactttattctgtttgcagtggggacagacatattttaagaagcttcctctggcagccagccaaatggactgaaggggaaggaaagctcatagcagcagctaccaaacatcattatccggcagaatcactaattttatcactcaataattttatgtattaaaaatgctcatcccagaccctgcagtctctgtgtctactcagaaaagactcatgctgtgcaattagagtgtggcccaggaatctgcattttatttatttatttattttttagacggagtctcgcactctcgcccaggctggagtgcagtggcaccatctctgctcactgcaagctccgcctcccgggttcacgccattctcctgcctcaaccttaaagaggctcccaaggtgatactaacgctggcgatcctgggtctctgtgtgaataacactggctaagagcacagagagatgttagaaaactaatcatcattgagatcagttatatccgagactggatgctgaaaagatatattagagtttagttttatatttatatatctcttatcttttgtttaattgtatttgggcttttaggggttttgtttcattgctattttctaagtaagagtgtattgatgtttaacaaacaaacaaaaatatacaagttattaagttcccagctcaatgaactttcacaaaatgatcaaacctgtgtaacctgcactcagaactgccttccacttattccataattactgtcttgatttctagccccatagattatttaccttttatcacctttatttttggtgcatttgataatgttcataatatattagaataataagatatgtataattggataatttaagtagatatattatggtaaatgctcacatgtttttaccagttggacacaaaataaaaatgtttttcatccacctgtctagatgccttgaaatgttagtctgagctgagatgtgagtcctggaaattggaggacctctgtaccttctcttccaaaatctgtaaacatactgtttccgcttggcagtcttgatttgctttcagtgactctgagaagccctgtggtttgtgaagagcctcttggctttcctttgaccttggttggaagccatgtgcccaggtggaaagacagcagttccctacagcctttctcttctgtttctctcaagtcgctgtgtgcagagtccagcctaagctggctacacttggaaacctctcctcacccttgtaccctccccacaccctggggagacttgctggtggacagcccagccctcactgcttcaggctttaggaagaaaccctctcttttcttggtgtgattttcttagagtttgtctttcctgaaccaccaagatctgaaaaggcaggattagggtgtgggcttaggagaaaggggccaagaagatgacagggttgccttttcatccaaaccttaggaggtctccagctcagccatggcccagcccacctcaccaggactgccctagggtttgaacccaaagcattagttaggaatgaagagtggttttgtcctcttacctgtcttcccagggaacccatgaaaaagtgggcagctggaagggggctggagacggcctggtcagggcatctcgtcccactggtgcctaccgtctgagcactgctctgaaggactcgattgccccgtggagcctgctcccacacacctgccttttgtgcagccggcccatctgttggtgctttttctttcaggaggagatgggcatctcctgtgagctgctggaatcggacttcctcaaatgcagcgtgggatttcctttcatgaggtcaaagtcaaaggtaagggacacagacgggacccttcctcagcagcaggcccccagcccttccaccagccactgattccgccgcctccctgaggtgaggagtcctcccaccccctgcctcccatagcagctggggcggccactgaagccctgacatgctcctgtccctggctgtgtacaccggggtatactccggaggggctgcatcatatggtctttctcttcgattcacatgatgtaccccaaatgtgaaagtgaaggacacaccacagcctctgcactttagcacgtgccatttagttgaccttcctaaaataattttttttctgagacattctgtgcctctttgagtcccctagacaacacagaagaagatgtggtctgtcacctatagtcctgtcattcccttgggtgctcacagttttctgaagagaactctcaaaattctcaaaacataaatacctgtatcccacttcatttttaagaagagtaaagaaattaagtcactttggtattggtatggagacagattttctaagttcaaatagtatactacagcatcttcagacattcatggaacattgtagtatgtgccatcattataaggagatacaaacataggtaaaaagatgtggtgattggaggcaaaactagaatctaaaagaccaagtctgcctttggaaatggaagctattttccctgccatgaacagagtgagactccgtctcacaaaaaaaaaaaaaaaaaaaaaaaaaaaagtgaaagcttcatccttttctcctgcctgggtcatacactcagatcattttaatctccaaggctctttggtcccagtatctagtagctatttgtaaaccaatggtgagaatattctggtgagggagaagacttggtcatttcttagcaaatcacttgaacccataagccccattgaatgcacctcgatcttggactttccagccttcagaactgtgagaaataaatgtttaaaccacccaagctagggtaatttgtgatagaatcccaaactgactagggcaaaaaggtaataactttctcactgttagggtcaatgttgttcagtgctgtgttcacatatcacccaagataatctcatgaaccacctaaaataatcttagtgtaccactcccagtgtgaacatactgtgatttgggtaacactgccccaaacaaatggtgttcaccatatacatatcaggcacgtgtgggaatgtgggaggaacccctgggtaggggttataggaccaggctctaccacaaactgtgtgatcttggcgaaaccacagtggccaagtggccaagtggcccatgactcctcggatttttttctgcctctcttcctcattctgtccacattcaccccaggaggagggaaacctcaataagtgtctgcccttggaaaatggattacatgtggatggcagagtacaggccaagtcccattagactccaggtagggtgagggtggagataaaggaggacgaccacaatccatggacactattgcctatagtaatgtatgtggcacatctgcacacaaatttaattaaaatcttttgagtaacagataataggcttaactggaaaacttgcaacagtttccatttcattttaaactccagcctatatcacatatcagacctaagatgtgtctttctctctctagtggagtgttacattttgtcaaatttttgtttgtttgagagggagtctctctctgtcgcccaggctggagtgcagtggcgcaatcttggctcactgcaacctccgcctcccaggttcaagggattctcctgcctcagcctccctggtagctgggattacaggtgcccaccaccatgcccagctaattttttgtgtgtttttagtagagacaggtttcactgtgttggccaggctggtcttgaactcctgacctcaagtgatctgcccacctaggtctcccaaagtgctgggattacaggcgtgagccaccgtgcccagccaacatttattagatagagcccacagaagtatgaacattggaatgttggttgttttcccagctggtaatgctaccactttcctcccacatacagatgctgggacctgaagcaagactgactaaacctggggattggggggcatgggagcagagggtgattccctggagaaagcccaacaagtcacccagcagagacggggctccccgtatccgcagcccagcgtgcactcccatgtccttccaaccctgagggtcctcaggctccaggccacatgctaagcctcatggctatactttggcttaccttggatggccatgtatttctctctctcacagcctgcccagtttctgacattctgttcttccaggcctccatccctgattttggcttctcacccaattcttttgcctgtcatctcactgtgctctttaatgtttttaatttaattcagatctcctcccagtgctgactctacaccagtcaagaccctgcctctctcttccttcttgtcctcttcccgccctgtctccatgcctgccccccaccccacagtaagctgaccagtcccacagcaacagaaatttctgtctagaaagagatgtccatgttcactgtagatgatggtccattgtaatggaccaatgtccgttgctttcaggaaacattcagtagaattcagtgttgcaaatattagaccattgcctagaattcaccataatggaacccaaaggtttagacattgtataagttataggctctcaaaatttgatgaaatttaagaaccgttttgtccaacctcctttttttattgaaatgcaaagacagtatcttagccaagatcacagtcagtttgtggtggaacctggtcctgtgacccctacccaagggttcctcccacattctcacacatgcctgacatgtatatggtgaacaccatttacttagggcagtgccccctactcacaggatgttcaccactaagtggtacactagataattttagatggttcatgaaattatcgtgggtgatacgtggacgcagcactgaacaacattgaccctaacagtgacccttttcaccttagtcagttcagtcatctataacaaattaccctgggctgggtggtttaaacaacagacatgtatttctcacagttcttaaggctgagaagttcaaggtcatggtcccggcagattcagttcctggcgagagttctcttcctggttcataaacagaaccttctctatgtgtgcccatctggctttcccttggtgtgtgtgcatggagagagagagatctctttgtcttctcttcttctgagtgcactaattccatcatgaaggcctcaccctcatctaaacctaagtaccttccaaagaccccatctccacataccatcacataggggggttaggccttccacatattaatttgaggagtggcggggggacacaaacattcagcgcataagacttttcaatagtcttccaatcctagccacactcaggagaacgtctccaatcctgctagcacatctttaacacttctctatcaccagcaaatctcccttttcaacaaagatggagtagaccttaggctcagaggcttccaaaggcaacagagttcagcattgctctgttttcattgtgttcatttttacaactaccttctctttttggcaagtgatcctggattcccatctatgacagtgatataaattgttcttttaaaacaatctttaaactaaaagagtaaggcaacaaaaatatgaacaaatatcccaggtgatgtaatttgcagatgtggcagaaattgaaaagatggtatgtgagtgaaacttagaaagtcccggttaaagagtgtaaacgcatcacttcctaaggagagcctcggtggcggaacaggagcagcaggtctctggccagagtatgtgtcaggcttggttttactgttaaagctgtgactttggcctgacagtcagaaagctatacataaaactaaagcttatcatgcaaatgagcttccagaggtcataaactgcagaagatggaagagaacagtttaagtttggaatgcctgctgatgccaaataccacttcctttttcactagtatgaattcagcgtgatctttgatacaagccacctgtctggggaagaggaagttctcagcttcattgttactgctcagaggtaaggggggggtttaaacacttttttcaaagatgagagatttatgggaccaggaaaggatgtgtcctggttaagctttgatgaatcccaggatgctgaggaggaagaaatggttactcagtgataaagccttgagccgcaaagtggaattggatttcttggggatggtggttgcctagtgctgcttgcatagccgccactgcagattgaactgagaggaactgggcatcagccactcagaggtgatgattctacagctgaggagagacaggcccaggggggtgaggctctagtccaaggtcagttcccacttggctgtgtatttcccagatcagacagatgtcctctgcaaattgtctggctgggcccactgctgcttttggacatggtgctgtatcccttgatggagtgggcaggtcacctgcagcctgagggcctggctgagcctgttggcagaggccccaagagatgctactcaagagagggcttaatttggaagccaagtggatggataggaaaggggatcgtggggtggcagcttctcccctcagtagcatgtgcccgcccctctccaggatagccatgagtgcctgtgggggcttctggggagttacaagatgccttctccagggcagatccagcatgccttgaagcagcatctaggtagcacttggctggcagctccagtggagggaggggcgttcaggtgggtgaacagggagacacaagctttgattggggtggtggttggacacccaaggcaaccttttcattttcacttggaaatgatcttaaacttaacagaagtcttacaagaatagtgcaaggaactcctatataccctttacccagattcacccagtgttaacattttgcctcatctattttatcatcctctttctatataattttttttgttaaccatgtgaaagttgcagaaatcatgcctcttgattcataaatacttcagtgtgcattcccaagaatgaggctgttctcttaataaactgtagtatagttatcacattcaggaaattgaacattgacactatgctattagctaatccgcagtttatgttctgattatgccagttatcccaataatgtctttttagccgcttctttttactggtccacaagacttggttattttctattgacactattttcaagatcacataatttacatcacataaaacatgactgtgatctaatagaagcctatgcaaagcatagatagggtagacttcattcccattgcacaaaatccagaagggcttcagtggggaggtagcatttaaacagaggagtctgttttcaggctgaagcaacatgggcacggcagtgaggctgtccatggggcaagaagccctgttacacctgtgtaggtggtgggcacgagagtgtactggggattcgtgcaccttctcagaagaaggatggggagcacacaagcacagtgggaatggggctgaaagaggagcctgggcgctaaaccatgggggacaaaggtcacctagaaaatctgaactatatcctgatggcactgaggagccactgaaagtttttgaaaaggggagtggcacagtgcaacagcttggccccagagcatgaggttgatgaatttgataaggggcggcagatgcccattcaaacctgaaaattctcattctcttgccatttcttggatccacagaacactcgccattgttgggcagacccatcaatgtgctctcttggtccttccacacctgaggcagcctgtatgcctgggaaggaatgtgacatggaagagatttcccttgtcaaaatagaagacacttcctgcctccacctaattcagggctaatcataacagtcagagagggcagggaaccagtattgcaattgtgaaaggttcatttgttagaataacatgtccacacagcagcagtgctctggttttggatgcatattagaatcgcctggggagctttcaaaaatatcgatgcctgatctatccccagagaccctgaccctgcctctgcctggggtgagacctgggcaatggagttttcagaagggctcaccaaatgattctaatgagcagccaaggctaagaaccactatttataatcccttactctgtgctgggcacattttcactcagtaaatatttattgtgcaccttatatttaccagttgcagtgctaaatgctgggcacatgagaaaatgacagtaacctactaaattcaagaacaccccctatgtacattaacagtgctgcatagcttcaggaagccctaggatctgtagcttcaataatataaaaatttctagtttcttaaatcacaaatgttaagatgaccatattatcttctaagcacacaccagaatatttcagatgctcatttcttttcaggcattggtgaagatatggtctgactgccccggagggcacccacacacagcgcttgactccctgctatgacggaaagatccttaaagctccttatcttgaaaactacagttaaaatctcaattgttcctttcttccatcaccaccctttgaaggtctctttgcctacttgtagatttagggggacataacattgagactgagcagtttcttgaacctctcctctcagcagccaccagcctggcttttgcagaccactggaaagtatcccagctcattagcttttggaatgacgggaagccttttgatgtttgacgtctttatctcaactcttcaacttagctcattctggagcagtcacacgatgacagatgagacggttgggcctaagccggccaaacaaacggcagggcaagacctggcaggatgctggggtgggggcgggagtgggccaggatggtgttaacccatccacaggggagtcgcctttggcctgcccacagcagtgatcccaaggcttttgtcaccccttgggaaaggaaggacaaggaagtcaggctgtgtgggcacctgatcctgctgcttttgcaaactgtggatgcccctgagggactgatgtcaccccatgtaggaagacagatgaggagccagggcagagactgtggccctatggggtcagcgtcacacagcaccattgtttcagaacaataggagggagaaggagaggggatgtgagagctatttaagtgctgttgccattcagcacttgctggttgagagaggaaggcagtggggcagggcttggagggggcagagagagggcacagagcagacagggactcagcagatgttcagggaacggcgtggtggggaacagtcaggatgagctgagccagcctcagcaggtctaggggactcttttcttccgcccatgcagggtgaacttgggaaccaactgtgaatgtaggttcaagaacatgtacccaagagccacgcattttcccaaggaataatgatcacaattcctattagaaatttaataaagtaataaagggaaactaggtcttctctctcttcctcctgttccttctcctcccttcttcttttgctcctcttccttctcgctcccaaatctggcatcaggagcaggagtcacagctgagagagccctagtttgaagtctgactgagctggttggaatctcagctctggtttgcaggggggccttgggcagttacctgatttatctgacttgctccttacctgtcaaaggtgggtgctccatctccctctggggttgctctgaggtctcagtgaggccatgctgagaaatgcccggcatagtgcctggcacatagtagccacttaacagcatcaattccctcatgttcacctttccagaatgatctcacaagaatccccgttctgtgctttctcacccggaggccttatgtggatgtattttagaatcacctggggagctttcaaaaatatcgatgcctgatctacccccatagacttgctatagccagggtctatagcgagagcttccatgatgtttatagtggtaggtttggtcagggcctctttcctgggcttggctgtccatggatgatgggtggtcctttcaggtgagacatagctgctgaagtctagcaactccttcctggctgcaataccctaacttcattggtccattgttcgtggaacaggcacttacacaagtagcacacacagtaggtgccctgcccataacccctcagccctcacccttcccaatctatccgcaaactgggcagattccggctcccagcaccagccaccctgctgaggctttctctggccagagcccactcacttgcctgacaggcaggtgccagggggttcattccaccccacccccacccccagcagcagcaacagcagctctcaggagtcagtggataaaggcctggctcccatgccctcagctaggaagactgactctgcctcacagagtccccgcgagactgggccctggctgccgacagcacgaccctcctgtatggcatgcctttattgtctcctttcctttgctctctcccttctccactctccagtcctactggcatttcctggggccacctctcgaataaactacttacactcaaatctttgtgtggaacacaaccaagacaatagagtgcccttgatagatatgtacagggaccaaaaacagactgaaggcaatgaggtgccatctgcccttggagaatgtagagattcaactctaaagtggaacagagaaagcccactgctggacagctagtgttggccagcgttcattcattctcctctctctgcacagtggcaacacggagcgctctgaatccctgcatgacaacaccctcgtgctgatggtgccactgatgcacgaggtggacacgtccatcaccgggtgagtagcctggtcctgggttgccacaacacaggagtgccctccagtggaacactgtgcttctcatatttgcatgtgtagccagccaggagccaagggctgtgccacctccacttcctcccagccttgaaaagcaggatgaagctttagctgcagtaactcatacactcctccctccttgttttctcctctgtcccacctacccacccacctggtagataatctgagaagtttgatgacaagtttaagccccataatttctttgaacattccatatacctttatgtgcatatattctcatccgcccctagtccctccagaatgctgtatggtaacaagcagcatggctcctgggattaaaatctcagctggaagttgctgggccagagattatcaccagatgtgtctccagtcctggctcacaggaggaccactttctgattagctccacaggcagtgctggctttgcttgtttctgttaactccctctgcagagccagaggtggcttttcctgatgtctataatggtctggaatgggcagggaaccatcccatcggccacactgtctgtctgggtcaagtccacggtcattcagtgccgctggcattgttggaaagcaggaccctgggctgcagtctgtggagacctgaaacaacctgtgtcagttttcaaccaaagccccagcttggaaaaatgagaactccatttctttccagcttcagaaaacagagtgcatacctctttgatagtggaaaaaagatttacacaattagtttagatcaggtgaggacccactgaacccttgacccaaatgcaagctgaactttctggaggttcacagtttctaatttttcggttttcaagtgcttctgggtctcagccttgattagcagtagaaatgttgatcccttgcagggagagccatccctgcactagcccgcactgctgggagccagtggaatgagtctccaagcattcctgctcctgagcttttggcatttttggtcatgttttttaaacatgaggtactgatggaatatatttgcaaattagcatatttttgcctctgttcacagctctatttttaactgtatcatttatttacttgtctcatcaaaggcacagcaagaatatacccagaaccaagccctatccttggggacaaagagaaaacattctccccaccacccccagacacttgatcatgtaatcagtccttagaggaccttgttgggaggtgttaacagcccctgatgaagccatcagttaaacaaatgagtcaacctctgatctctccaggaacctaaaacagctcttgccatttggtaatgctgggaactcactaccttactaaaataatgcactaaacattgaaaatggatgagttgttgtctattcggacttagtctcaaaaatctgccattgttgtgtttaggtgagtgagtggcctccagcatctagaagtcgatatttgtctgggagtgtcagtcagagctttgtttcttctcaggaatgtgttcatataagcaacattgaaagcattgctgcaaactgagcttgaattcttctcacctcttatgtagcctccgaaatccaagggaaaatgctatcaatgaacggattcagctttcaaatgcctaacttctagtcatcttggcagtctgataaatttaagttttttaagtgaatttgtcatagagtggggtttaggatgccaaatacataactcatttatatttattttttaaaagcttatgatcatcttcttcaacccataaaacatttttcgaatgacaaaacagaaaatgtatacttttataatccagtttttaaaaagtcaaagctatgataatcttgtcatttcagaaaggtaatcccagtgcatatttctccatgcagcttattgacgtaacctaagatgagaagacactactattcatgcctggtcagaaagcacagactggctatgtaacagccccagcagggaagcactgggtgcaagacactggattaaattgagacaaatgtttgcttctcagaatggcagtgaccatgggtgcttgactgtgggtggggatgacagatttcatgctttcctctttcagaatcatgtctccaacctcctttgtatatggcgagtccgtggacgcagccaacttcattcagctggatgacctggagtgtcactttcagcccatcaatatcacccttcaggtacccactcctggagacctcctctgtccgtgggggctaacggaagggcacatgggatgtctctcctacagagggctaagctcttgtcaggagaaacccttctgtggttggctggtgtggtgtgtgtgtgagatctgtaaccacacacagaatgaatccttttcgatgcctggtactctgctgtgcaggcccctctgctttttcaggatttggaaggacaggtccacgtcatgaatgccagttttccccaagaagccctctgtgtggtggaggcctcagccaatgtcccagcccagatgaccccatgaggacccctttctgttctccatcattccccaccttctgggcagggctgcctcagaggatttgctgtgtcccttcctcctgagattttcttgccagctcatccaggagcccactcctcctgcaggggaacagcctttcggaagggcagttttataagaacagaggagtgtgagcccctgtgagcccccacgggaggcacgctgctccctcactgagccatggctggcttgcccaggcacacaggcatcatttccagcaagtccacttggtgtagactgtggacctcatgaaggacactgtttcttctcttagttgggggtcagcaaactttttctgaaaagagccatggggtaatttaggctttgtgggccatttggcctctgcagcatctattcaaccatacttctgtagttcaaaggcagccatagataacacagaaacaaaattttagttccttatagacaatgaaatttgaatttcgtataattttcacatcatgaaatgtaggcccaagcgagaaaggatatcctgaaggtcccagagctgggagaagccgggctggggccaagacctggcggcactggccggaccctgtgtggatgaagtgaaggagatgggcccaactcacccataggacacaacagtccatatctcctcactctctggttctacctcccagaactcttctctgcctcttgcgtccttccccatggagagatggtttcccactctggcattcactgctgtggctaaataataattattttctttccttgtggcctctcctaggtggacttaggggatgacaaataatgacagggtgagggtctagagaatgtggcagtaaaacatttgtgggctctgacaaacaatggtcttcctctccccagagtattctcccagcaacagactgcgaaaccatgatacataacacatgtccccagctcacagaggatgtgccttctgaccaactaagcccctgctgtcacaccctgctcttgatttacaggggagaaagggaaggatggggttagagcttgtttttgagacagtagagtgattgctgtgaacagcacctctgcatttctgaattgcttctcagagttattttatttttctcctttgcttttcgtaattgggtaggaaatagataaagacctgatgggtttatttcatcttagttgtttctactctttcctactcttatagttttgggggtgtcttgcaattaaagatgtagttcagaaaattatttagaagggttcaagtaacacagaccatgtaatgaagagggtatgagtgttgaaagaaggaaaagaagaacaggggttgcacagaatataccaaatgttcttatcaccctctggggaacaaaagaaagaaatctgagggtatgcagcttatccttccagttgtttctctgaaggtaatttttacagtgagtttaaagtttggtattcaggcaaatagttttcttcacatctgacctgaaataggactcaggctagagaatccagccctggggaatgagtgattggcatgtcccttagataaactcctccgtgatccattgcctcaggaagtgcacagcattcaatccagggttgagagagttgggtctgaaagattgatagtgtgtgccattgattagaaggagatccttctgtgctagcaaagcccactttttccttgagaattgtctgactacttatttattggtataatggttgttattgtggttgtcctgcaggaaggtcactaaccagcttggcagtgataatgaccagaaggtgaaaatactgtggaaggaggccaggaatacggagaaaatgtttctatatttccttattccagtaatattgttcctgaaggagaacataagactttccatatgaacagatttttctatgcttttaaaaatcggttattcaacaagctacataattgtttaaaggctccactgccattgtacacaggagaaaggcagaaatactagtcttgggcctgctttttacatttcatcatagtttttaaacagacacattaatttctcgacaataagaggcttttttggcatcaaaatttaaagcatttccccacctgaaaaacaatggccaaaaataatgcagatattacacatgaacatttgcagagaatccagtataaagacatttgttaaaaataaagatggtaatacaagctctcctgtcctcctggctctgatgagtgaaatagtgcaaatcagcatccttttcttcattgcttaccccattcatgcttgaaatgggatttcccagacatgccaggatgtttctttttaattctgtgcactcatgtttcacttcaaattagttatttcagctatggtcagatattccttccttttctatgtcttcaggttgtttggtgaatattgttcttttttgaatcaggagttggcaacccactcatctgctctatcagtttttatctatttattctttgaagtggaaccaactattgcagaaaaccaaagacacagttttctagggaagagctagctggagctagatcttcatacatcctgtcatgtgtgaagacctggtaagatttctggctttttgttggctctgcccttctgacctcaacttcagagttgcagattccctggattctctctctagtgcccaggccaccaagcagcatgtcattccttcctctctcctacttatcctttttaaacatttagttttaaattgacaaaacttatatattttatattttactcatctttttaaaaataacacctttattgagatatgattacataccttaaagttcacccatttaaagcatacaattcaattattttaatatgtttacacaattgtgaacctgtcatcatcatctagttgtagaatatttttaaatttttttcattttaatttttgtgagtacatggtaggtgtatatatttataggatacatgagatgttttgatacaggcatgcagtgcataataatcatgtaaaatgggggtatccatcccctcaagaaatcccttgtgtttcagacaatccaattatactcttttagttactttaaaatgtactattaaattattattgactatagtcaccctattgtgctatcaattgctaggtcttattctttcaatttttttaatccattaaccatccccaccaccccccgccacagccatccccccattatccttcccagcctctggttagcatccctctactctctgtctgcatgagttcaattgttttggttttgagttcaattgttttggttcaattttgtttgattttcacaaataagaacatgtgatgtttgtctttctatatctggcttatttctttccttttttttcttttttttttttgttttgttttgttttttgaggcagtgtctcactgtcactcaggctgctggagtgcagtggtgcagtctcagctcattgcagcctcaacctcctgggctcaagcaatcctcccacctcagcctcctgagtagctgggactagagttacacaccaccacgcctagctaattttttttgtggagagggggtcgggttttagatacggggtttcaccacgttgcccagctggtctcaaacatgcctgcctcccaaggcttattttacttagcataatgacctccagttccgtccttgttgttgcaaaattttggaacatttcaatcacccccaaaagaaatttcggccttttggccagaaccaccatcttccagtaattcgccaaaatgtcgaacacaaagggaaagaggaaaggcacctgatatatgttctctaggctttttagaaaacatggagttgtttttttggccacgtgtatgcaaatctataagaaaggtgacattatagacatcaagggaatgggtactgttcaaaaaggaaggccccgcaagtattaccatggctaaactgaaagagtctacggtgttacccagcatgctgttggcattgttataaacacacaagttaagggcaagattcttgccaagaaaattaatgtacgtattgagcacattaagcactctaagagccaagatagcttcctgaaacacgtgaaggaaaatgatcagaaaaagaaggaagctggcggcacagtagctcacgcctgtaatcctaacactttgggaggccgaggcaggcggatcacctgaggtcaggagtttgagaccaacctggccaacatggtgaaatcccgtctctactaaaatacaaaaattagccggggatggtggcagccacctgtaatcccagctactcaggaggctgaggcagggagaattgttcgaatccaggaggtggaagttgcagtgagccgaggttggcccactgcactccagcctgggcgacagagcaagactctgtcttaaaaaaaaaaaaaaaaaaaagaaggaagccaaacagaaagatacctgggtccaactgaagcaccagcctgcaccacccagagaagcacactttgtgagaaccaatgggaaggagcctgagctgctggaacctgttccctatgaattcatggcataataggtgtctaaaaaatgaaagacctctggactgtttaaaaaaaaaaagaaaaaagaaaaatccttaacccattgacatagcttcttgtattaatttcttattgctgctgtaacaaattactacaacatttgtggcttaaaacaacacaaatttgttatcttacagttctgaagaacagaagtccaaaatgggccccgctgggctaaaaccaaagtatcagggcctgtgttcttgccagaggcaccaggggaaaatccacttcttgcctttgccagcctctaagggctgcctgcattctttggctcatggcccccttccatcttcaaagccagcaatggctggtcaagtcttaggatgttctctttctgatctgacttctgcctcttccctatataaggactcttgtgagtacaatgtgctcacctggataattcaagataccctctttattttgaggtcgcttgattagcaaccttaattccccctggccacataacattcacaggttccacagatgaggacatggacatctttggggggcctgtcatgctgcctgtcctactccctattcttcctgctccccagccctaggcaaccgctaatctactttctgtctctagagatctactcactttttttattcctctgcatattctgtttcttcctcgagtttcatgttcagctttttcctctccctccttgctcttactggtctctgtgacctccatctttttcctcatttctcaggaaatgattgacttctgaagacagaaaatggagaaatgctagggaaaacaagagaggcaaagttttatagaaccaaatgctgagacagaagaggggtacagttgtgcaagtgatgagctgcagattgcctggaaaccaaatcagctggctcatgtagtaaaaacagccctttctgtatattcgatcgcttggttttgggatgacccacttggtccttgagggcctcagttacctcaaactggcaaaggaaagaggttggaccagatctgtgggtctcaagtggtggttcctggaccagcagcagcagcatctcctgggaccatgttataaatatgaatctgccagccccaccctagacctactgagtcagaaactcggcatgacccccactccatacccccccaccaaaatgtgttttaacaagcccctcagatggttctgatgttttgctgaaatttgagaaccactggactagattatgatgtctgagttctcaccaagtgtaatagtctatgagtaaattcctatgcatgtaaaaagaaaagttttagcaggaagaagacaaaatgctgaaagagaatatggtaatttcaaagtttgagatttttagatgcatgttagaagtgtttctattttgttgaaatttcccgtcattcagtagttcactttacttcaagttgtgaccttccagatccgaaccttagagtttctgtatgtgatttcaaagaatcttagaatatatattgcatgacaggaaatggaggtctgctattttccactgagacttgctgtgtgtgttccacacccacaggtctacaacactggcccaagcacccttccagggtcatctgtcagcatctctttccctaatcgactctcatctggtggtgcagagatgtttcatgtccaggaaatggtggtgagttctccatttgttttcactattgctttcagctttgagccagcccattcaaattttgtattccaccctaccctgacatccaccttgagggtttggaaaattcaactcattctaccctttggagacatatctggagaggccaggggacctgtgatacctgaatttctacattgagaccatttggttaatgctgtaagaagacctctttggagatggggaagagttaattacgaaccagctcctgggatggacttcgctggctctgggaacccccagcagcatctgcagttgcatgcgtctgaatgcattttgctgagtgcattttgcacagggaaagtgcctgcagtccatgttgagaggattgtgaaagcattgctctctataggggcacgtgaaggacattcagccaaagggacagtttttccatagatagcttgaaaatcagggcagcaaggcccatatggagcaggtgaatatctgagccgagagttgaagaggacacagcccacagggtggaggttcagaaaacattgtgtgatggtgacagtaatttctggcattgctgccctctgggtcatgtggactgaaaaccagacgcatgtgaatgttgaatgtagaacaggtcactcctcccgagatgccagctcagatgttaacatccctcatgatgttccattccagttccatggcatccccttgtctttgggctctgctgacccagcagaagaaagccgccagtgttccgcacctatgatgtactatggttggaacttagcatgaggtgaacaaaccacacaggcttctggctaccctcttaaatattattaaccatgctgaccatgccacatttccccagcatctaggagtgttctcttcctagagcatgctttctgagttgttcacgtgaacatctacagtgttgcaggagcctttttttttcctatgggcaaaatcatctattgaccaaaacaagacatttaagtcactcagattctgaaggtaccccaaaaccagggataccccttttcctctttactgatcatcgagccaaggaaaagccactggaagggacttgggctcacacttacaaatagctggcttgcatggaaggcattagaagtggtttcctgaagacctggacaactgcctggctatcgttctggctgagtggaccctcagatacccaagtggtgtgagctggctgcactctgttctttgggctctgagaaacaaatcctttggattttcaaaactatatttagaattttcataaagtctgtaacagacttggccctaggatggccaagtctccatctggatagcccagcctgtgatcaaaggctgtgggcatcttcatcgtatggaaaagtaaattcactggcacatctcactaagcaagtaggaaagctctctgtgttcttataaacgatcaccactgagcccagaatgacaacaagagtagaagcataaaagcgagtgcatgaggtgctgtagtgaagaggcgagagtccccagatacttgtttcagaggcccacagctggcacaccctctgccttaaagccctcggcaagggcctcctgtggctccgcccctcccttgctcagcagggcctgagaatgctcactgggtcaggtgtgattcagagctcatgacggtttccactttggccttatgggactttgaatggagcagggctttcattctggggatttgggtggcttggtgcaagtgaaattcagtcctattaggagaaaccagcactcattctctgtactgcactaggaggtgaccctttggcctggtggcattccctccccacccccactctcagccaccaccattccccaacctccaaaggctactgaacagctgggcaccagctggacatgttaagccaactgaagcagaaacagattataggcatggagggaaggctcatctgtcattcctctccacacccttgggaccctcaaattgtttctccctctctaacagtgcccttggtgtctgtattgcctgtgatcatcatccatagagcataatgaggatgggcttactcgccctatgggccctgggctgtcaccctacctacggacccacgtgtggcacagttttctgacttggttcagaattcatttagaagtctctggggctgcttctggggtccctgggcaggaccaacctgcctctagctttcaccaaagagtcttttgtgtttgcccaaagcatttcttgaggtccagctgtctgtaagtggagagtgtctggcttatatatgggaggtttttacggggagcctaatgaagtgtaaccactccaaactcccagccttggctcgtgatcttctttccttgtagctaatgtctctgagcccctctgctgtgcttgtatttaccttaaaaacagagccacggtggtggcctgaggaaagactatcaattttcactgcttcccacccacgggggttgtgtggaccctactctgacttcccacagcacagaaaaaaaaggaaacaggtcactgtggacctagtgtctgtccatcaggaagccaggttgtaatgatcatgaaaataatagaggggaagaatgacagacctttctagtctatctgaaatagcaaaattactagtaacaaatcattcttgatttgttcacaaacactggctcagcaagtacctattacgtgccaggctccaaggagaggaataagtcccacatctgccccagaactcactgtcttgcaggaaacagatacataaaatgccattgtaataccgtataacaaatgcaataatggaggcatgcccagaccccaggatgctacaaaggttcagtgcttcacaaaggaacctcttcaagtcagggcttagaggatgtctagttcaccaagagaacaggtgaagaagagaacattccagatagaggaacagtcaccacttgtgagtgtatgatgagtatctgctgtgctgggagctacacccggttctccattctgtttgcctagctcttatacaaataggcaagagtaagtgttccgtatgccttctgcagatgtacagcagatagatattttggcagaatgacagagagtactgaaccacagtcatttcctctgtcagtttgtaaattaatcactcttcttgggtacatcgtgtgtgtgctgtagacctgaaccttcctacctgctgacttaggcatggagaaggccaagctccctgtttgatactagagtctaactacatgtcatggacattgtcagcaaaccacccttggcctgctgcaatgagcagtagctactgacctccctagcttacttttttccttctattggacagtcattctaaaaaactcacctgatttccaggaataaaatgagtgagccagacagcttatgggaggcaggctgtgtccacttgctccttagagatttctttttgaagtgaagatagatcatcttctcaatttttcagaacagacctgaaaaattgaaccacttcactttattgccattcttctgcagaggcgagccgtgtagcatagcccctgagcacaggtctaagattgcaccaagataacacatctgtcacaagcttcatggcttatgaagggaagagggtagtggtctttccaaagttaagttttactcacaatttctgaaggttcaatggaagagatgggagctttatctcagactgcaagcttcacttgatggagttaaaaacctgtatctgtgagcagctttctcacactggaggagaaggctttgggatttggctcttgttaatatgcaagaaggggaaaagtcagaaatgatagctaacagggagtgaagggctagaacttttattccaggtgaaagtactggatttttgaaagaactctagtgttagtccagaagagatataaaataaatatcataccattcattcctcctcctgcaaaaccaattgaaaatattggcctctctggcttgttgttttcttgctatggggcagtgattctaaagaactgacctgatttccaggaggtaaaattgtagggatgaatgataattttctaaggagatatatcaatgtctttgccatagggtaccattaggacattgacttcaatatggcatgaataccaacatctgttagaatattccaagttggtgccaggactcatattttagtaaactgtaaaatcttccctccccatgcttgtacagtagacagggctacccatgatgtacgatgggtatcccacaatgagtcagttgatgtgggaacttcaattaatttatagtgggactgctcacatccctatgaagaaaatatgcacctgatacatcactgaccataacaggagcttaaaattagacataaatggaggaatgaattgttttccccaaggatgacctggaggagcttcttaagttggggccatcaaatcagtcgatataatccaaagctaaagagtaaagaaattactcctgaataactgacccccccaaaaaaatgaataccatttattgctgtcccaaggctttagtagcctttttcatgtgctgtcaaatttaatccttatggcaccttcataaggtaagatcagcatcccaagttgaggaaccaagcttcaaggatttgcccaacctgacacagctgctaaaaagtagagctgggtttgtaaccaggtctgactccaaagttcacgtggttcccattgtgctgaattgcacactgctcctgaaagtgctgcccactccctaatcaccagaggcaggctcagtcaataggacagacagatgatgagtagacccccaagaatcacccaccagaggaggagcatcaacaccagggcagagaggcagcaaccgcaatcaaaagaactaataccagagggtgcagtaacaaggccaacagaaggcttctgaataagcaagactgatgtcttcagagcaatgcaaaaagacagtgtttccatgaaacagaataaactagagatttgtaaattcaagatattgatcattcaaatgaaacttcaatataagccatagagtagaataaatattaaagaataaagtaggggattcgaaacttggattttctgagaatgtattgcagaagaacaaaaaagccagttaaacttattcctttttttaaatagcaatctggaatgaaaatatcagatgatcataatataagagttagaagtcaagagagatggaaatgaaagcaagtcaagattcttgtcttggggggacaagtttatgtaccaattagctcaaggctttggtaaaataaatgtttaaatatgtaaaattttaagggcaacaaaaaacaatgtaggacatccaaaccactaaagaagaagaatttaaaacataattaaattcaaaacaatccaaaaggaaagaatttatgaagaaaaaaataaatgtataataagatggaagtaataaacctaaatatttcaataatcaaaataataattaatggattaaatgccctaaagacactctcagattagaattttaaaaatccaagtaccaaataacttgtaagaaatacaccttcaaagttacccagaatgtaaggcattcaaaaaaaaaaggcaaatattaacccaaagaaataaagtatagcaatattaacagcaaatgaagtataattaaagcccaaaacccacaaacattaaacagagcaaaagaaaatatatttcagagtgttaaagatttagtccactaagaatttgtaacataaatgaaattttatataaccaacaacacagctttaaccatagaaacacaaaaagaaattgacacattcacagtcattgcaagaaaatttattgctttcccctcaaaaatcatcacacaagtaggagtaaaataatgagtatttgaataatgcaactagagttgcgatcatttatatagagaccaagacagaatgagtcagaatgtctgattttcattactgctcccttgtttaccagctatggcaacctataggaagttaccttaactccccaatcttattttcctcatctgtaaaatgaactagtagtagtacctatctcacactgtaaggactgaagaaactaatttatatggagtaattaacagagatcctaacataaataagggaatgcacattcttttcaaatgtgaacatttacaaattattcaacatacaacaacacaaaaataagcatcaatggaatttttaaagtcaaagcagtagaagccacagtctctgaccacaatgcaataaacttggaagctaaaaacaaaaggttaggcaaacaaccaaccaaaaacaaatccacttgggaaattttaaacaccattcaaattaactttttagaaaaaaaagaaatcaaagttgaagggatgaacaaattagaagtgaaagacagtgagcggttgttcatatcaaaaccaatgggatttagacaaaaccaacacagaggaaaatgccactacttacatgtggaaaatagggaagactgaaaataagtgaactaaattgacaacataaaaactagacaagggacaatgaaataaacccaactcaaagaaagtaaaatgaaggtattattaaagacaaagcatatcctgaaatagaaaaaataataacaacaaaagtattccacattagcaaaatcaaaagctgtttttttgtccaaaaaaatagacaaacctgcagcaagcttcaacaagaaataaagaagagcgatgatgccaaaaaacaacactagaaatactttttaaagaagtaccatacttatatgaagatttaaaatttataacatcttttgagctgggcatggttggctcatgcctgtaatcccaggactttaggaggctaaggcaagaagatccttgagcctaggagttcaagaccagcccagacaaggaagtaagaccttgtctccacaaaaaataaaaaacaaattagccaggcatgtggcataaactacttgggaggctgaggtgggaggatcccttgagtccagaaggtcaaggctgcagtgagccatgttcacaccactgtactcaagccaggatgacagatcctgtctcaaaaaaacaaaaacaaaacaaaaaaatcttttcaattgtattcacacaaagataaaatctgaataaaatatgcatgaggttaaaaaaaaagtccaactagactatcttagaaaaaaatgtaaaagtagacaaagacctatatcttaaaaaaaatcaccgacccagatagctatataggcagattctagtaggctttcaaggaatggataattcttatgttaatataagctgttccagagagtagaaaaagataaagcaactcattccagaaaactaacatagccctggtacagaaaccagaaatggagagcgggcacactcacgcaaaaataggaagcagtgagccaaactcactttgaaaacagatacaaaagttctaaataaattgcaaattgagggccgggcgcggtggctcacgcctgtaatcccagcactttgggaggccgaggcgggtggatcatgaggtcaggagatcgagaccatcctggctaacaaggtgaaaccccgtctctactaaaaatacaaaaaattagccgggcgcggtggcgggcgcctgtagtcccagatactcgggaggctgaggcaggagaatggcgtgaacccgggaagcggagcttgcagtgagccgagattgcgccactgcagtccgcagtccggcctgggcgacagagcgagactccgtctcaaaaaaaaaaaaaaaaaaaaaattgcaaattgattcctattagaagaataatatagtctgggtaaaacaggatgtaatccaggaatgctaagttggttctccatgaggaaactgattaatataactcattatatattattattaataataaaaggattaaatgaaaaataaccaaatgataatcttgataagggtttctaaaaagttaaaaattaaattcaacatttatttatgatattttattacatttccagtaaggaaagcatagaagacttcctcaacttgacaaagaccctttgccagaaacctataggaaacttcaagctaagtgaggaacaggcatgagtccctgctagtgtctcttcagtttagttgtgttggaggccttaacaataaaaagaaatgatagcctttattcttaaaaaaaaaagtatcctattgtaaaaattgttattgtctccctaaaaaaatccaagagaatcaactgattggccctgaggacttgtgaatacagaaggtaagagctgaagctgactgtaaactgcctgatcttcaaatgctttccccagagacacacacagacccaccaactgagggtgaaaaccttcctagatcaagatgtttacatacagcctctgaccagtcactggctgatcactaagctgtgctgatccaggacagcccctacaaaaccaggcttaaaaataaaaacaagtgataaatatatatatacatatatatatacccacacacacacacacacacacacatatacccacatacatatatatgcatacatgcaatatatattttgccagcagaaacatcagaggctacacactccaggaaaaacagactccagagactatgtctaggcaagtcactaaacaaacaaaacaaaaaaaaagtaacaactacccctcaatgggaggggtaagaatccagaattgctacaatatattatctaaaatgtccaatttaaatacacacagacactgtatatatcatatatatttctcatgtgctatacaggaagaaaaaaacagttaataaaaactgaggaacccagatgttggatttaacaaagacttcaaagcagctattacaaatgtttaaagaactaaaatcagtttaaataaagtatgacagcaatgattcatcaaataaagaatatcagtaataatattgatgaataaattaaaataagtggaaattaaataaatgaataataaaatagatggaaattataagaaccaaggggaaattctggaattgaaagtaaaacatgggctgagcatggtggctcatgcctgtaatcccagcactttgggaggctgagttgggcatatcacctgaggtcaggagttggagaccagccaggccaacatggtgaaaccctgtctgtactaaaaatacacaaaaattagccaggtgtcgtgggcaggtgcctgtaatcccagctactcgggaggctgaggcaggagaatcgcttgaacccgggaagcagagattgcagtaagccgagatgtgccactgcactccagcctgaatgacagagcaagactccatctcaaaaaaaaaacaacaaataaataaaagaaagttaaacacctgactgggcacggtggctcatgcctgtaatcccagcactttgggaggctgaggcgggtgtgaggttaggagttcaagaccagcctggccaacatggtgaaaccccatctctaccaaaaatacaaaaaattagctgggagtggtggcagatgcctgtaatcccagctactcaggaggccgaggcaggagagtcgtctgtaatctcagctactcaggaggctgaggcaggagaattgcttgaacccaggaggcggaggttgcggtgagccgagatcacaccactgcacttcagcctgggcaaaagagtgagactctgtctcaatttaattaaaaaaaaaaaaaagcaaaacacctgaaatgaacaattcattagaggggctcaatagcatatttgagctgacacagaatcagtgaacttgaagctggattacagtacagattttccaatctgaagaacagaaggaaaaaagaataaaacacaagcaaaatggttgaagccccagaggcctttggtgtgctttgtgggacaccacaaagtttatcaagatatacacaattggagttgcagagaaagacgatagagaaaagagggcagaaaaaaaaatttgatgaaatatcgttccaaaacagtggcagtgtataaactcttcaataaatgatatgaagacaattggctatccatttgggaagacattagagaaagcctgtacctcacagaaaaaaacaaacaaacaaaaaacaggtgaattaaagttagatgttaaaaaaaatatttgcagaactgaatattttcataatctttagatgggaagctcttcttcctaagcaagccataaaatcctgaaaccataaagaaaaaattaacaaatttaaacctataaaaatgttaaacttttatgtgatcaaaatacatcataagggaaaagatatttgggagaacatatttgcaacatgggtaacaaatagataatatataaattacttctacaaaataatgcagaaaagaccaaaaattataaaaatggttgaagttatatgaacaggaaattcacaaaagaagaaattttaggggctgggtgtggtggctcatgcctgtcatcccagcactttgggaggctgaagcaggaggatcacttgaggccaggagttcaaaaagaaattttaatagcaaataaacatatagaaagatgcctagcctcactggtaatcagagcaatgcaaacttaaaatgaggtttttctcctcattaaactggcaaaaatctaaaaaattgttaagatccattgttggttaagatgaagagaaatgagcactttcaaatactgctggtatgaaaggcaatttgacaataactaccaaaatttaaaatatgaatatcaacaattccacttttaggaacctgtctcaaaattttcacataatatatccaggagaaacttctaattttctgatagtaggtgtatattatcagggttctcagcataaatgttgacttctattttggtgaagcagaatataactttaataatgctcccttaggattctgagagaaagttgttagattcagaccaaaaagtatgaaatcttactaacttattacagataggtatagtgcagagatactgtatcaagtactttacaagaacaaattaatctaatcttcataataatttcttaaggaaattgaggcaaggaagagttagagggaaggccaaggtaaattggtaagtggctaagttgacgttcactcttaacagtggggttcactgtgaaataggagttcagcaggacttgtttctcaagacgcaggtcacagagaccccgctgataaagcaggatgtggtaaagaagccagctgaagacagccagaatcaagatggtgacactaatgataattcaccagcaccatgacaatttacagatgccatggcaactcctagaagttactctgtatgctctaaaaacagaaggaaccctgggttctgagaattcgcagcccctctcctgtaaaactcatgaataatccactccttttttagcatttaatcaagaaataaccattaaaataggcaagcagcagcccttggggctgtgttacctatggggtaaccaccttttatttctttactttcttaataaacttgctttcactttactctctgggcttcctcttgaattctttcctttaggaagccaacacccaccggccctcccaggccaaaccccaatttgggggttcatcctgccacaactgtacagtgtggggtcaaggggaacccttggtctttttcactgaaaaatcaactcagaaaaggcagattaataggagaaaaggcacacagatttatttaacttgtatacaggggaggcttcagaatgaagacccaatcccctggtaaggtacagaagcttatataccatcttgaggttatagaaagaatgcaggctcagagcatgaccacaaccaggttttaatggcaagacatgtcatgggggagagaaagaaggaggcttggctagcaaaggtggcattgttatgtagatgaagccttccaggtcataactcctagagagaatagatggtgaatttcttttcagacttgtaaaggtgtcagactcaatctgtcctagatctgggaaaggcctggaaagagaagggctggctgcattcaaggagattctctacaggtgcaaaatttccccacaagagacagttttgcaaggccacttctgtctgctggcccagcagcagccatttcaaacgatgtcaaagaaatctattttgggataaaacattttgatttcctttagccacttgcagggtcttgcgccatccttttgtctgggtgcgtagctgtccagcagctctagcactacctggaagttgaggcatggtcatgcagaactaaggccccacccaggcctgctgagtcagagccttcacttcagcaagatccccagggattcctttgtctgttcatatttaagaagccctggtctaaagcatgagacttaaatctctgctctcccattttcttatctgtaaaatggtgatgacagtcctcaccacaagaggctgttgtggggatatttttatacacatgttcattctttcaacaaatactttgcgcccagcatatgctaagcacctagtgcagagaggaaaacagacaaaaagtaatttccagccatcatgtagcttacattctggtggggaaagagtaataagtaaagcatatagtttattacatgatggtaaatgctctggagaaaaatttaaaaagcaagaggatagggattgggaaaggctgtaattttaaacggagtggtcagggacagtttcacggagacctttattcagaagttgcagggaccaaagctatcttacgggagtttgcaatgagaatttctttgcccatgaagtccttgccaagtctatgtcttttctgagaattctctcccccttgatttcagccctgtttgatttctgacctttgaaatgccagcccccatgctgccgttgtgtggggttccgactggacatccagaagtctccgtgtgtgttctcattagctttcactctgggggagttttctgccacaatgtgaatcacttattttgctggcagcagcagttgacagtgacactgatttttaaagcctgcacatttcacatcagaaaagtcctggattttatgacttagctatgcttagaggataattgcaacaagaagtctcccctgcagccagcttattggagctgagacttgtataagagccagacctggcactttaaacagcccagcaaataacccaaaacaaaaatgaacaatgcacatttttatctatgctgctcttccccatcatgaacacatgcttctttttttcctcgccttcaccctcaattttttttgtggaaattcaatggttgactgtaccaagccagctctctgggtgagaggttccttctaacaaggattagaaacccctctcatgtaggaagaggtggatttgggggattatatgatccaaccctctacctttggacagaatacaatcgagatgtctccccagtacacagaactgcttttccagcaagttctctttgttaagccattctggtatccctcaaatcccttgttatgactatccacaattctccatgccccatgaccctttcttagctaaaatgaaaaataattgcctagttccctcatgtagagaagttgagctattaccttgacttcccccttctcttccaaaaaagattacaattcctttaattttctttcccatcctagggtgtcctctttgctctctccatattctccaaataaaaattcaaaactgagcagcaaatcctgtgcctcttcatccaacccctcctcatcatgaatcattatcactcaggaagtaaggacctggtttactatctgagaactttagtcctaataatttctctacaccaacttctagtcctaataatttatccgtataatgctcagaaacactccgagattctcagtaaaaaaaaaaaaaaaaaaaaaaaaaaatcaaggaaatcttaatggccaaagccataggtccaaaacccggcgttccctcccacccaactttccaggccattttctccaatagcccctcatccctgaccttgtcttccagcctccctggaccatgaatgctgctgaaggctctcactttgtacttccctgggccccctgcccttgctagtgacttctcctcccctctggctgtggaaagctactcattcttcaagacccagttcatatgtcctctctgtcaaggcttcccagatgccttcacagatggccctgcctcagggcctttgcacctgcctttgctgagaacactgttccctccaatctttgcatagctggctccttcttattatgcagatctgagcccagagttcactttctcaataagtcttccctgaacactttacctaaagttgcaaacccccattactctctatctcatttgtatgttgttttcttcatagcacttgtcactatgtgaaattactctcttatcatcagtcttcttccacgagattaaaaacaccatgagagtaaagggcaaggtccttattttctgtgtatttgcagcatttggtgccgagaccatagtgagtggtcagacaaatgaaagaaatggctgcttccactctgttagtggcatcctcagacacacagtcaccccttgtatctcctggggattggctccaggacatccccccatctctacttgagatcgcccagtaggaatattttgaacaaattcctttaacccatggcagaggttgccttaatttcaatgtgagaataagaaggtgaaattttgaaataagagattgaattacttatcagaaacgaaagcttcttagagcaaatttaaactctacaaactttggtcagggatttgaacacatatttccttccccctcagtttctctcacacagacactgctgatctcagtaatggccctaaactttcttttctttttcttttgcattttcttctttctgcacatgtatgaatgcaagctgaatagtcaagttcctgaaatgggtcaggattaggtttgccttaaatctttttctcaacagaagccaaacacttaaaagaagggagatggctgattgaattctggaacaaaagttacattcctaggctcttggttaatttgagcttggctagagggagaaagcgtgtgtgtttctgtgcacaagttacactcaacacacaccctctggaaggtgggggtaagcttcagtcccggctgtccgtacagagtgtggttcagaggctgccctttaacctgtgtggccagagagaataaatcaagccagcagtgctgtctccctgctgactgaaggcgcccggccttatcaaggagcccaaatgtcttgtgctcacagctgctgtgacatctggaagcattaacactttgttgccagcatgtaggctagttgaatgccgatgcgtaggtgcctggtgttttctggtctgctacatgaataggcgtcaaaagttggtggtgaggagtttgcttacgttcattccttaaaagcaacatgacacagagccttgccatggcaggggtgatgggttgttaccaaagtcgataacaggaaatctcactgaggataaacagggctcatcggccattgccgagaaacacatggttctcatttaacctgccaaggactaattgtgtatgcttcggaagcgcaaaaacaggaaaacgcttttctgacatacaccccaagtttcttcagaccaaaaagaactgcctcaatgttgttagacgctgagaagtaatgatctccccagctgtcagggagccaacctcacttacttctctttaatctaaacttatgacctaaagcatatttcaggcctcccatgaagtccttgaaacttgagacttaatgaaggacactgaggtttcacttttcactgctctggtgtatgtactctcagaaaagcagtggaagaggttagatagatggtgatgtaggaatcatggcatccagaaaatgagtgtgatttaccctttgataaaagggaactaataaagcaatatatgcaggaaatgcagagacaacccagtgaataggtgtgctgctttagcctttaagggaagatgggtctgagcttcattctttaccttaagatgggtccaagagctagaaccagaatttaaacaagcagatacaattccaaggaccatgttttgtctcatatgggggctattcactcatttattacccaaatcaacagaccattctgcttccaaaatatttcattatctgtggaaggaaaacatttttggtatgcatgtcaagtgctcagataacatatttatgtatcgctttttcactaaagagaatctgaccgcatctggaaattcttttgtgtcactgcctctctcagactacttcccatctgtatcgctttaactccaataaaaggccatccccatgcctgggaaatgggctttgtctggggaacttgtctttctctgattacatgtaaattaattaaagcccatcccgttttacagggcagcctggtggtggtggcctgcactcttgactttccagcatgttggcctgtcacacgcaaaggaagagggaggaggggaggatgcaggggcattgttttagccaaaccctaaagctgatggaaatgaaatccactggcttttatcatgagaagtgaaattgttcatgaaataatggcagcctcatacagaggctgtgcattggattatactcaacctttcctctgaaacgttggtctggaggctttgcccctttattttcagtttcagatttgatctcagtaacaccctgaccttttcagactccataccacttttcacagggatgactgccttaagggatggggaaagggttagagaaagcaagtattttatttagaagacagttttcagttagaaagggagaagacatctagagttaaagttacgatcttttcctttctgtgcttaagtgatactaggtcattctttaacttcttgctccacctgctctatccccagctctgcaggtttggagtgggctgtcatgtgattttgtttacccgtttcggttcaaagacagaactctttatttgaacactgaagctagcagggactgtccaaagccagagcccctcatattagcctagcttatgttgttgtgatcatcagactgtttctgttttttggatttttgtccttaaataaacaccttggaaccactagctacacagaggggtaaatatcagaaaatccaaatttggtgcactaatgaacacggggtctcttttcacaaagcaaaagaccatcattcttcagaaggatctcccaaagaatgccattgaaaactcctcattaccttcaaatggggtgatgcacacacgagtagcatgaaattagccatgttcatattaaggagcaatctaagatcattattgctgtttctctggccttatattaaatagtgtcattgcaattgaaaaattagagtaaatgaacagagcctgtgagcatccaccctttgtaggttatcctgagtctgcattattacagggtcttgaaatgaatggtgatacgtgaaagtatttgtcctaggattcattaatattattatattttagtctttggtcaatatgaagaaatactcaatagtaaatcatagcaacatgatttaacatgagatataatttgaagggctctttaaggctgctaagcaaccatgaatcatggtttgcatttttctagatggataatatgaagctatcttatttatctttctagaactagacaccttaggtcaggctaatcaaccagctggtatcatttctcagttattgtatgactactatctttatttcaaaccctgaagtcctaaaattaatgtcaccacagccattgtagtatgtgttcagccgcctgtgccggaataggggcttactgtcttttgatgccttggttctcagagtaggcaatgggtaattgaattagcaaagtagacattcaaaacattctctgagttttcaaactcaaggagcgtgtgacttcagagaagcaggcgataagtcagggggtgggtcatgtttacccggttgccgtcagctgcgattggtgtaatatgatatggaaaagtggcccagggatgtaactgagaacataaagtcaatgaataacacagaaacgtgagttaacaggaaacacatgttattctaaaatgaacctaggtcccttttaacccaagccaattcaacaaacatagcttttagatcataccttttaggtttttttttttttacccaaaaaccacactggggatgactccagccgtggctcatggggaacactactgtcattcagtttgttcctctgctaatttaatcttccattttcctttgattggtgatgcacgcattcaaggggcatcaagccatggacactttggtgaccctccctatccttggaaccccagccagctgatggggttcgtactggtaaaatggcaaactggtagaggcatctatgcttctgcctgttaaaaatatactaataggccaggcgtggtggctcacacctgtaatcccagcattttgggaggccgaggtggacggatcatctgaggtcaggagtttgagaccagcctgaccaacatggtgaaaccccatctctactaaaaatacaaaattagccaggcatggtggcacacacccatcatcccagctactcgggaggctgaggcaggagaatcgcttgaacccggaaggcagaggttgtggtgagctgagattgcaccattgcactccagcctgggcaataagagcaaaactctgtctcaaaaaaaaaaaaaaaaagctaaaaatatcacataccaaagctgcaaattatttctttaattttgagcgacgttaatccacatgatctaaatcatacattctcacacattctcctacttcaaagctttccctggttcctattaccttctgggtaactacctccacccacgccatgtgtaagacttgtcacatgccctcctctgtgtccaggcccatctcccctgcctcagttctggccactgctacccagcattcatccagtgcttgacctgtgttgaactccttggctctctagactccagtctcaagtttgcccctctatgcttttgcacatgctgttctcttcctggaattcctttctccctcctccctttactcctgagaagttttctttatcctttgcgatctacctgcaatgccacttcctctgggtcagatatgagaggggctgacttcctggtggagggagaaatttgtagacaagatttataatctcattaggagctgtgctctgaggggctgcgaatggataaacagtgaggtggtggtcaggtggtgtttgggcttcagtatgtggaatagctactatgcagcctggtgcaaggaagatggagtgggacagagcatcctggtggggattttcgagatgtgcttctcagacatgacaggttacttaacctctctgggcctcagttttctcatctgtaaaaaggggtggaatttaaggagagcagaagttaaagcttatctgtcacatccctgataaatgtctctgtgctgctgttctagctggttgaacctcaaaaatgtcccagtttagacaataaattatatggtcacccttctgagagcagtaccctccacacatgggtgccgtaaggattcagcatatgccgttctctaacatactaatagcacctaatattgtattatttccattgatatctgaactcagtatagagatgggaccataagcgatttcccaggatgatgtgcttggagcatgacacttagaaaaaagatcagaggacttttctgcctcttcagtgttcaaacccaggcacagggactgtgtttggctgctctgtttggggccctgtgggaggaaacctgtgtcctctctcttgctctgagtcaacagacaactcttagaagtgcctgattgagcctacaacatggaaatgccatttcctccaagccgtttatctgaccacctcagcctggaaagtaacagctcttgacttcccttctccacctgggatcagatgacgacaacatttgaaacaaagggtctgctctctttctcagtatcacacctatggaatcagccctgattcacacttcaaacccactacttcatgaagcaaggtcttgccagatcccctagagtgaacaggggattctttatcctctcacaggcctggcaccgtggtagcttctgaccatgacagctcctttcactgaggctgacccagactctgccaccaagtgatggccactccttgggctcccacagccagggttcctgacagcttccccagtcaccaccatttcatggtttcagtttgcacaatgtcctctttggggtaaaggggaggacagatgccaacagaaaaccctcagtacctgccttggtagaatacagccttgtcactgtgtcctgcatcctcctgtccttgtttgggtgcctggtgaagtccttttgttcaaattctaatagccatggacctctgccagctcccagaggccctgagagataagcagccatgtcatgagaagcatttggactccggtagcctgggaaataaatgaggactgactgggcagagaagagcaagggggcgatggccacagagtccttagccagccaaggaaatgacattgttggtcattggccggggatgcttgggttgtctgcaacacatgaaaaaagcatcacgtccccttgactttgagcaaagagtgcggttaaaaccaagttgtgggaggatggatagtcagtaattgtttatctgtgtgatgagataaggtagtcccctgctgtaatgaaaatgcacagacagttcatgaagtgaggaattagcaactaaggacaacctgagtgactacatgggccaacatcctcatgtgtagatgaggaaactgaggccctggagacccaaactggcacggctgttagcaggcagagctagggctgaagccaggactattgagtattcatcaagagcgtctgtaccacagaacttcactggggcccggacatgaccttggacaagtcgctgaactcggggacctctgtttccttatctgtcagctgaggccacaaggactgcatgatctcgcagctgccttccagaaacaacattccagaatgctctgttccccccttccagcccaagagactgtgcagaataggcctcttctcagtcagcaggcacttttgtctcccatggtctaggcaggagtcatttttttttgctacagtggtggaaatgggtcaggctggagaatgctgaggtttccaggctagtggtttcttcctctgaccacagtaagaggaaaggaagctttccctccacctctactcctctgtgactcctgccccagccccatcctcagcttccacctaagaggtagtgcaggaaagtggtgataagcagatgtctgcagctgtgtgacgtgtgtcccagcccagttctgtggcctgctacctggggagcctctggttgtcattgggcctcctgttgcctctcagcttgcctccctctgtaaaatggggacagtaggccaggggctgtggctcacacctgtaatctcaacactttgggaggccaaggcaggtggatctcctgaggtcaggagttcaagaccagcctgaccaatatggtgaaaccccatctctactaaaaatccaaaaagcttagccaggcatggtggcgtgtgcctgtaattccagctactggggaggctgaggcaggagaattacttgaacccaggaggcagaggtttcagtgagccaagatcgcaccactgcactacagcctgggtaacagagcaagactccatctcaaaaaaaaaacaaaaatgtggggacagtaatagcacctgcttcagggaactgctgtgaggactgaatgttaatgtgtggaaagcaccgagagcctggcgtgcagtaagggccatgcaagtgttaggtgccgttgtcatggctgtcacattggtacctgttcaacacacttagaggaccgcctccctccaccttgatgacccttggtaggtactgagttcctgagttttagctgaggactgaaggtgtgactgcaataggattagctggtctgaatcagacttatgtagcaccaggcaaccttcaatctccttttgaaaggggaccaccctgaacctttcagaaaaacgttgctttccccgattgaagtgattcccatgtaaccacagtcgggagcacaactggccaagattttcattcaccgcagactcagtcctcatttcccctttccagatcccaccaggggcagatgaggtgtcacattgcatcacatcacgccatcgccattaccctgttcacaggccaccccagaaactcccggcgggagacagaaactaacttctgagctgtgactctgccccttggggttgacactgaggcttaggctgtttctcactcgcttgccctgcctttcccagctccctgcccctctccgctggcgtcttgtggccagatgacagtgctagctcttcacacctgaagcacattagcaacactggctgggctggagctctgctcccaagcttcctctccctgcctagaaacctgaagcaccgatgtgcagagcaaggaggaactctgctcccacgcctgattttaatgagggatggatgcatcctgcagggctcagaggttctgtttctctaaacccagaccaaatgtgtttgggtggccaggcctcgtaatctcagcagaggaatgtgcatgccacagggctgcagaaaacagtttccagcggtctgtcagcagatgtccactccagaagacagacagggaatttggagacctacaggctttggagtgaaaaagtgatggatattaagagcacaactacacacattcggattctcaaacgcccaataaacataaatattttccatccacaatgtactatatatgcctaaatatagggcaagccccaaatagcacatcctccatttccctaattagataaatttaactctcttttttttttttgccaacttaataggaatcagaactatgattgcctttgaggtggggggagtgggcagtgggaattgactggcaagggactggtgggaactttctggagtgagagacaagttctgtactttcatgggggtggtagttactgggtgacataattcatcaaactgcaccctttagatctgtggattttaatgcctgtaaatttacctcaataaaaagaagtttggagaaatgaagaaataatcaactatctgtgtataatgtttaacttaatcatgtggttgaatgcttaaaattttataagaatgatatattaatctataatactcttcattcttatgtttcacacaataattttatccaagtgtgcatcttctgagattgatgggtttcatttctaagccacatttttagtcagcagtttaccagaatatatcatctacaatttgcctaatttatttgaaatgcagaacttcttgaatccatgttggtgctgaaatttgattggcacacaccaacgcccacttgcgtagcactgcagcagttgttttcctcatttgtcttgcaagtgaatattcatgctgctccccacatcaacagcttacgtattgctttctaaaatgggctttcaaatatttattgcaactttcaacaattgaacccaaggaataattaccaaatcttcattaaagctcattgcctccttcccattgtttccctctcgtgacctctaaaatcgtccaaacctgatgttgattgagatcatttcaggctagtgtgttttccccaaatgttgtcgttcaaataaagtaattgaggctgggtgcagtggctcatgcctataatcccagtgctttggaaggccaagacaggcagattgcttgagctaaggagttcgagaccagcctgggtaatgtggcaaaactctatctctaccaaaaaaaaaaaaaagaaaccagcaaaaaacaaaacaaaacaaaaactagccatgtgtggtggcatgtgcctatagtcccagctactcaggaggctgaggaaggaggatcacctgagcccaggaggttgaagctgcagtgagctggactactgtacttcagcctgggagacagagaccctgtctccaaaaaaaaaacaaaaaacaaaaaacaaaatttccaaattattagacacttaaattttaaaggacagtaagtcccaaactgtgagaaacttttataggcaacatcctcttttctaatagtttaacttgaggatataaaccttcaccttatttattttcagacatatatagtaaatcctggaatgtattcagatcaaagataaaatagagataaatttagcaaattttggtggtcttgttttataattcactattaatagattagcattgttagctttagtttatttgtgtagcaaaaactgaccaatagaatctaattaaactgaagagcttctacacagcaaaagagactatcaacagagtaaacagacaacctacagaatggaagaaaatatttgcaaactatgcatctgacgaaggtctgatctctgtcatctataagggacttaaatttgcaagaataaaacaactccattaaaaggagggcaaaggacatgaacagacacttttctaaagaagacatacctgcagacaacaagcatgtgaaaaactcagtatcactggtcattacagaaatgcaaatcaaaaccacggtgagataccatctcataccagtcagaatggctattattaaaaagtcaaaaattggcctggtgcggtggctcatgcctgtaatcccagcactttgggaggccgaggcgggcggatcatgaggtcaggagatggagaccatcctggctaacacggtgaaccccatatctactaaaaatacaaaaaaaaattagccgggcatggtggcaggtgcctgttgtcccagctactcgggaggctgaggcaggagaatggcttgaacccaggaggcggagcttgcagtgagccaagatcgcgccactgcactccagcctgggcaacagtgagcgactccatctcaaaaaaaaaaaaaagcaaaagtcaaaaatcaacagatgatggagaggttttggagaaaagagaatgcttatacactgttggtgggagtataaatgtgctcaaccattgtggaaagcagtgtggctattcctcaaagagctaaaagcagaactgccaattaacccagcatcccattactgggtatatatatacccaaatgaatataaatcattctaccgtaaagacacatgcacatgaatgttcattgcagcactgttcacaatagcaaagacatggaatcaacctaaatacccatcaaagacagattggataaagaaaatgttgtacagatataccatggaatactatgcagccataaaaaagaatgagatcatgccctttgcaggaacatggatggagctggaggccattatccctagcaaactaacacaggaacagaaaaccaaatatcacatgatctcaatgataagtgggagctaaattatgagaactcatgaacacaaagaagggaacaacagacactggagtctacttgagaatggaggttggaaggagggagaggagtagaaaaaataactattgggtactaggcttagtacctgggtgatgaaataatctgtaccaaaaacctccatgacacaagtttacctatataacacacctgcacatgtactcccaaacataaaataaaagttaaaaaaaaaccaacagcaaaaaaagtttttgttccctaccatgaataaaaagttgaaacattcttgaacaactatattttactcaagggcattatagacagggcaatttaacagatgcctgtggttagccatgggattgtaagcacaattctaaattatgaattactaattattaattttctggtttaacctcacatcctgtccagccttcagctacaaccagtgtgatatggtgatatataaagaagacttcatttttctaacagttcctcaatttaaacatcagaaagagtgctgttcttaaggaaatcatcaagaaagactaagcaccattgttttgtttctgatgttgctgtcactcagcaccgttgccattgctgtcagaagcaaaatcaaatcactcaccaagagctcggcaagcatgcaggtccccgtctggctcagggcagagactggtcagttatttttttggtagcaaaactctggctttagagttggaccatgagcagtcctgcttgctgctcattccctttctctagaaggacccctaaggagttttacagcaccgtgggggctttctagaatggttgaaaacctctggcagcagatcatccatcaggcttggtcccaagttccagacctgggttcttgactccatgactgttggccagtgacctaagttcagtctcattttcctcattcagacaagaattgcttgtaaggatgttcttaagtgtgctttcaaaaccatggagtataaggcttattttactccttaagtcttcctatttcctagtcacatctcatttgcatgttatatgccatctcatcaattattgggggacctaagatccacattttctattatttggccctgttgatgctacaacttctgcctttcagcttttcagccattgttctccacttcaaaatggacaaggaggaaaggtgaattggggttctaccactcctgcctctacaataagaggctccagcatcatgattcattcttgagaatgactcctctgacaggcctcttttcatttgcaggtgggccaagagaagggaaactgctctttccagaaaaacccaactccctgcatcatccctcaagaacaagaaaatatcttccacacaatatttgcttttttcacaaagtctggaagaaaagtcttggtaaggatttgtttagtggttggggtaacacgggtggtcctcactcggaagacaccagttttctatttgatatttattatttcctaaatctggttttaatcaatttgacttacaaaggcacagactgtggtcaactcctaattttcagtctgaggtttcaatcaaaatgttaaatttacattccaaatcctattacctggaaaagggataaatctttgcaacccaccaagcacaaagtaaaatgtttcttccactagaatgagtctaaacaagagtgattattcttgtgcaaacattttgggaaactgtttgataatatctactaaaacaaaacgtgtgtatcctatgacacagccattctactcttgagtatatccccaagaaaaatgagtacttgtgcttcccagaaaagacatgaaaaaggatgctcacagaaatgttaaaatagctgaaagctgagaacaatgcagatatccatcaataggagaataagtaagcaattgtggtatatccatacactggaatattacacagtaatgaaaaataacaaactactgctaatgaatgaatctcacagacagaatatattgagtggaagaagctagagacaaaagccacatattgtaatatttcacttatacgaagttcagaaatagcaaaaactaatcatgatgatagaggtcaagaaggtggttactttcagaggaatgtggatgggatggggcatgagggagcctgcttagatgctggaaatgtcctacatcctaatcagggtggtagtcctccaggtataaacacatgtaaaaatttttaaagacaggccaggcacggtggctcatgcctgtaataccagcacttagggaggctgagggggtggatcacctgaggtcaggagtttgagaccagcctggccaacatggtgaaaccctgtatctactaaaaatacaaaaattagctggatgtggtagtgggcgcctgtaatcccagctactagggaggctgaggcaggagaatcggttgaatcagggaggcagaggttgcagtgagccaagatcgtgccactgtactccagcctgggcaacagagcaagactctgtctcaaaaaaaaaaaaaaattataaagacacacacttcagatttgttctatttactatatttgttacacctccatttttaaaaagtgcaggtattgaagatggaatgacaatgcttttccaaagcctccttttttttatctttggttacatttctctaagctccttatttcagccctggcacatctcacctttatcatttcctttctcattcttttctcctgttggagaagggtgactgtttgccacttgaaaggttgggtttttttttttttttttttttttacttacatagtgagggtgatattgttgaaagcccttagacttgttagatgtagtgatacctagtgattttatagttacgactctgtctggctgaaaattttgccgtatagatgaaacatcatcaaggtatgtatacgcattttggaacctatcatataaaaaagaaaacttttgtaacttaaatttgggatttatgtttttggttttttgtttgtttgtttgttttgagatggagtcttgctctgtcgcccagggtggagtgcagtggcatgatctcggctcactgcagcttctgcctctcgggttcatgcagttctcccgcctcagcctccccagcagctgggactacaggcggccaccactatgcctggctaacttctgtattttttgtagagacagggtttcaccatgttggccaaactggtcttgaactcctgatctcaggtgacccccctacctcagcctcccgaagtgctgggattacaggcgtgagccactgcgcccagccgagatttacgtctctattgtaacttttgtgttttcttgaggaagtgtcacatgacttcttagccctcttatttacctacctaataaataggcatgaaagtatatttgccactacacaggtggaagtcacataatgtaggaaacgtgtctgtgttcaaaactcataagaatgctttcagaatgcaaaatttaagtttgtgggtttaaaaaaaaaaacaattatttctctttgtgaattcatccaattcttggtaggataaattagtgagctgttttctcccagttgcttgacttaaaggcatgctctggttcccactgggtgggaaatcccttgaatgccctctggtggcgagaaagaacgattgcatcttcttgtggatttcctctgcctggaattgccttagtcaccaagttcatggagcccactactctgtaaattgttgtggatttgtctttgttcttaattccattggaaatttttctgacttttcttctcaggactgtgaaaaaccaggaatttcttgcctaacagcacactgtaactttagtgctcttgctaaagaagaaagtcgtactatagacatttacatgctgctgaacacagaaatactgaaaaaggtaagccctaatgaaccgcacttgtggatgcatttagaagcatttgaattgttgacatctgattttgggtaaaaaaaaggaaaaaggaaagcatttgaattggtgtcctcatgacaatctggctgcccccccttttggctgtctacaagagactgtttttatttttatgtatttagggggtacaagtgcagacttcttatatgaatatattgtatcgtgatgaaatctgggcttttagtgtacccaatagtgaacatggtacccaataggtaacttttcaaccctcacccccctcccacattttggagtctccaatgtctgttaattccactctttatgcctatgggtacccattacttagctcccacttataagtgagaacatgcagtagttgactacttatgagttatttcacttagggaaatggacttcatttccatccatgttgctgcaaaagacataatttaattcttttttatggctgagtaatattccatggtgtgtgtgtgtgtgtatatatatatataccacattttctataaccagtcatccattcatggacacttaagttgattccctatctttgctgttgtgaatagtgctgcaataaacttaccagtgcaggtatattttttatacaatacttctttccctttgggtatatacccattagtgtgattgctggatggaatggcagttctatttttagttctttgagaaatctcgatactgcttttttgattgtactaatttatcttcccatcaacagtgtataagtgttcccttttctttgcatcctcaccaacatctgttgttgtagttgttgttgttgaactgtttagtaatagtctggctgccccttttgaaacttttccagcaagtgccattggtaattttgctggtagataatgccagggtaaaataccagacccttgctactcaaagtgtggtccgaggaccagcagcatcagcatcacctgagagtttcttagaaatgcagaatcctgggctccaccccagacttaataaatcggcatcttcatttttaacacattccccagggattttgtttggccatttaagtttctcatgctttagcttgcatcagaatcacctggagatcttgttcaaacacagattcctttggggtgcagtctgaggctctccagttgccacaagcacccaggtgatgccagtcctgcagtctagggacctcgctttggatgaaggttggctaaccttttctgtaaagggccagtggtaaatatttcaggctttgcaggccctacagtctcttgcaactgttcaactctgccattgtattgtgaaagcagccatagacaacactcaaataaatgggcatggctgtgatccagtaaaactttataaaaacaggcagagggccagatttgacccatgagtcctagtttaaatgacggtttgttttggtccaacttttgaacctcaggtcactttgctattatgagtttatcacaggtggttcattaaaaaaccacctcaaccagtgcatcggtggctcttgaagaatcatacaaatttcctatgatttattttaaggtgagagctgctgagaggccacttccaacaagttgctgtaaaaataattacatgtgaagataaaactaaatatgcatgttagcctcagagattccaattatttttctttagaaagactaaatgtgttaatctgtacaaacctatccacgtgtgaatgaataaccttagaaaagtcattctgtggttatttttaaataggcacagaggtaacacactgacctgagaggatgcaggcatcaggggatgtttttccattttcaatctgtagccgttacagccctcacacacctgaagagagctgtgcatagttctggtttctctggtttgctctggagggaaactggtttggggcaagttggactcacactgcagtgctttcttctccctttgtacctctccctttataaaggacagtgttggaggaggaccaggcctgacttagagcaccactggccatcctctgattccataagggaggctggaaaaccccacgtctggagaagtaccttcctgaaatgtgtccgcaggccaggctggaggactatgcctctgcatatgtacctgtcctgtttgtattcttcaaaaatggtgctgcagacagttttattgcctgtgccatacttgccactgtccatagagccctggtgacagcactggtggctgtaagccactctgatgtttcctttatcctcaacccagatggctgctgcttgcacttcagttatttgcacttaatcatgcacagctctgcagcctggttcttctgcttttctatcccggcagccagtggtgaccctttgccaaggaacatgtcccagtgactactgtccccatgggccagccaggccagtagagccgcaggcaagagagctgaaagctgtagggtgtcatatgaagccttcaaggctcattctccatgtgccctttcagcagaaaccaggagcacttccaggtgcagagaaaagcttagaacaaagttgacctggaagccagatggggccccagctgctcccagagcttcagttgccctgaagccagctacagcctcccttggggagtggagcccacatggctccaggcctcccgaaggatgtggagcagcgccagccttgtggtttgcctgggcctgcagtcgtgtttattttccttttgacctcaagatctggccccagacaagggaatttgaggttttactgttttgaccttaacaagttttcatttgaaatgtaggatctgatttttaaaatcactgtaggagccgggcgcagtggctcacgcctgtaatcccagcactttgggaggctgaggtgggcatatcacaaggtcaggaattcaagaccagcctggccaacatggtgaaaccccatctctactaaaaaatacaaaaattagcctggcatggtggtgggcacctgtagtctcagctactcgggaggctgaggcagaagaatcgcttgaacctgggaggtggaggttgcagtgagccaagatcgtgccattgcactccagcctgggcaacagagcgagactctgtctcaaaaaaaaaaaatcaccgtaggattcggatttttttggaagtattcttctttcagtctgtaaggcttttctcactgattctacaaccgtgggggcccatcctgtgccagactcctcgtctgcttggcctgtaacgttggcaattatcatcatcattatcgttattaatatccaagtttatttttatttattttaatgtttttatttaaaaaaatatttttagagacaggatcttgctctgtcacccagatgggagtacagtggctcaatcatagctcactgcagcctcaaactcctgggctcaagtgatcttcctgcctcagctagtcctcagctaggactgcaggcacatgctaccatgacaggtgaatttttttttaatcttttgtagagataggatgtttccccaggctggacttgacctcctagcctcaagtgatcctcccacttcagtctctcaaagtgctgggattacaggccttaaccatcgtgcctggcccaagattattgttattattcaagattgaaaatacagcatatcctgatacataaaaccccaactttataaaactgttaaattggtaaaagattatttgttgcttaaaattatttcttgcttaaagtgagttaactggagtaactcttttgaatgacaagcttcccaaaagcatttaaaatgtgtcttatggttgttttaagaaaagaatgataattggtgcataactcccaagtcacatatacagaccagggtccctgtgtgccccaggaaggtctttgtggtttctttggcagagatgagcaaagggtacccttggaactgttttctgtggagtcctctaccttcctgtttctttgagggtttaaccaaaggtggcatttaagtgtaagctccttgcatgacaggcaagctgggtagatgtaggtggggacaccacaggacaccttgcctgtggagcccctcctgccccacaggtagaatgttgaatgcactagttctctgctatctgtttccacgacagaagccaggctgcccttctgctccacaatcaacctgtaccactggcttgaggttctggcttctccccagaccacagtttttccagtccctgtcttcttccaaattctttctccatccctgttttggcgccattttctggttatctggatcagtgtctttgaatctgagcccacaggaagacctctgcctgcctctggctggggggtgattccagagtcttagctgtgctcccttatacccctgcccctttctccttaattcataagccagatatttaccccttccccatctctccatcaggcatcctctttcaatgtttaatggttttgattccaaaatgacttcatttaagagcaaagaaagagttaaaagcaactcatatgaagggtttgagggttgtggtcaaggcaggaagatgcctataaaatgtagatcagatgccttctgtggaatgccaggcctagatttgctctacacaattaaacagctttatttatcctcaactctttgtgaacatgtcaatatcaatatccaaatatctggctctaactgcttggaaaccacagcacacatcttgcgtgtgttgattactggcaaactccatcatttcccaccatccaccatgatctgcaaagaatccttaagagagaccctagtctgtgtttatgtgggtgcctgggatggagaggtatctagttcaatgataaaatttttgtctgggctacatggaatcatggaatttcagttctgcccagtccctctcaaggcccagccattatcatagaaaaatcttcaagtaagttgtgttgtttcttccacaggacagttcgtctgtcatccagttcatgtcccgcgccaaggtgaaggtggatcctgccctaagggtggtggaaatagctcatgggaacccagaagaggtgacggtgagtcagccaccccaggacagccctcctcagagggcaagggaagctgggtgacttggagacctggagctggaatttgagggtcaagacagtctctgagccaagatgttgggtttgtggcagacccaagactatgcctgccttggcttccaggccccccctggagaacttctgtggttcgttcttgtgatagcattgtcctttaggatgccatcattatgtgaatgtttcctgctatgattgtccaaagggaaaatggtctggaagtacacccacgtcaacagagttggatttccactgtggagccaggactatttatatctttcttagacctttcctaagacagaccacatctgccttacccgtcacattactccatgggtaaatactgtgttttggtttggtttggtttggtttttaagagacagggtctcactctgtcacccaggctggtgtgcagtcataactccctgtagccttgaatacctggcctcaagggatcctctcaccttagcctccagagtagctaggactacaggcacactaccatgcctaatttttaaattttttaaaatttttttgtcgggatagggttccacgatgttgctcaggctggtctcaaactcctggcttcaagcgatcctcctgcctcagcctcccaaaacactgagattacaggcaaacactgggtgttttaaaaacaagttgtttgaatgacttaaagagattacatccaaattgccaagacctagtaactgctctttaactatttaccacccccttctcctccataaagtgcagttggcaccaaggcctcagagacacgggagggtgtggcaaaccacgaggctgagagtggaggtgtgggagaggctggagggaagctatggccttggaattttattgccttttattgttgttcttgcaggagcaggggggttgaggggggttcatcctgtatttgacgcccacactcagatcccaggggagtagaggaggagacagcagccgatgcacttcttttgccagtgagctgtgcaatgatgctacctgtctgcttcccttctgtggaatttaccctctcttagaacagtcagtgttgctgtgacacatttacaaaagtgataagtttataatgattttgtgcttagaaactgttgttaatttactctctgacaacagtggagacaccacatgtcaaaatgtcagaatggggttcaaaccaaagactactcttacaagaccctggttgggaaagtttcatatagaaaataaatgctgggcaggcggatcatctgagatcaggagttcaagaccaacatggcgaaacgctgtctctactaaaaaatataaaaattagccagtcgtggtggtaggctcttgtaatcccagctacttgggaactgaggcaggagaatcacttgaaacccggaggcggaggttgcagtgagccaagatcatgccactctgctccagcctgggcaacggagtaagactccgtctcaaaaaaacaaaaaacaaacaaacaaaaaaaaaaaaaccaatagtaataatgcttaggacctcaataaaacttcagtcctgtccgtttttggtgagcaagagatgagaacatcagggagtctgggatgaaaatgaattcctgaatgagtgaggggttgggcattccctactcagtgaggagaatgagtgttccatgcagacttttatgctctacccacaagataagttgtccaagcactatttttgtttgtttgtttgtttctttgtttgtttgagacagggtcttgctttgtcacccaggctggagtgcactggtgcaatcatggctcactgcagcctccacctgttggctcaggccaggcactaattttaatgatagaaaccaaatggaatgatgctgggtcatttactacttagggtcagtttttctggcaggtcagatatttggagttggtgtttcccttttcttccctgccttctggccatttaactgctaattcagacctccacctgggaagtgaaaaagaaaagtggttccctgctcattgtcatagttctggtttaaaagttttatagaatgaaatacttgcccaacatgagaggtttagaatgttctggtaaaccacagtgttaataagtggaagctaatggaaatagctaacaggttttctacacgtagaatcccttgtgtagatgaaaaaaaaaaatcactgggcatattgccttccattataggactagactgtgggatccaggaaaatgttgcttaacatctcgttgttggattccaagtcatctgtactcccccaaaataccacttccattaattactgttccattttgagcactatggtgatattttcattatcaagagttcttgggaagaggccgagaggttttttttagcactcctaagaaaaaattaacacacatgggaattccacaatgccccttctccctcctttccatgactttgccttttcagtccatgagctacaatgaagttctacaatctgttgttctcaattttcctggcaggaaaaaaaaaatcttttctgagtaggaaggtttgcctttttagaacaaacacgttcttccctgcgtgattcttctgaatgcctggccttctgtcaactatcagtctgaaggggaatttccatagagcctcgccaccaaatttaaattaggcaaagtttcaaagattttagattaggcaccaaattgttatggccttggaaggaacaggaaatgtacttgcatttggtatcgagtgggggaggaaaacaatcagatttttaaccacataacgtgtgcacggtggtaaatttaactgatggagaaatcaagcaattttcctgtgatcttttttaataggagttttaaaatgcattttatattgagtagttatttcatgttttcttaaaacaattattgtattgaactaaaaataaactaggtagtttgttcacataacaaatctacattcaaagacatgcaaacaaattttccacttagtccatttttctgttctcagcattactacaaatgcctcattctgttatcacgttgaattcttcagcatcttctatatcatttccagggcatctctgggaagtagtgatgcctgtcttccctcagaagcacactgataaccccaatatacccacaattcacacttttttccttctctgaggtatgctgttttttgtcaaaacagaaaaaacacactactaggatatgaaaaacttcattctgggcctggttaggtcataaactacagaaccttaggtcatatattctcaccgggcgcttgtttctccactgcaaaaaataattcgtatttgcttggtcctttgtagtactttactgtttataaatgtagtacatttatcttcatgatgacccttaaatttaagtaaggtagtattatgctcattttatagaagaaattcaatctcaaagaggatacagtctcccaaagatcccacaagcagtaatatattaggcagagctaaactcacacactgtcactcaatatcctaatattggtacatgccatgctaataagtgtgctaaaatggatgaagcggcaatttctcaggtcccttccaatgatcctgtcctctgcttctacttgatattttttctctctttcaactagcattaacatccgaaactgtatatcatcaccacatttcatttaccatggttttttaatttaattattctttaaatttttctatttccatgttaaatccagagaaattgttactttttggaaagtttctactgctgcctgcctctgaaggccacgggacttacctgtttgtttgtcaaagcagaaatgcccaacattttgtaaacactaatttttttataactgtaaagatgattattccatacttaaaaccaattcaaaataaaataaatcctcaatacttcttattccctggggtagtaattttaattagattctattgattcattattttctcctgtgtgcctttatttgggaaatactgttagtttaccttgctatcgagtctctttccctaacaagaaaatgtcagccttacgagtcaggaaagcttttactttcactatcacatatgaagaatgaactaaacacctaacttggaaagtaaaacttaaatgagggattcaggacatttcccaaggggtcatctgaccaatttaagagttggtatgatgtgcctaaaatagcaaattaactcttctacttataataaaggtgcagatgtactgattagacatgctgacatgtacatataaaatatgcctaaaccaaattaaaagaaaacaaaatatattccatggcaatcttgaaaagtcagggagctcaatatatattaagagtatgcgctcagccaggcgcggtggctcacacctgtaatcctagcactttgggaggccaaggcgggtggaccacaaggtcaggagatcgagaccatcctggctaacgtggtgtaaccctgtctctactaaaaaatacaaaaaaaaaaaaaaaatgagctgggtgtggtggcgggcgcctgtagtcccagctactcgggaggctgagacaggagaatggcgtgaacccagaaggcggagcttgcagtgagctgagatcacgccactgcactccagcctgggtgacagagtgagactccgtctcaaaaaaaaaaaaaaaaaaaaaaaaaaagactatgctctcacaatgagagcattaaacatttggtaattaacataatttaatatgccaaaaatgagaaaatagtcaggatgagggatgaggagtacacataggaaatttttgtgattttcttcattttgattgtattgctttcttgtcttcaggagggaagattttgacttcaaaagtaacaaaatatttaagaagggaattcacatctttctgttctaattggtattcttgcgctattttctcagcagtccatgtttctggataaagtttatgattgttaagaagtgtcagtgcttctacaatggaaattttgcctttgggaatgctcttaatatttatcatatcaaagtgatgacctttcagcaatctgaattcctttggctcttgatgtgtttcagcagcttttacctgcgcggaagacacaagatctttggaatcaacatacacatcttttagaaatggcagcagcttgtcatctttatgagcaatctctcccttaatttctggatagagactaatctgctctcacaggaggctgttggtagaggggtgcctgggagcaggagagggcttcatcttgctgatttcccattctgctcggttctctcggttggaatgcctgatcctgcgagtcactgcagcccccatctcataacatgatgccctcaggtttacgccacttgtgggaacactggcacaggaagcctccagggcgtctggagcatgcacacatgtcctgtgattctttatatcttttatttttatgccatggtacaagttgtgctttacagagcatttgggtgaataactagaaatatgccatagattcttgaggctttgcctggttcactaatgacaggctccagggcgtttctcagggagcgtgttagcatgtttctaggaccagccacatcagccagacctggctctgtacagacccaaacctgagaatgccatgtgagacctgtgtgactgcagaatcaaagtgctggttgcgaggtgccaattacatgttgaatttcatcttcaacccaactctacttacctttcagggagtgatgagtagggggcgagaggggaaaatgcagaaagtgttgtttgaggcccacagaaactataaagatgaagaacaggagaaacgtagttaatcatgccctggaaagctggcctgcagaaagaaaaggaatttatctctgagaaggccttcagaaagaaaatgagtaggctccggagacgttcatctgtcttcgtgcagccataaaaagttatcaggtgaggctgaggggtgaaggcgctttctctgatccctgaattggttactgaggcccacagaagaggaaaggacccctgaagccagaaactcccccaaggcaaatcaagactttatggaatcagctctgttactgcaagacatcccctcaaactcccgtctcagtctgtgtgagaagcgtgcatgaattcttgctattttcttgatattttcaaatagcagaatacatgataaacttgtaagtccacagatgagtcggtaagctgctgccatatggagcatgcaccagactgaggtctttggtgacagctggaaagactggctctgtctcatttcagcagaatcagaatggattcgaaggctatccagtggaagtgctcagaattgcgctggaaggctggagaaccagaccaaaaatcagagggatctggaaacctgagggctataggctgcgtccaggcgcaggaagtctggcatggtgtcctggacactggacacagctatccctggcttctctctacctcgtgctctggagtcaggcagaaacctttctactttctggagttgctgagaaggttcagtgataccagcatgaagctcctagaagaagggctggtgcatagctgctgctcagggtggcacagcccctccacagtcctgcccacatgtgagttgccccttcacaccactccctaacactgccctcaccaaagatgcaagcctggtatctcaaccagagaggcatctttcaacatggcaagcaagattactccaaaaaaatgccacttaccattcctttggtgtactgcttctagaggcaaagtttactgcttttactgtcatgaaatagactgtgacttgttatttatcatttatgtgaccaattatagttacaatcatgttccatgtgacaatagaatctttccccccttgaacctcacattatgctgagatgtaggatgaagaggagggttgttgaagggtcatcaccgcccccatcctatgccatcagcagtgggtggtgagtagttctttctcttcacccacctccccacatgtgagaattaagctctgaccatcaagaattgagaaaactctcggtatagttttccaaacacacgagtcatattttctaatggtcatcatttgcttatttgtttgatgaatatttattgagggcttgctaagagccaggcactgtgctaggcactggggactcgatggggaacaaaagagacatgatccgtgccctcccagagctggccgagggggcagcagtcagcaaggacgcaaacaagaattctatttccagttgaggttagtccccagggagtagcctgctttagattgggggtcgaggaatgtttctacaaggaagctgagactggcagatgagaaggaattcgcttgccaagcatgaggaagagtgtctcagttggggaggagagctgtatggagccccaaaaggcttggcctcttcaaggcactgaaagaccaggtagcaggaagctggttagcagtgaagagaaccatggtagacctaggcagggtccatgccaggtaacaccactgggcacttacaaaggaaagccattgaaagcttctgtttggagcagggaatggcatgatccagtgtatgttctttaaaaatcgtaggccactgtgtggatggtggattttaggggcaaaggtggaaataaggagctggttagaaggctgcgattttcacctggcaagaggtcagggtggcagaggagacagagcaagtggacagtatgtctatgtcagtgaaggtgcggtgaccggtgccactcacacgtaaggaatgcttatcctggagggctgggagtgatccagtgtcatctcgatgcaaagccccttgcacagcacatccacggtggcactctgttaatagtggctgtcattgcataaagagatggccaaggagatgaaccacatgaaaaatgagcctccttctccccaaatcctcaagtcctggtcagtttactctaaatcaaagtttccagtcgtcatgatgagtatgatcatcatcattattatttttaggcaacagaacccatttctaaattgaaatatgcttcagttgactcaggggtgaggttcctggaactccctcttggtggcttccataccccctcactggacccgtgggctctaaagaagccactgctatggaaagttgtattctcagaaggttgcccagtccatcaaaggctttcactagatgctagttatacccccagtaactatgaacaagatgaaatttttaccctcaagacttccacagccccaaacaggtcaacacacacacacacacacacacacacacacacacacacacacacacacgtgcacacacatcacacccctgcagcactgtatgcatacgtgcccagagtatctgtgctgaagaggtcaagacaggtttcacagaaggagtgacccccgaacaagtattgaaggaatttcccacgtggacaaggaagatcaggcattcaagatgaagtcagatggtgtcttgggctggattctcaagaagcagaccctgagatgagggcatcatgtaagcagtttatttagggagatgctcctaatgagacccagaaataaatgggacaggataggaaagaggagaagggaagcaagggtgagatttcagggaccatcttagctccaccctgatcttgacctcggagttggtcctgcctggaagcaggggagctggggtctcacactcctgtatctgccagtcattggttggggctgttccagaggtagtaaccccaagccactttaccctctaaaagtgaggcaggcctctagaagtgaaggcatgacaaacctgggggctgggcaggccaaatcaagagaggggacccaaaaggatctgggcagagaaccgagtcttggccacagatggaaatgttctgcactcagagcttgggtgctgtgctcagtgtgcgtgtccatgtcccattaagatgaatgacctcattgtgtgaggtgtgctcgaatctgctgaattcctgtgaagtgctaggcatgtgctatgattacctcctgtcactctgacatcacccctgtgaactaggcactacaacttccatcttctttggaacagaggctccgggagtgaaggagcctgctggatgccccacagccggtcagtggaagaggaatttctggccacagctctgcctgttggcgagccctgagtctcccttgaccccttacccctctggcctgtgctgtcctgtagcccagagcccacacacagagcaggtgggaggaatcgcattcctgggtggtagacagctgaccctctgtcttaggagtgacccttggctctaatggcctcaggagcacatcatgctcagacttatttggtggtcagttggctttggaactcttcccattgtgtcctggtccttaactagatgcacagatgtgcagtcaaggggagaatgaagactcctcgggattctccatcgcttgaggtaaatgagctccatccctctctctctcaagagcaatgtgaggattatggggagtagtagatagtaaacctctcagcatggtgcctggtgcatagtaagtactctacaaatgtgatccattaccagtaacaggaattagaaagcccagctcattcctctgcaaactctgacagagaaagggattttggaaacatgacacctggcaggcatggggcatgtttgacatctctgttcatcacagcacagacttacagtgccagtcttgccaaatgtacagtttattttctgttcatttatgtcgtctccataagtctccctgtgcctctgaactggcttgccttctaggctgagttctgagagccatctgaggcatggttctgctgaaaacatttattccagccccaaccaccctgtctccctcctccctcccccacacctgcactggctattagatggaatcagaatcgggtggaaatgtcatctcactgtcacagatgttattctctttccacttcttattttatataaattccttccttctattgagacaagtgtgtgatgttgactgcagagagcatcttgcccttgtcattgaccttcagctggcctaggtctggagttgaacctcctcttggatggtattgaccgagctgtccctccgtctctggaagccctccatccagcagaagcctgggtgagatgtactgccattgtgatcatattctcaggccttgtggagacatgggcattgccagctgttacagtaggcatatttgcattgatcagaacataaaagtttccagaaacacagaagtgaatcaaatagtgtggtttaggttcacccactgcctcagactggaagctggcttctggccactccatgacaccagcttggcaacctcaggtacgttaaattctacagaagcaggcagggtgccagtgtctggacctgtctcaaaggcctgtttgccctcctcaaaggcccccttgagacagatcctcatactccccattttcgtctgttttgttagtcagcgtccagtgtgtgagccctccagccagggtccgcaccaggccatcagccatcccttcactggccagagctcctgccttccccagctcagcctgctacgaccctcacagccactcccccaaaaccagcagacttctcctcctcctcagtcaatcttctcctttcacaccacctcctttcttactgaaagcgtggatctaacctggggaaaccatttcccccgcagccctctcacgggggctttttccttgtactcccacattcagttatctcttctgacctagattcattttgcagtgtactttgcaaaatgcaaatcacatcactgccctgctcaaaatcctccagtggcttctcattcctcttaaggtaaagcatggagatcttactgcagcctccagctcctgtctctccagcatatcatgaacatcttcccgctgcttcttgttcatcctgttggctccagttcactgtccaatggcagtgtctcacccttgccaagttcactcatgccaaagggggtttgcacatcatgttccctctccttggaatgatcttccctcccttgtttagctggtaaacttctgcttgtcctttcaccttcagctcaaatggctcctcagggaactctgttcactcccatgcctctatcatgaggatcttttatcatcatgaacttctcctttgtagcacttccacagttataatgatgcatttatttttctaattgactagtagtctctagaagctggaagttctgtgaaagcaaagactgcctgttttattcatcaatgaatttccacaatgtctagcacataggagatactgcagacacatttgttggttggttggatggatggatggatggatggatggatggatgaatggatggatggaacgacggacagacggatggacagagcagatggacaggttgattgacagatggataggtggtggatgggcggatggacagatggatggatggccaggactcccccaaaagatataacatttgcaaatatatttttgaaggagagagaaaataatcacactcagagactccacttcaaatcccacatctcttttgttgcaaactgagtcgtgttcatacttcatctgattttatagcagaaatgatgttgaatgtattaatttgtatattcatgaatcatataatgaatcagtgccttggttcaggtgacaggaatgcatgcattcatgtctttattgtatacaaatcacagtttactggagtccgtagacaggaagatttatcattaccttaaagagtgagaaggacctagaactgggactctgaagtatacagctgtggttttaaaactctgttttgttggagccatgggttcccttgagtttgttcagtgcagctgaggtcaggttagggaggaacagggcttagaaagaggggctgggtcaggtgcagtggctcacctgcagaactttgggaggctgaggcatgcagataacttcagcccagaagttcaagaccagcctgggcaacatggcaaaatcctatctctacaaataataataataataattagttggctgtggtggtgtttgcctgtagtcccagctacttgggaggctgaggtgggagaatcacttgagcccacctcaagtgattgaggctatagtataggttgaggctatagtaagccaagattgtaccacttcactccagtctaagcaacagagtgagaccctgtctccaaaaaataaaaacaaatgggggctgagtagtctgggttctagctgcccacctaagaagctccattgtatacactgggatgctataggaggttgaaaatcactatgtttccaagagctcagagaatgattaattctgctgaaaacaggagtaaggcaggcttcttgggaaagcagatattggagcagagtctctcctttaaaaaaataaaatggttttacttgcctttaaaatgctcaatttaaaaaatagtaaaacgtagaaaagagaaataatattcataatatcaaaaaaacacctgtttactttaaagggttcctactgtattgctgcaaagctgaagtcttctacgtattagataatctttttattttttattttttattttatttttttgagactcactgtgtcgctcaggctggagtgcagtggcacaatctcaggtcactgcagccttcacatcctagattcaagtgattacaggtgtgcgccaccacacctggctaatttttgtagagacggggtttcgccatgttggccaggctggcttgagctcctggcctcaagttgatccacccgccttggtctcccaaagtgctggaattacaggtgtgatccaccatacccaacctatttattttattttattttattttggacggggtcttgctctgtcacccaggctggagcgcagtggcacagttacagctcacttcagcctcgatatcccatgctcaaatgatcctcctgcctcagctccccaaatagctgggacgacagttgcatgccaccatgcccagctaatttctgtgtttttgtagagacaaggtctcactatgttacccaggctcatcttgaactcctaggctcaagcaaccctcccaccctggcctcccagagtgctgggattataggcatgagccagcatcttctgattttttaacttagcataataaacatcattttcccacattattactatgttttcaaaagtatctaaaatttggaaatcaggcaaaaagatgattacatatcctttcagtgtcatactggagcatcccctcgcccctttctactcaaagtgtggtccacagaccagcagcatcagcatcatgggggagattatttgaaatctaggctctcaggccccattctagactctaattcagaatctgcattttaatagagttcctcatgtgattcttatacacagtaaaatttgagaagcactggtggaggtcccaaattctgtaaagttacctattaacttacggaaggctgataagttataaatgactcttgccagtaaagataaaaatgatttctgtttgactgaaaatatcccaaaggttagaatttattgccttgtagggtattagccagttttgtatttgatttagtaatctgatttcagtaatttttttcctgtgactacacatttttttctggtctttttaaaactagctttgccaccctgctgacttcctcaataataaattaaataaatctttgccacgtattcactatatatttgtatgagaatcatgtttttaactttttgaaaattatgctttgacaaccagctttctgtcatcatttttaatagttctgtggtattctattttgtgattgaccatagtttacttatctattgccctaatgttagacacttaggatattgctaatttagtaccaatataaataattctgcagtgaacatctttgagcataaaactttttccgtattttatatttatttcctttgagtaagttttcaagtactgaattaatggatcaaagggtatgaacatttttattttattttttaattttttatttttttaagacagagtcttgctctttcacccaggctggaatgcagtggtgccaccttgactcactgcagcctccacctcccgggctcaagtgattctcctgcctcagcctcccaagtagctgggactacagacatacaccatcacacctggctgatttttgtatttttagtagacacgaggtttcaccatgttggccagactggtcaagtatgaacattttcagatgagcaataatgagcttgtcaaatggacaaggatggaagggcatttcaggaggcaagagcagcctgcagagaggctggggaccaccggtctcacagaggagaggcctctaactggctagaatgtaaatatgtgtcctgggagcagctggaaaggcaggaaggagaccagagtatgaaggccctggtgtcctgaattagatgctcagcctaaaggaaagtcatggatactgtaaaccgagaagtgacatgatgagacctgtgccttagaaaaacaactctatcagcaaggaggcctttccaagcctcctgaaatagtgctggtgagagaagacgagatgtgagccaggaggtacctgggatggaaacaagaggatggagagaaaagttgtttagaaaggtgtaggggcttaaccaaggatcacccagctcattggtggtgatgacgggacctgatcatcagtgcttcttgcctctccatgtcgtccatgctgctgttccttccttagagttttgttttttaatctaagatatgacttcctagagctacaggacactcagctcatcactcacagatgagtttgagagttgtgatgtgagagaacaggctctgccaaagcatggagcacgcatccaaggggatgaacagcatccctaaaaataataagagatgaagcccacattccggggaagtgacagggcattcttgtggaacttgacagactaaactgtagctgctactttaacctctgtgtccacaaaaccagacctccaacgtggcgttgctggtatgcagatttcagtgtccctaagaagccatctgggttagcacagggggctgggttttacagctaaccccgctgagctcagtgtctcagtctgattcatagtcaacaataaggtttagcagacttttctcacacccaggtgctttcacagaactgccacatttccctatcagaccgccatttcacagaggaagagaaagttggttgcctacggttgcaccaggaccagattaaagccagcgctcctccctctccatctttcctaacagttcctcacagttcatctgtacaagacaccatgagagattccaaatgcaggaagtgatttgatccacagctttttaagggcaggaacccaaagacatgagtctgtctgcctttaaagatgagagctgctcatttgaactagatagaaaatagtggatttaggatgacagacttcagagcccactctgtcctaccacctcctaccagtaaatgttcttccctgagaattgcctattatctgaaaattgctctttttaataaccccaagctggaaataatctccatgcctatcaataatagcatgaataaataaacagtggtatgtccacacagaggaatactgtacagcagtgagagtggacatgccacagcctggagcaatttcccaaacataacagtgagagaaagaaaccagatgcatgcctgtaatcccagcactttgggaggctgaagcaggtggatcacctgaggccaggagttcgaggccaggagttcgagaccagccaggccaacatggtgaaaccctgtctctatgaaaaatacaaaaatcagccgagtgtggtggcatgcgcctgtaatcccagcttcttgggaggctcagacaggagaattgcttgaacccaggaggcagaggttgcagtgagttgagattgccccaccgcactgcagcctgagcaacggagcaagactccgtctcaaaaaaagaaagaaaagaaaagagaaaagaaatgaaaccaggtactgtagttcatacatcatcattccattcatagcaaggacccaaagaagcaggtgatgctaatccaagctgttagacatccttggtgggggtggggactggaaggaagggggaagggagcttctagggagccggtcaccttctgtttcttgatctgagtgctggttacacacatgcatttagcatttggtatgtgaaaattcagcgagctatacacttaggatacctatacttttctctatgtatattcgacttcaataagtaatttttaaaaagtaaaaagagctgggagtggtggctcatgcctataatgccagcactttgggagctgaggcacaagaattgcttgaacccaggatgcagaggttgcagtgagctgagattgcaccactgcactccacctgggtgacagagagaaactctgtctcaaaaaataaaataaaaactaaaaagtagccagccatgcacaacctcaaaaaaaactccctacaatgatgctaacaggaacactccatttgtcaagggcggactctgtgccagatgctatgctggggactctgtgtgcattaccccttttcaatttctgggaaggcactgttctgctcctgtcttgcggatgagaaaactgaggctcagaaactgtggtggcctgtgtgtccatttgcctcatcccctggcacacgcacacactctcctaccccagctgcgggaatggaggcaatgaagtagaggtggtctcattttctttccttatcaccagggaagagccagtaagtaattcattcagttgacaggtagcctataaagaaggccactgtcaaccaggcactgcagtgtggtgatgacaagctcagatttgggggtttggggttggctaagagctgggttcaaatcgtgactgtgcatttgaactacacaatccagagcaaatatcctctctggacctccatgttcccctctgtaaaatgggtgtggaagacctcatagggctgttgtatgacttagacaagagattgcaaaaaaaagcataaactgacacagacaatattcaataagtgttagagagggatggaagccaggccctaaaaaggttaaataagcagtgctaggcattataacatcagtattgtgcccagtcactgcttgggcttgagcaaggggctggaccagtgggcttcagcgatcagtgaggcttcttgacagaggattgaactaggtttagaaaagactttcccaaaggggaatggacattccaaagagatggcaaagcttggagaaagacctgtggttggccagcctgtctggagccaaaggagagaatgactgcccagagctgtgatttttttgtcttttgcagtgaggagcttaaatgggacagtggtgtattggggagagttatttggtagcagaagacgcaatagatgctttgaattctgcaaaaccaaactcccctgtgaccagtggggataaagcagagccgaaggggacaatcagaagtgagcactgatacatgtttaacaatcagttctctggcaggagggtaggggtgccctgatttgtttgccaaatactcccaccatagcccatttcaaactgccattgcaatgtcactaggtacggagttaggaagagatgcacagttgcctctcatgagctgatatgagccagttccacataccactgggtttcaggaaaagttgggaaaacttgcctcattggaacatgggctccaattgctgtggctcccatgggaaactacagtacagcctctcgaacgagtttctccaatgtgctaggccctaccatgagacccaagacagactgtgtcctaactctagtggggtccacagtctactggggaaactggcattaatcaaataattcctctaagtgacacattgagctgaacacttggaaagaagagctgccttacatgcagagcactcccgtgttctttgtttcaaagctgaaacaaaaggtacattgtcgttatctgttctgaatcaagaacatagtgtgtcctctaagtttttcagtacacttttgttcacttcatgatatttaaatcagggttgttgtcattacaaccctttcaagacctagggcttggatttcaagtgccttttcaggtgccagtgaaaaatccatcagtttgcaaccagaaaatcgttcagcggagcttatgtatttatttattagtaacaacagtctggatacttctctgtagttctctccaaatgtcaagcccaggctgggctccatcatgctctgcgcacttctgtttaggaaacgttttcagctggcactgtggctcgtgcctgtaatcccaaaactttgggaggccgaggtgggtggatcacctgaggtcaggagttcgagaccagcctagccaacatggtgaaaccctgtctctactaaaaatacaaaacattagccaggcacctgtaatcccagctacttgggaggctaaggcaggagaatcgcttgaacccaggaggtagaggttgcagtgagccgagattgtgccattgcactccagcctgggtgacagaacaagactctgtctcaaaaaaaaaataaaaaaggaaatgttttcactgttgcgttgcctcctaggtggtcttcgaggccctgcacaatctggagccccgtggctacgtcgtggggtggatcatcgccatcagtttgttggtgggaatcctcatcttcctgctgctggccgtgctgctctggaaggtgagtctggtgattgcaggtccccctggggtccccactcatagatgcccagctctcctgcctttccagggaagaaggagtatcctgttagagcttccttcatggcaccggtacagtgaaggacagtgacccttcaggcagggagtggaatcttggctccccttgaggccattcacaactgaggatttggaccacttcagagtgaaggcaaaagtctcagttctctcttctcttaccttcccttagagccctaacataggatggtgagaacctaactccaaaacagaagtctggggagcaactgccagaagggggcgatttcccatttgcttaaaaaagatcagaaggcgaactatagaacaattcttccttcttttcctctaaggaatgtgaggaagatttctgaccagaaaacttgagtaactgagatgggctacagtccagagtagcttcatcataacttctcccaacctcatggtggttcatttggaggtggcccagggtgcagacctgtcctgcctcaagcatcactctctcaaggagaaaggggtgtcctcatccccatgtctaggatgatttgtttgcctcacactctcctttcagagacccggagtccttttccttcagagcctctctattcatcagtaatggtattggaggctttagctgatgaaggtctgtctcttccttgtttccactgtgtccccagctccaaaacagcaccagggaccataactgcaacttcctgacaccaaagtccatacttctctagaattacaaatttcagatgtaggtgaaaacagcctcttagagtattatagatggatattttaaaataagacaactaatttctttgggattacaaaataatatgtatgtattgacctaacataacatatcaattaccaaaaaaagttgtaaaacaccaggagttcacatcccagaaataaccatgatgagcatagtattgcctcattttgacctttttctctgcatatatagatatagaccaggcattctcataacatcaacttatttttgaatagtgtattagttaaattttacagtaatatactcagcatattttcaggtgaagtacctctaaatttaaaagcagtgggttcctttttttttttaagtatggggtcttgttctgtcacccaggctggaaggcagtggcacaatcatagctctaactcctgggctcaagctgttttcctgcctcagcctcccaagtagctgggactacaggcatgcacaatgcctggctcatttttttatttttttgtaaacatagggtctcactatgtttctcatactggtcctgaactcctggcctccagctatcctcccacctcagcctcccaaagtgctgggattataggtgtgaaccaacgcacctggcctggatttgatttattaatctgggaaaaacgtatacctatttttccctgaagacagtactgtgaacatctttccatattgttcaaagcacgtttccagcacatcttaaagctgtagagtgtctgcagtctactcatccagtcccctgatactggaatttaggttgcttctgtttcacacttcttttaacagtgccacattaaatatccctggagccaaatatttgcacaaatctttcattatgtcgttaggttgaaagcctagaaatagaattgccatcaaaaggagtgtatattttaagctttttaaaaattatatttatttttttattttgagatggagttttgctcttgtctcccaggctggagtacagtggagtgatctcagctcactgcaacctccccctcccgggttcaagcaagtctcctgcctcagcctcctgaatagttgggattacaggcgtctgtcaccacaaccagctattttttttttttttttgtatttttagtagagaccaggttttgccatgttggccagggtggtcttgaactcttgacctcaggtgatcctcccgccttagcctcccaaagtgctgggattacaggtgtgagccaccccgcccggcctaagccttttattactattgcagattgccctgtagaaaggtcataccaattcaccctcccacaagcagtgtatcagaaatgtctgtttgccaatagtggatgttaccttttaaaaacaatctgccaatttgttgtttatttaatccacatcgccagatagattcttaattctcctttttctccaactccaactccttcctgctgagacagcctctggtttgtgggtggagaacaaagcctgctcagtgtttggcatctgaaaagacaaggcttcttgctgagttgagggctttggtgcatgagtgtgtgtgggtgtgtgtgtgtgtgcgtgcgcgtgtgtgtgtgtgtatgtgacttccttctgcctttatatgggctcttaaaatgagaggagctgtgtcctttatggctgggtgtgtggaaccagacagggcacagagtggggagtgttgtggccgtgccccacttccccttatagtctgcatgccctccttctggccgccccacctggctctgcctctcaggggtgtcctgtctcctctgcacagcccctgcctcctccagcccaccacctgctttgccttgcttttgctgtgtttgtttaaaaaagcatggttgcaggagatgctgtcatgggtggggagaaccctgaggtcacccagctgtgtgggatccaaagagccaggacctgagaaggcagactctgccctctgccacagactgggagggagagggcagtcacggccgccagggacacaccgtgtgcccagaccagggcttgccgtaactaacgggtggcaggaaagctttgaggaggctgttgaatgaggccacctgggtcacaacagctttgctagtcaacccagagcagtatctcatttcggctcacatttctcgaacgcttactttgccccagtccttgctttgcctggactaggcactgggatgcagcaataactgtgcccttccctgcacttgaccgcctcaccacctagcaatagacctgcaggcataatggagggtggtgagtgctgcgcagtaactgctctggaaactgagaagaaggtgccatgagtccccctcccttgcccccaaggaggagggaggattaaaaggtcacagagaacagtgtggtagatgagagcagctttcaggctgacagctgtgggcagcaatcctgactctcacacttgcctgacatgaggccttaagggggctgcttaccttctgtgaccctcagtttcttcctctgtaaaaaggagaccatcacctccagtttggtatgtagaggttatgcaaggaaaatgtttagcactgcgcttagcacacagaagccaggggatatttcataaatgaggtgtcattcgagtctgacctttagtgtggtttgagttttccaggcagggaagggtagatgaagattccatccagagggaaggaagaggtgggaaaataagcagggtttgtggagagcagcttgtaaagtttgtcagggcagtcactgacctgcagcaagaccgtctgccacagttgtgaaggccactgctaaccaggacaaagggggagcatgggaggtctgtgagcagagcggtggcatgaccagatctgtgtcgagagagagatctggggctgggtgcagtggctcatgcctgtaatcccagtgctttgggaggccaaggccagaggtttacttgagcctaagaatttgaagttgcagtgagctatgatcataccactgcaccaggtggtagagcaagaccctgtctctaaaaggaaagagagatctagggacagtgtgggggcaagagtagggccattgccatgggtcaaggtaggacaggcagggtttgctgaccagttggacttgagaggtcagggagaaaaaaagaatagctgtctctccttaagataagttcagacaaaggatgggtgcccttaatcagggtggggaaggcaagatgcgaattagtttggcaagaggaggagcttggtgttgggctttctgagtgagtggtgcttagaggaggctaggagacaaggctgggcttgcctcactccctgtcgcccccacccagcagaaggaaggtcaacagaaggaagccccttctctctacttggctacacatccgcatcattctcttcccaccgcagaccagctttctctatgtttccctacacatcgtagggagatagttgcctccagcccctccaaacttgcatctcaaggactactagccacagacgcagaatgatcagccacctctgattcctggtcccacatatctgggagagaggatctgcctggcccagctctagtcaaatgtctactcccatcaactgtggaagggaggaagggagttgggagggagagaatccacctggcccaatgtgggtcatatgtctcccacggaggctagtgggggagaaagatgcaggatggtggtttaggggatactggggaggagactctcagaaaagaaaacaattaggcaggcaccccaaaggagttcgctcctgcaggatttcatcgttgttagtgctgctgctgcctgaattgcaggctgttgtatcataccagctagctatgctgcatacaaactgcccccaaattgaatggcttttcacaaccattacatctgacaaatttctgggtcagggatccaggaagggtttggcggggtgattcttccgtcccacatgacattgagtgaggtcacttagtggcatttacctggtggctaagctggtcttcagagttcaagacagcttcattctcatgcctggcaccttggtagggacagctggaaggctggattcagtcaagtccttcttcctctccatgttgactcagggcctctccatgtggttcttccagcagatggtctgactttttatgtggtggcttaggctgaaagagagcgctgccagttgtcttaaatgctagcccacagctggcatagcatcatttattctgttggtaaaagcagtcatatgccagctcaggttcaagagaggggaaatagaccctgcttctcaatgagaggagtggcaaagccttagtggctgtcttttatctgtcacatacatgatgttcgaaatatgggcaaaatcttttctttttttttttttttttgtggcagtcccactctgtcactcaggctggagtgcagtagcatgatcttgactcactgcaacctccacctcttgggttcaagagattctcctacctcagtctcctgagtagctgggattacaggtgcctgccaccaagcctggctaagttttgtattttttgtagagacggggtttcaccatgttggccaggctggtctcgaactccaggcctcaagcgatctgcctgccttggcctcccaaagtgctgggattacaggtgtgagccaccgtgtcttttccctaaaagtcactattacaaacaaaaattcgcctaactagaagttttgttctattttaaagtagatgaaacctcatctctctcccatagtgtcatagataaaatcacagttgaactcctttggggaagaggaggcaaacagaaaatgttggtgcagcatttatgtcagagtgtgcagtctgttgaggcagtgttgtaatgtgataaggggcttggtggaggggatttctttagggaaaaaaatttttttttctcaaaaggctaactatgacttttgagacttataaagtctcaaaagactttataagaggttaaaagggcaattgaaatgtaggattattttaaagacctacgtatttctagaacttcaactacagacctcttgttaactctgattcccatgtctacaacctaagaatgatacattatgtttagtgaatagtgattcggtatcacactgacagtacggtgcagtaacccaaagacctgttaattgatggtctaaactccagcctcatatttgacttatacgggaggtcttaatgtttccggcttattgccatattccatatgtaatttcctccattcctttcaaggggaaagccactgagtgttacccagctgccactgctgaccggttgcccacttcactgagggcctttgaagacagcggttggcggggacagtgttgaagtcctcttccctttacagaaccgtggctcttgaatgtccttctagagtagctcttggcattgctacctatggtcatttgctgctgccttgaggtccggagccaaaagtggttgttcccaaaagtgttgcataaacgtgaatcgtgacatggtactgaaagctgagcagagcagctggccatgccgccgcattcacagcaccacacaagcctgaaggtctgcatgctttatgcttgcaagatggccagcaccttcactaggcaaagagtagtaggtccctactaggtggcaggccctgggcaaagggacaaagataaataaacaacagccctcacctagtctgtttcttttttttttttgacagagtctcactctgtcacccaggctggagtgcagtggtgcagtcttggctcactgcaacctccgcctcccgggttcaagcaattctcctgcctcagcctcctgtgtagctaggattataggtgtgcgccaccatgcctggctaatttttgtatttttagtagagacagggtttcaccatattggccaggctagtcttgagctcctggcctcaagtgatccacccaccttggcctcccaaactactaggattacaggtgtgagccaccatgcctggcctcaacaacagagccctcacctagtcttgaagacctttaggaaaatcagcttcagcaaagccctgaaggtgagcaggacttggcctgtgccaccagcccctggccccacctacgcatgcactgtggtgctactgtttacctaaatcagaaagcccttatcgtgtcagcaagtgtcttttccagagctgagctccaggctccctgctgatgtgctcagccagaccagcccctcatctgcctctgaccctgtgcagctcctggcggccttcaagaaagcccatctgctggcatctcaggcatcttctcatgcttggcggcagcaggccctggctctgacacaaaatccacaatgagggccccaagctaaccagaccgctcttcaaattctgaaatggatcctaatcagctttcccaaagctgagatgttagcagacactgggagccataatttaaactttatgtgcgaggattacagtagccagccaaaccaccatgcaggaagaaaactttgaaatatgaaatgcttttaaaggaagaaaagtccaaatgagtcccctctcctttcctgcagctcctgactgggttggaagatgcctgggcctggcatctcttcaagacaatcataaaggcctgtttaggaggagaaagttaaattgctcagaggtgcaggagggataacaactttgtgtgtgactggcacctttaagaaataccttcagcttatataagccagcctggtttctgtggaaagaatgaagatgatggggtgtttctccttttgaagaaagacaccccccttcccttatttagggctccaagctcttccctccctgtctttctctctgcttccctctcaccctcctcccctccccagctctgtccttgtttgtttgcagtttgccaaaacatacaggccaccactcagtgaaggagagagaccatatcctccctcactgctgtcaaccaaggaccctctctctcccatttgacccttttgcaaaccgagatggtttggagcaaagggaagtgagactgcttggccagccctatggccatgtcttcccaggaggcccaggacctacttgctcaagtggcaaagagacaggctgcagaatgtgtttgccagccctctgaaaagggctgcctcaaaccctctatcagctggggctgttccaagagcctgctgctttaggactggctttgggctcatggtttttatttgagagcattacttctgacctaaggcagaaacacttagaaaacaaatctgtgaaatggctcagagaatgtgtaaggtttggcaacccctccagaggtcactgggttatcaccttcccttcaaactgggctgggagggcatccttgcttctcctccaaagaaaaaaaatgaacagacacatgcccatgtgcttgcacacacacccttcacactgcctcaattagaaccatgtgccaatgacattcagtgggggcttgtttatgcttgggagtaaatattgggctgatgttgcactgtcgacatctcgagacagagacatgctatgtaaatagtcaagtaactgaagagaactataaacatgaagtcttgagttagtccaaaaaaggaatttgtcccaggtcctcagaatcactgtctaggaagcaacccaaaggccgcggagtgggtaggatcccccaagagaccagatgtcatggtgttgtccagctggtccctctcaccctgcagggggctggggaggaagaggctgctgctgcagggtggataccccagaactcagtcaggcctcatgcctcacgcagcacccatctaagtaaggctgtttggggcaatctgttgtttccctaggagttttctggttgcttttggatacatggttatatgagaaaattgtgtatgtctgttacgagggttcagggagctgctctttggagctgcaggaccagcagacacaaaaaccagaaagcacactgttccttcggcttccagccaagcaaagcttggcttgagtcacctcctctagggtttctatgtttcttctgctacagatagaacagttaacagagccgcttgcccctcaaatggtgaagcaagcactggaaggttccagaaaaaatgcagaaaaacattgactccattggcttggaagtgagtgtggggctgctgggcatccagcttagcccatcattaatcatttcccagcaccttcagggtgggctcagctggcaacaaaaacagagatttgcccagtgtttctcaaagctctccccaaggcacccatgcgtgctcacatgagcgggtgtgtatgtctgaaggaggcctacttaaccttgggatgtgctaatttcccaagtgtagggggactttgggtcctggcagtaatggaataggtaggactggctatgaagtactatagcaggctgaaggggctcgtgggtttcctggcatgtgtatgaagagttacagatttagaccatgtatctcttaagcaaaggaactacaggtgctccttgacttatcatattttaagtcagaaatgcatttaataccccaataaacccatcataaagtcaaaaaactgttaagtcgaggtatggtaacttggggattatttgtacttgttagatcatcaaattcagagtcactatctttagtttagtgtttatctttagtctttagtttttatattttatctttagccattatctttagttgaagtcattatctttacttaaggggatgacaaaaaccttgctaaatttagtttttcacttcctcattcctgattgacattctattagaaaatgttagctaggaagacctgttctttatttattgacttgcatttattgagaactgttgggaataatattgtgcctctagggcatttagaagataacatgcttttttctggttcttgcaaattactttcggtgacttgttctcatgggttgcttattttgagtttttatttttagagaactgatattttttctgttcttgatgaggtaatcaggcagtctctatgttacatgagttaagagtcctagacttacttagcaagtcctcaattctgacacttattataagacatctgatccagagctgcatgttcaactccatcaagccttgcctactttcctcatcggtaaaattgaccttaaaatcccacagttcaaaagactataaaagttaaataagtgaacataactgcatgtgttttgtgaattcaaagacctcataatcttttaaaatattattaaattctgttttatttgtttctttcaaaaattaacagatttttaaaaattgaaaattgaattttcaaaaaatttctcaaaaatctttgagaaaaattgagatgggacaaagactctgtgccttgttcccccttagtgtgagtcctgagtacccagctgtgtggcccacagtctagagccttgaattcactttggggaaaacagaaaaagctgtcatgatgtttcagggctggaagaggtctgagaatcccattgatctcttaggcagagacgaagacactatggctcgaagccagaaaataaccttcccaggctgggcgcggtggctcacacctgtaatcccagcactttgggaggccaaggcaggcggatcatctgaggtcaggagttcaagatcagcctggccaacatggtgaaaccccatctctaccaaaatataaaaattagccaggcctggtggtgcagacctgtaattccagctacttgggaggctgaggcaggagaatcgcttgaacccgagaggtggaggttgcagtgagccaagatcgtgccactgcactccagcctggcaacagagcgagactccatcccccacccccccaaaaaagaaacaatattagtttgacagagccaccactagactatagggtacctttgtgcaaactataatagtaaatagcaccgcttcctaaagactctttacttccatctgtcagaaaaaattcagaaaactctgattttatgagaacaagacactctactgccatctgttggaaaacagttataataaacttatacacatacatgatatctgtgatgtgagtggtatcccccagccccttaaatgcagtgtagcacctgcactactgtacctacaactccctagccatgagagtgcattatgttttaagaaatggtcttcagactctaaaaaaaggaagacatacatcagtggtagctctgatctcccatccaagagattacgcataggctgtgttaggaacaggactggagaccctgcagtgttagagtggggcatagagcttgcaaggctgtttcagccaggggtgggtgggggtgattttcaggcctaatgctgacaccactccactgagagaaagaagcttgcttccgggtgcctgcaagagatgacagtgccttcaccttgttgttagcaagaattgcatacataaaaacttgagcacatgaaagccacatgtaagagtgagttcaggtgctctaaatcctttccagattgttaacacactgtctatgtcaaatccttacactagcatagtgatgagaaagtgagccagcttttgctcttagagatgaacaagagaagtctggttcaggccgggcgcggtggctcacgcctgtaatcccagcgctttgggaagccaaggcaggcggatcacttgatgtcaggagtttgagaccagcctggccaacaagatgaaaccccgtctctactaaaaatatgaaaattagctgggcagggtggtacacgcctgcagtcccagctactcgagaggctgaggcaggagaatcacttgaacctgggaggcagaggttgcagtgagccgagatggcgccattgcactccagcctgggtgacagagtgagactctgtctcaaaaaaaaaaaaaaaagtgaaaagtccagttcagcaaggcacactaactgatgctgtttaaatctagagccctatcagctgtctgtctgattcattaagtcagcaaaaaaaatattgagtctgtaccagttaacttatgctacttgacaaaccaccccagtattcagcggcttaaaagcaatatccatctatgcaggtcacagttctgtgggttggctatttggactgagctcagtggggcagtttgagctcagcgagacttacatgtgcctctgcgggcagctgggagttggctagtctgggagggcttcaaaaaaaactggtctcttagcaggttagacataggcatttgtgtggaagcagggcagggttctgagaaagtaattggaagtgtgcacagccccttggggactgtgtaacagacacaacatctcctccctctcatccaattgtcaaagctagtctcagtggagaatcaaggctgggaaaatagactccacctcacgatgggaagagctggagagtcacatggtaaagggtgtggagggtatgtgggcatctttgcaatttatcgctggtaccaaggacaggtgagatgctgagtactggggattgaaagcacaaagcctgccttcaaagagtcctaagacaaatgcaggagataataagggggcagactgttaagtttctgcttgatagtgccatggtagggaaatgtgacttctctggaattacaactgagtgacctgggattattgacacattacaacatcagcagccaaaggtatgtgctagagaatcctatttccctgttacatccttccacagtttcatgattacattctccttcatggcatgtgaccagccacatctggccatgttttcttagccaaccacatctttatcgcaaaagaatgacatttcaagcagtagcttcttagatttccattcagtcttggtccgtttttctggccttctgtgggtgtgctgtggggatgatgtctatgactttttcttaattatccagaaaattctggccaagcaccttttcttgcagaggggagaaggtgaagaggtttcaggagagaaaagtatatgtgtgggggcgtcagaacatggcattctgatgaatgtggtcttatgctgggaagaaacctccagggctgaaatcaccaggaactcaatatctgtttacaaaactggccttgaggattgaagctcagaacacaagactcttgccagttgttctaagaaagcttctgctctttcccagtcattcaaactgcaccaccttatcgacttcccctcacggtgaatgctcaggatctccttggcaacgtgggtgaagatacctgctggctctcttgacagttctcgtctttggcttggccaataaaccccctttagggaagtagaaagatggtggcaacagacagctcctcagctccacctgccttcccttcttcaggggagcttatgaccatcagggtggctgtgatgcttccctggatgtttggctcacagtgaagaagcatgaggacaaatacacagacaacaaaaacatttgatgtgcccatgacagctgggtttgcttcacgatttgtgtaggacacgtcttatatgtgcatgcactgttggcagcagactgcagagagtcttaagggttttccaatatgacttgggaattgcaagctgatgataccatggtaccacaacctgcagtgtggcaagcctaccagcaccaggtcaagtgtgtgtctctgtttgatttcctctattcaaggggattgaaacaatgatttgagggcaagtcatttatttggaaggtgatctcaggaaaaactgttggagagcagggaaggaagccaataaaagatttgtcatcaagctggttacctctgcaggcaagctccatggggaaactggtagaacgtacacctcagggttatcccacccaaggagagagggagctggggtatttgtacacccgatacagtcagccttgtttaaaggaagatgcagagaggaatgtctgacctcataaacagagcccaccaatgttagtgagccaaggacgagagatgccgagtctctcagagcatgggaggaaaggtaagctttgggctacaaacgttgcttcactgtttggtggtgatgactatgtgagaaaaactagacacttgtcttaccatatgtgaaaagttgtaagaccaaatgtaacatcaaagggcagggtcttttcagaactaagctagaggaaattgccatcctgggtcaggatgaaacgcccgttctaagtgagaatgtgctgctgactgtggtgcacagacagcacaaattccatgggtttgagagaaagatgtaaatgacagcaaggtagaatgcagacctgcagacgctttaaacagcctctcacgtgagagcagtatttattaaattattccacagatggctaagatctctcaagatactaggtttatcaaaagccaaataagcttggggaatgtcaggtccctggtttttttccccaccggaattaatggtaatggatcctttactttccactgtacattaagactctctaaaaaaaaaaaaaaaaaaaaaaaaaagccacacttcccaaacttatttgaccatgaaaccttttttttttttttttttttttttttgagatggagtctcactctgtcgcccaggctggagtgcagtggtggcacgatctcggctcactgcaacctccgcctcccaggttcaagcgattctcgtgccccagcctcccaagtagctgggattacaggcacacaccaccatgcccagctaatttttgtatttttagtagagacagggtttcaccatgttggccaggctgctctcaaactcctgacctcaagtgatctgcctgtctcagcctcccaaagtgctgggattacaggcgtgagccactgcgcccagccatgaaacctttttttactcccaaacacctttgaacagctctcagtaactggtattccccagcacacagtctggaaaacactacaccagatgcattttagaaggaacaaacagcttacgtaatatcacccgcaggaagtccatgcattttgaaaaatgtctccacaggatgtttttcttgccagtgttttctctaatccgaggggtcctccaagcctccccagccctgtgagtgcaggtcacacctacccagggacagactgccttggggtcacaatggctgattcttcagcacttctaactcagcttctctttctttctgcctttcagatgggcttctttcgccgaaggtacaaagaaattatcgaagctgagaagaaccggaaagagaatgaagacagttgggactgggtccagaaaaaccagtgagctgccacaccagtcacatgacctgatcactagcctgtcatccttggtctttgtatcttccatatttggaagaaaaaaatcttctccagatttttcggaggccccactgatgctgttctcttcttcattctatcaagcccaggtgccagcctgaggcagccacttcggccaggtcacacgaccggggccagcaccacttcctttaaagatgaactctgaactttggagagtgagctacagagccgagcaatatttatggatgcaacacgcatggtcaaccctcaggggaaaactgttacctaaagtatttttataaatataagccttttatactgattatgtcttttatatttgtatcgatgttttattatttctattaaatagttatataattcactcaagcactgatatctggcctaaaatcttggaagtacatgtccatgaatacaaattttaaaggatgaaaatcttaccgtactttggaacttgctgtttaaaaagacagatgaaataagttgaagaaacctcatgtaatgaatccaccaggctggcagtggtgcatataaactgtgggtgtggcaagaccccgaagacatttcacatctttatcgcctcgatcaagtgtggagtcacatgctaatgtgtgctaaagaactgtaagtgttttttcatatgtacttttcattggaagattcccaacaagaatttggatggaaaacctgatccctagcaagaagtctgctctgtatcacctttatatagcagacatgtcaccctgcttctacacagatgatggatgaaagcttggagcaatgccatgtggtcatctggtaaacctcagaatggcgtctcatcctggacatcctgcatcagagttcacacaccacaaggactaaatccttgtcccctaagcaaagaattgggtctgaatgctgtgagggattgcctttttgtggtaattttcattgagagatcttcatttcccctaccaccctggctgtcccagctagtggtgattgcagattccttcccagagaggacatttaaccgttttaaaaaaaatgtcttagattgggttcccaagaagcagtccctgaaacaaggatttgtgtgcaagtaacttattaaggaagtattcccaggggataccagtaagagagtgggggaagcaggacaaggaaggagacaaagccaggcaaatgtttgtcatttcagggagagctccatgaagtttagcctcagcctgatcaggggaactccggaggaaaagttaggcctcagaggtgtcccaacctgaatcaaggggctggctgcacccagaggagatgtaaacgttttattctcaattcctgctggcgtaatggctccagtagctcaggacagtcctctaaaggacaaccacagatgcatcctcagccaggggagacacagggaaatgatgcaaaagaaatgatgcaaaggatctgagcagaacactgcccctccccaccccctgaatgtgtgagtgctgagttacggccttcagtatccaagctctctgtttgacagtagatatattgtcagatgcactgtgctgcttagttttgagtgcagtgtgattttctgaaagggcaatgagatgatggatgtagcatgctcagcactgacctggcccatagtgatcactcaataactgttaacagctatggctgctattcctactgatggataaccatctaataagacagaaaacatggggctaagagcagggtctaacggagtcttaatggcttattacagcctgccaaagtgccagctacatacacatggcatccagtgcggatgaaacaatctataaaaccaagggtctttcttatagcaccttttttactggaagctaacacgttgggagtccgtgaacattgtcaaaaagacatcaaactcaacttctgggaagacagatttttaatacacatacttggctaatactcacaaacatatctaaagttttggcaaaattatgagggtgatgggtgggtactaacctggcatggagcaggtgtgtcttttggtttcttatgcagttgactctgctgcagggagattacagatgtaacctcatgcttctcttcctggtgaacatgggaatagaccaaaaaaatcaagggtcaatggcatgaactaagctgatcctggaaatcagggatgttgcatctaactgtgggatggaggcacagaggtagctacagggagcaggatgaggcaaagaaagcagctgtcactcagagttcgcttatgagttttatcaaaagcagcaagaaaagcagtcttgggtgggttttatcacttattaacagccatttatgaggcccctgctgtgtgtcaggcactgtgcaaggtgctggaggttccccagagaacacttcagggacattttgcctcagggtggcaaaatgcagtggcatgtggactttttgaatgggatgccatttgcagctttcctttgatggactcttgttcataatgccatgttttctttaatgaatcatttaggattcttaggtgatatttctggaacagcaccatcaacagctttggccacatgcacttagagcaactaacttgcctcctgccggggtgtaggtgcgttggtgacagtgtagaagggtgattcgcaggcccatgttctgcccaccagcaaagccccactggagaagggtagactcctgtgggcagtctcagagctgggacctatttgcttctgcttgattctgcgtgggtggacccacatgagcagctgtatacccaggaggtcactaagactttataaaggcaggttttaagaaaaccagccttggcatcaccaccagcagatactgaaagcctccccaggaacctgtctggggaaggatgatgcctctgctggtctgatcgtgctgagtagcaggtgggctacggggactggggagttaagcattttgtgcagtgatagagaagtcaagcatatcgttagcgctctctcaacttgggcagttcacaagctccttcccagctcagaagccctctctatgctctcaggggaagcagatggggtggatcagtacatctgtgttacccttccagaatattatttgaaaattctacagtatgttctactttctccccttcctgcttccatggtttcactgtggaatcctataagatattctcctgagcagtattatttcagtttccttcagcttttagttgaatcttcaatgtggttttaaccaactgttcagagaactgaaatggtttttaaatatgaaaaaggacctttgtaaaaatggagtaaaacagtgccccttttttaaaaaaagttttgcttatgcttaatttacataggactcaggagagtttggaacatcctccaagtgggccatagagctgtcacaaagaagaggccatgatgtttagaaacaaggggacactagcaggaggggcagggtccactggcttagtggcaactgacaggcatccattccgaataactcagcactgaggtttcctcaggcagttctttaggaaaactgtcagcatcatgggtactcagaggtatggtagaccttgtagaagatccactaggaagtcctccttcaccaaatcatgtagctactgcccttgagccaaaggcaatgaggtttaaaacaaaaacccaacagcactcctgggaacatcctgttttccatgcggaagcatagcagatccccagacgatccgtgtgctgtatgctacctgttgaaccctagcatggtggctttttaaaaggttatttatgacttttatttttgggtaaggcattatggccaggtgcatgcagttatgtctgggttacgtgtgaaacgtacatctggtgaactgtatacttggctcaaacttctcaaaatttagaggtgctggaaaggattgtcacttggagcctttagtagacaaaaggcagaaagtgagcatcatttcagaaatgctttagtatgcacacttttagctgatattttgatatatagaataataatatacacagtggagaatattcaaagagtggctgaagggagaatacagagccagtagggccaaaatgaaacttctaggatgtcttctgaattttcagcacatggggggaataagtgaacaaatttcccaacatcgtgcaatgctttatagcacaatgatctagatttcagactgtgttaaggttttttctttgttgatgttgttgttttaattctaatgtgcacggtgtgactggcagagtgagtttaaaagctttacgagtgattaattgcttggcaggcacccacgctatctgcatttccagaactttactgatgcatccatgtacatttccactgaggaattttggtgggtggggggaggttgtgctgcctcacaatgtcacgtgtattaaagtctaagcagtcacttctgattcacttgcactgtttgggaaatgtcaggtttacaaaaacatacatgtttggaataaaaaatggctgcaaacaattcagaagttcaatctgtaatttacttgctaataagaactttttaaagtgttgaagctagggtttcaatgtaatacaacatgagcattaaagagaacatcaaggtccatctaattcacatgaacaacccacctgatgtggctgaactgtctgcagtccttggcctccacacaagaggtaccacctcctctctgcatcaccctgactcccctggcccagggctacacctaggttcttgatcttgagataaatgtgcccaaattaaatggtatggattccttattatcagtagacttctttcacatgtgcctgccagttactaagcatttttccagaagcattttgataacattcttacacatttacaaatattgtattctcttaggttttcactctccttcatctgtctattaatagttatgttcttgttcatattccacatgctgttcatttatgtgtttttttttccctagacaagactgttaccagataggggttccaatccagacaccaagagcaagttcttggatcttgggctatcaagaattcgaggctagtccctaaactgaaagcaagtttattaagaaagtaaaggaataaaagaatggctattccatagacagaacaggaccagggctgctggttgcccatttttattgttacttcttgattatatgctaaacgaggggtggattatgcatgagttttcagggaaaggagtggacaattcccggaactgagggttcctcccctttctagaccatatacggtaacttcctgacgttgccatggcatctgcaaactgtcaagacaccggtgggagtgtcttttaacatgataatgcattataattagcacataatgagcagtgaggggaaccagaagttactcttgtagccatgttggttttggtgggttttggctggcttctttataacagcctgttttaacaaggtttttatgacctgtatcttgtgccaaccccctgtctcatcctgtgacaggatgcctaacctcctgggaatgcagcgcagtagctctcagccttattttacccagcccctattcaagatggagttgctctggttcaaacgcctctgacaagaccaataaagatctatgtattttcttggtgtttttcaagagtaagcctttggctgtaccaatcaagtctactgggttttgctttctatttcgttactgcttttagatttattaaaatttcttctattgcctgatggttaaaattcatacacatagacaccacacagtataaaagagttatgaaaaaatatacaccaatgggttaagaatgattgtctttaggtaagtgagattgtcaggcttttgctttgttttattttgtttttatttgaatattcgttttctacagtgagcatgtattttgtaacaatgaaacatatgcagattacttgtaaataaaattatatctgggagactataaattgctaagccaaaagagatgccacattgtaggtctggaaagagatttgttgcagcaaagagcattgatgagcctgacacttatgacaatggtccagtgagtaatttcaagcattttaattccagtgcttcctggcttaacaaacctgccaccattactaatgctaattaaataggtttctctgaggttgcccaacctgttttcctaagccaggaaatggactcgacaaactcaaaagaatcaaaagatacaaatttaagaggaagaaaaatcactaattagtgaagtctgcttcctattcaatcaggagttttacagctcaccagattacctctcatccttaaagtctgtctggtcctcaggttactgtttagtaacagaattgatgtaagaattacttagagctcaggctgcactatcagaccgactggcagctatccatcagcaaagccacctgtccctaagatcatgtccgttcactctatgtatacatgcaactaaagtgtgtataatgagatattgccatccctgagctgaaatctaaggctgcctgctgccaaatctctgctttgcttcaaagtccaaattattttatattttattttaaatcagttttttaatcctaaaaattaaacctcaataaagggataactactatcctttgaagacaaccaattggtattttaaaaagttggcatttaaaaaagaatctccaggaaatgtttcttctagaagatgactgattaggaaaaaatgaaattatctccaattccacatctactctgaacccaccttatcaggagaatatttggctccatataatagaaaactccgaattaataaggccttaaacatgataaaagtgtgttcctctctcccaaaaaaagaagcagaagctctggtacagcagctccatgggcatcaggaatccagctcctgtctttctcagcaccctcaaggttgcctcatggtctgagatgactaccagggaactagctatcatgtccacattccaagccaaaaatagaagaggacaaaatgacatatgccccctcccttttaactattcttcctagaagttccatataacgctggccagaaattaattatgtatgtagatatacccacccactaaggaggctggggaatgcattattaaggaataagaggagggtaagtgttaagagacaactaccagttgccacaccctccactgagaaaatattcagactatagctgccttgagctctaaacttgtacgcttcaaatccttaagtctggctggatttaagcaagaggcaaacctttatttgggctggagtcagggatggggtggatgcatggagctggttaatcatattcatgtccatacaaagccctttcttcttttatgtaacttttctcctttgtgtccccaccctcactcacattcccctctctcccagaggaaccaagtctaataaatacatgcccttaaacatggatgtacatcatattattttttatgtttcacttaaatggtattgagcacacactgttttatttttccaggttgtattgatgttgctgtgtttacatttggttcattgtttctggctacagcattacattctacattatgttttcagcacatttcacttctccagcccctctgaaggaagcctttgctgctttcactgcctgctgcagtgaacactcacatggccctttatgggtggagctagaatctcatggtatctatcatatatatgacatctgaaggtggttggttacgttctcatttcgttgctagattctctctaaaatgaccacagactggacactcccagcaacagtgtatattcccacatccttgcccaaaatggaattatctgacctaaaatgttagaattacttatctttttctgatgaaactgaacattctatcattatgcactgatccttttttatctttagtaatactttcttatcttaaagtctattttgattagtatttacacaacatatctttttccatccttttattataatctttctatatccatgtgctttggatgtgtcatttgtaaacatcatacagctgaatgttaaaaatccgttctaacacaatctttatcattttactggaacatttattttatttacatttattgttattaatgaaataattggatttatttctatcatcttttgtgttttcttttgtccacctttttatacttttctctcctttctcttctttgttttcacattccattcttcccctccattattcacttttattctttatgcagataacagatactttaaaactttaagccttacaatagccaggcacagtggctcatgcctgtaatcccagcactttgggaggccgaggtgggagaattgcttgagcccaggggttcaagaccagcctgagcaacacagagagacccccatgtctacaaaaaaaattttagctgggtgtggtggtgcacacccatagttccagctacttgggaggctgaagtgggaggattgcttgagcccaggaggtcaaggctgcagtgagctgtggttgtaccactgtactctatctagcctgagcaagagtgagaccctgtctcaaaaaaaaaaaaaaaaaaaagacttatacaatatcttacttatttaacatatcacaatctagagttagtcactagtcactatcttttaatgtattttaattttatattttaaccacataaatcattgtttttgctgttttctttaatgaatgccagtctagatttgcccctatacttgccaccttcttggctcttaattgcttcttgcatctcagatattttctcctggcatcattttccttgtgcctagtacatcctttagaatttccttcagtaagaatctgctgatggcaaatgtttccattttgttttatctgaagctgtctttaattgcccgtattcttgactctttgctggtacagaattctacatcagcagttactttcagtggatgaatataacatttcattttcctcttgttcctgttgttactataaagaagtcagcagtcagcccatttgtcactcctttaaagggatcctgtcttttctcttaggtttctgtgaagattttctctttgtttttgtgtgctgcagttttcctctgaagagttatatggcatttatgcttaccttttctgcttgcaatttgctgtacgtctgtggtttgaggtctttcatcagttctcttcatctctttaaatattatctctgctccattctctttcctctcgctttatccttcttgcctctttatctaccactcctagttccatcccatcatccctctgtgcagcattctggactatctcttctagcccatttctgtattcactatcttttcaacggtgtcaaatctgctttgagacttgtttgttaagatttgggtttcaattattatattcttatatccaaaggcttttagttctccctcaaatatgatgggcacttctctgtattttcttgtttattgcatataatttcaaatttatttctttaaacataaaaatcatagtttccattttgtgtctggtaagtgcaatgaagtttttatggctctgtttctgctttctaggatttttcccctgatgatcgtcactcttggtgcttggtttccttgtgcaactagtggtttgttggtttgtttattgttagctgcttattttccttgcaaaattacttgtggtaattctttgaggtccaggatgaaatatgttctatagagagcctttgctttcacctctgccaggcaccagtctggggccataccttgaggttttatggaccacccaaataacatgaatttgaacaacacagtcatatgaaggccagcttgtggttgccacttctcagcatccctgtcaactcctgtgatctgctctgcaccatggcaactttcctcaaagttttccttggtcctccaggagtactagtaggaatagcgtttctccatgtggttgaatcttatgttgaggttgcagcccttggagatgctgctttatgggtccctgaacccttcgaggccatgaaaaccaaacttcacttttgtaaggcttgccacatgctcaggactaaaatgattgaagccctccacttatctctctgcctcgcagacttcattccaactttggcttgataatttcatactttcgctatctttttgatacatttaagaatatgtcgttcaaaatattttattcttcatttttagtgttttgttgtggtggttgttgggagaattggtctacttctcttcctggatcagaagtctagatatctgctttccatgtatctagtttcctcatctctctctctctctctctctttctctctctctctccctctctctctctctctctctgtgtataacatttttattataaaacttttcaagcgtacagaaaagttgaaagaattctacaatgaacacctaaatattcaccatctagattctaccatcaaaattttactatattgggtttatcacatatctacctatccaggccaggtgcagtggctcacacctataatcccagcactttgggaggcagatcacctgaggcccggagtttgaggccaacatggagaaaccccatctctactaaaacaaaaattagccaggcatggtggtgcatgcctgtaatcccagcactttgggaggctgaggcgggtggatcatgaggtcaggaattcaagaccagcctggccaacatggagaaaccccatctctagtaaaaatacaaaaattagctgagtgtggtggcaggcgcctgtaatcccagctactcaggaggctgaggcaggagaattgcttgaactgggaggtggaggctgcagtgagctgacacaggacagcttaatgaaaaagaacaagcagctcaaattctacatttttggtttaaggtaagtttgtgcaacaagatactgtctatgatggggctaaaagaatctttatcagccgggcgcggtggctcacgcctgtaatcccagcacattgggaggccgaggcgggcagattgcctgaggtcaggagtttgagaccagtctggccaacatggtgaaaccctgtctctactaaaaatacaaaaaaattagccaggagtggtggcatgtgcctgtaatcccagctacttgggaggctgaggcaggggaattccttgaaccagggaggtgaaggttgcagtgagccaagatcgtgccactgtactccagcctgggtgacac

SEQ ID NO: 556 - DNA, 4576 bp, Homo sapiens
ccgcccggcccgggacccgctcgcgcagacttctcgggcggactgaggacgccgccgctcggggccgcccctgtgctcgccttcagcgcccgctcagcccgccgtccgcgccccggtggcgggcccgacgcccgcattccgcccgcgggccccgcggcccgcgcgctcggcgccctgctcgccgggcagaggggaaggcggcggccggctggggatgggcggcccggctgcgccgaggggcgccgggaggctccgcgcgctgctgctggcgctggtggtcgcggggatccccgcgggcgcctacaacctcgacccgcagcgccccgtgcacttccagggccccgctgactcgttcttcggctacgcagttctggagcatttccacgacaacacgcgctgggtccttgtgggcgcaccaaaggcagattccaaatacagcccttcagtgaagtctcctggggctgtgtttaagtgccgtgttcacaccaaccctgaccggagatgcaccgaactggacatggctcgagggaagaatcggggcacgtcctgcggaaagacctgccgggaagaccgcgatgatgagtggatgggggtgagcctggcccgacagcccaaggctgatggccgtgtgttggcctgtgctcatcgctggaagaacatctactatgaagccgaccacatcctaccccatggcttctgctacatcatcccctccaacctccaggccaaaggcaggacgctgatcccttgctatgaagagtataagaagaagtacggagaggaacacggctcctgccaggctgggatagcgggcttcttcaccgaggagctggtggtgatgggtgctccagggtcattttattgggctggaaccatcaaagtgctgaaccttacggacaacacctatttaaaactgaacgacgaagtgatcatgaacaggcggtacacctacctgggctacgcagtgaccgctggccacttctctcacccgtccaccattgatgtggtaggaggtgccccacaggacaaaggcatcggcaaggtttatattttcagagctgaccgaagatcaggcaccttaattaagatctttcaagcatcaggtaaaaagatgggctcttacttcggctcctccttgtgcgcagttgacctgaatggggacggcctctctgacctgctggtgggggcccccatgttttctgagatcagggatgagggacaggtcactgtctacatcaacagaggaaatggagccctcgaggagcagctggctctgactggggatggtgcctacaatgcgcactttggagagagcattgccagcctggacgatctggacaatgatgggttcccagatgtggccattggtgcacccaaggaggatgacttcgcaggggcggtctatatctatcatggtgatgccggtgggatagtccctcagtactcaatgaaactgtctgggcagaagataaatccagtgctccggatgtttggtcagtccatatcgggaggcattgatatggatggaaatggctatcctgatgtcactgttggagccttcatgtccgacagcgtggttcttctcagagcaaggcctgtcattacggtggatgtctccatcttcctcccgggctccatcaacatcacagcgcctcagtgtcacgacggacagcagcctgtgaactgcctgaacgtcaccacctgcttcagcttccatggcaaacacgttccaggagagattggcctgaattatgttctgatggctgacgtggccaaaaaggagaagggccagatgcccagggtctactttgtgctgctgggagagaccatgggtcaggtcacagagaagctgcagctgacttacatggaggagacgtgtcgtcactatgtggcccatgtgaagcggagggtgcaggacgtcatcagcccgatcgtgtttgaagcagcctacagcctcagtgagcatgtgactggagaggaggagagggaactgccgcctctgacaccagttctccgctggaaaaagggacaaaagattgcccaaaagaatcagactgtttttgaaaggaattgccgttcagaggactgtgccgcagacctgcagcttcagggtaaactgctgctctccagtatggatgagaaaaccctgtatctagctttgggggctgtgaagaacatctccctaaacatctctatctccaacctcggagatgatgcctatgatgccaacgtgtccttcaatgtttcccgggagctcttcttcatcaacatgtggcagaaggaggagatgggcatctcctgtgagctgctggaatcggacttcctcaaatgcagcgtgggatttcctttcatgaggtcaaagtcaaagtatgaattcagcgtgatctttgatacaagccacctgtctggggaagaggaagttctcagcttcattgttactgctcagagtggcaacacggagcgctctgaatccctgcatgacaacaccctcgtgctgatggtgccactgatgcacgaggtggacacgtccatcaccggaatcatgtctccaacctcctttgtatatggcgagtccgtggacgcagccaacttcattcagctggatgacctggagtgtcactttcagcccatcaatatcacccttcaggtctacaacactggcccaagcacccttccagggtcatctgtcagcatctctttccctaatcgactctcatctggtggtgcagagatgtttcatgtccaggaaatggtggtgggccaagagaagggaaactgctctttccagaaaaacccaactccctgcatcatccctcaagaacaagaaaatatcttccacacaatatttgcttttttcacaaagtctggaagaaaagtcttggactgtgaaaaaccaggaatttcttgcctaacagcacactgtaactttagtgctcttgctaaagaagaaagtcgtactatagacatttacatgctgctgaacacagaaatactgaaaaaggacagttcgtctgtcatccagttcatgtcccgcgccaaggtgaaggtggatcctgccctaagggtggtggaaatagctcatgggaacccagaagaggtgacggtggtcttcgaggccctgcacaatctggagccccgtggctacgtcgtggggtggatcatcgccatcagtttgttggtgggaatcctcatcttcctgctgctggccgtgctgctctggaagatgggcttctttcgccgaaggtacaaagaaattatcgaagctgagaagaaccggaaagagaatgaagacagttgggactgggtccagaaaaaccagtgagctgccacaccagtcacatgacctgatcactagcctgtcatccttggtctttgtatcttccatatttggaagaaaaaaatcttctccagatttttcggaggccccactgatgctgttctcttcttcattctatcaagcccaggtgccagcctgaggcagccacttcggccaggtcacacgaccggggccagcaccacttcctttaaagatgaactctgaactttggagagtgagctacagagccgagcaatatttatggatgcaacacgcatggtcaaccctcaggggaaaactgttacctaaagtatttttataaatataagccttttatactgattatgtcttttatatttgtatcgatgttttattatttctattaaatagttatataattcactcaagcactgatatctggcctaaaatcttggaagtacatgtccatgaatacaaattttaaaggatgaaaatcttaccgtactttggaacttgctgtttaaaaagacagatgaaataagttgaagaaacctcatgtaatgaatccaccaggctggcagtggtgcatataaactgtgggtgtggcaagaccccgaagacatttcacatctttatcgcctcgatcaagtgtggagtcacatgctaatgtgtgctaaagaactgtaagtgttttttcatatgtacttttcattggaagattcccaacaagaatttggatggaaaacctgatccctagcaagaagtctgctctgtatcacctttatatagcagacatgtcaccctgcttctacacagatgatggatgaaagcttggagcaatgccatgtggtcatctggtaaacctcagaatggcgtctcatcctggacatcctgcatcagagttcacacaccacaaggactaaatccttgtcccctaagcaaagaattgggtctgaatgctgtgagggattgcctttttgtggtaattttcattgagagatcttcatttcccctaccaccctggctgtcccagctagtggtgattgcagattccttcccagagaggacatttaaccgttttaaaaaaaatgtcttagattgggttcccaagaagcagtccctgaaacaaggatttgtgtgcaagtaacttattaaggaagtattcccaggggataccagtaagagagtgggggaagcaggacaaggaaggagacaaagccaggcaaatgtttgtcatttcagggagagctccatgaagtttagcctcagcctgatcagggg

SEQ ID NO: 557 - protein, 1029 aa, Homo sapiens
MGGPAAPRGAGRLRALLLALVVAGIPAGAYNLDPQRPVHFQGPADSFFGYAVLEHFHDNTRWVLVGAPKADSKYSPSVKSPGAVFKCRVHTNPDRRCTELDMRKNRGTSCGKTCREDRDDEWMGVSLARQPKADGRVLACAHRWKNIYYEADHILPHGFCYIIPSNLQAKGRTLIPCYEEYKKKYGEEHGSCQAGIAGFFTEELVVMGAPGSFYWAGTIKVLNLTDNTYLKLNDEVIMNRRYTYLGYAVTAGHFSHPSTIDVVGGAPQDKGIGKVYIFRADRRSGTLIKIFQASGKKMGSYFGSSLCAVDLNGDGLSDLLVGAPMFSEIRDEGQVTVYINRGNGALEEQLALTGDGAYNAHFGESIASLDDLDNDGFPDVAIGAPKEDDFAGAVYIYHGDAGGIVPQYSMKLSGQKINPVLRMFGQSISGGIDMDGNGYPDVTVGAFMSDSVVLLRARPVITVDVSIFLPGSINITAPQCHDGQQPVNCLNVTTCFSFHGKHVPGEIQYVLMADVAKKEKGQMPRVYFVLLGETMGQVTEKLQLTYMEETCRHYVAHVKRRVQDVISPIVFEAAYSLSEHVTGEEERELPPLTPVLRWKKGQKIAQKNQTVFERNCRSEDCAADLQLQGKLLLSSMDEKTLYLALGAVKNISLNISISNLGDDAYDANVSFNVSRELFFINMWQKEEMGISCELLESDFLKCSVGFPFMRSKSKYEFSVIFDTSHLSGEEEVLSFIVTAQSGNTERSESLHDNTLVLMVPLMHEVDTSITGIMSPTSFVYGESVDAANFIQLDDLECHFQPINITLQVYNTGPSTLPGSSVSISFPNRLSSGGAEMFHVQEMVVGQEKGNCSFQKNPTPCIIPQEQENIFHTIFAFFTKSGRKVLDCEKPGISCLTAHCNFSAKEESRTIDIYMLLNTEILKKDSSSVIQFMSRAKVKVDPALRVVEIAHGNPEEVTVVFEALHNLEPRGYVVGWIIAISLLVGILIFLLLAVLLWKMGFFRRRYKEIIEAEKNRKENEDSWDWVQKNQ

SEQ ID NO: 558 - DNA, 4432 bp, Homo sapiens
gcgggccccgcggcccgcgcgctcggcgccctgctcgccgggcagaggggaaggcggcggccggctggggatgggcggcccggctgcgccgaggggcgccgggaggctccgcgcgctgctgctggcgctggtggtcgcggggatccccgcgggcgcctacaacctcgacccgcagcgccccgtgcacttccagggccccgctgactcgttcttcggctacgcagttctggagcatttccacgacaacacgcgctgggtccttgtgggcgcaccaaaggcagattccaaatacagcccttcagtgaagtctcctggggctgtgtttaagtgccgtgttcacaccaaccctgaccggagatgcaccgaactggacatggctcgagggaagaatcggggcacgtcctgcggaaagacctgccgggaagaccgcgatgatgagtggatgggggtgagcctggcccgacagcccaaggctgatggccgtgtgttggcctgtgctcatcgctggaagaacatctactatgaagccgaccacatcctaccccatggcttctgctacatcatcccctccaacctccaggccaaaggcaggacgctgatcccttgctatgaagagtataagaagaagtacggagaggaacacggctcctgccaggctgggatagcgggcttcttcaccgaggagctggtggtgatgggtgctccagggtcattttattgggctggaaccatcaaagtgctgaaccttacggacaacacctatttaaaactgaacgacgaagtgatcatgaacaggcggtacacctacctgggctacgcagtgaccgctggccacttctctcacccgtccaccattgatgtggtaggaggtgccccacaggacaaaggcatcggcaaggtttatattttcagagctgaccgaagatcaggcaccttaattaagatctttcaagcatcaggtaaaaagatgggctcttacttcggctcctccttgtgcgcagttgacctgaatggggacggcctctctgacctgctggtgggggcccccatgttttctgagatcagggatgagggacaggtcactgtctacatcaacagaggaaatggagccctcgaggagcagctggctctgactggggatggtgcctacaatgcgcactttggagagagcattgccagcctggacgatctggacaatgatgggttcccagatgtggccattggtgcacccaaggaggatgacttcgcaggggcggtctatatctatcatggtgatgccggtgggatagtccctcagtactcaatgaaactgtctgggcagaagataaatccagtgctccggatgtttggtcagtccatatcgggaggcattgatatggatggaaatggctatcctgatgtcactgttggagccttcatgtccgacagcgtggttcttctcagagcaaggcctgtcattacggtggatgtctccatcttcctcccgggctccatcaacatcacagcgcctcagtgtcacgacggacagcagcctgtgaactgcctgaacgtcaccacctgcttcagcttccatggcaaacacgttccaggagagattggcctgaattatgttctgatggctgacgtggccaaaaaggagaagggccagatgcccagggtctactttgtgctgctgggagagaccatgggtcaggtcacagagaagctgcagctgacttacatggaggagacgtgtcgtcactatgtggcccatgtgaagcggagggtgcaggacgtcatcagcccgatcgtgtttgaagcagcctacagcctcagtgagcatgtgactggagaggaggagagggaactgccgcctctgacaccagttctccgctggaaaaagggacaaaagattgcccaaaagaatcagactgtttttgaaaggaattgccgttcagaggactgtgccgcagacctgcagcttcagggtaaactgctgctctccagtatggatgagaaaaccctgtatctagctttgggggctgtgaagaacatctccctaaacatctctatctccaacctcggagatgatgcctatgatgccaacgtgtccttcaatgtttcccgggagctcttcttcatcaacatgtggcagaaggaggagatgggcatctcctgtgagctgctggaatcggacttcctcaaatgcagcgtgggatttcctttcatgaggtcaaagtcaaagtatgaattcagcgtgatctttgatacaagccacctgtctggggaagaggaagttctcagcttcattgttactgctcagagtggcaacacggagcgctctgaatccctgcatgacaacaccctcgtgctgatggtgccactgatgcacgaggtggacacgtccatcaccggaatcatgtctccaacctcctttgtatatggcgagtccgtggacgcagccaacttcattcagctggatgacctggagtgtcactttcagcccatcaatatcacccttcaggtctacaacactggcccaagcacccttccagggtcatctgtcagcatctctttccctaatcgactctcatctggtggtgcagagatgtttcatgtccaggaaatggtggtgggccaagagaagggaaactgctctttccagaaaaacccaactccctgcatcatccctcaagaacaagaaaatatcttccacacaatatttgcttttttcacaaagtctggaagaaaagtcttggactgtgaaaaaccaggaatttcttgcctaacagcacactgtaactttagtgctcttgctaaagaagaaagtcgtactatagacatttacatgctgctgaacacagaaatactgaaaaaggacagttcgtctgtcatccagttcatgtcccgcgccaaggtgaaggtggatcctgccctaagggtggtggaaatagctcatgggaacccagaagaggtgacggtggtcttcgaggccctgcacaatctggagccccgtggctacgtcgtggggtggatcatcgccatcagtttgttggtgggaatcctcatcttcctgctgctggccgtgctgctctggaagatgggcttctttcgccgaaggtacaaagaaattatcgaagctgagaagaaccggaaagagaatgaagacagttgggactgggtccagaaaaaccagtgagctgccacaccagtcacatgacctgatcactagcctgtcatccttggtctttgtatcttccatatttggaagaaaaaaatcttctccagatttttcggaggccccactgatgctgttctcttcttcattctatcaagcccaggtgccagcctgaggcagccacttcggccaggtcacacgaccggggccagcaccacttcctttaaagatgaactctgaactttggagagtgagctacagagccgagcaatatttatggatgcaacacgcatggtcaaccctcaggggaaaactgttacctaaagtatttttataaatataagccttttatactgattatgtcttttatatttgtatcgatgttttattatttctattaaatagttatataattcactcaagcactgatatctggcctaaaatcttggaagtacatgtccatgaatacaaattttaaaggatgaaaatcttaccgtactttggaacttgctgtttaaaaagacagatgaaataagttgaagaaacctcatgtaatgaatccaccaggctggcagtggtgcatataaactgtgggtgtggcaagaccccgaagacatttcacatctttatcgcctcgatcaagtgtggagtcacatgctaatgtgtgctaaagaactgtaagtgttttttcatatgtacttttcattggaagattcccaacaagaatttggatggaaaacctgatccctagcaagaagtctgctctgtatcacctttatatagcagacatgtcaccctgcttctacacagatgatggatgaaagcttggagcaatgccatgtggtcatctggtaaacctcagaatggcgtctcatcctggacatcctgcatcagagttcacacaccacaaggactaaatccttgtcccctaagcaaagaattgggtctgaatgctgtgagggattgcctttttgtggtaattttcattgagagatcttcatttcccctaccaccctggctgtcccagctagtggtgattgcagattccttcccagagaggacatttaaccgttttaaaaaaaatgtcttagattgggttcccaagaagcagtccctgaaacaaggatttgtgtgcaagtaacttattaaggaagtattcccaggggataccagtaagagagtgggggaagcaggacaaggaaggagacaaagccaggcaaatgtttgtcatttcagggagagctccatgaagtttagcctcagcctgatcagggg

SEQ ID NO: 559 - protein, 1029 aa, Homo sapiens; identical to SEQ ID NO: 557

SEQ ID NO: 560 - DNA, 122157 bp, Mus musculus
  misc_feature (1)...(122157): n = A,T,C or G
ctgtttgtacctgagttactatagggataatgttgtcaagatgggatgctacagccccatcaacagctgaaaggagtgctgttgttacatgctggtaccatgcctcctaagtccccagctaacccaacagaaaacctagggaaccaatggcgtatcattcttggggcatgtggtccctgcatgctgagggacagacagtgtccaggcttcctcccgagagtcattactccactgtgactcctggaaatctggtgctctaaggttgaggtttcatgacgaccatcatggtggcaagaactgatgggcattctgcatacatagttgatgaccaactagcacagcattttcaatggttcaggttctgcttccggctggtagctcattcaacaggaagcccaggagaaaaaagaacatgattgtaactactgcccaaggtgtgaaaagctctatcaatgtatacataagtcactatgaaagcccaggttaccacagaggcccaggaaagcaaactcaagctatggatagagtggctttctgggccacatggagggcccattagaagaaagagaggaagcactctgcccgagactgtcactcaccacctaaggatggtcagtttcaaagccagttatgtctgagagttatagttcatcaatagggatgtaggggctccggatggccacacaatttacccagtgtcactcagcagagagaagcagaggcatatgaggccagggttagaacagggctccatcaaggttggggcctagaggctctggtacggaaatgaacagtgtaaatgtaacgtgaagagttattctacttcatggtttggggaaaatgacaggcacacagagtatatatacatcaaatgcaaatatatatgtatatatgtataaatgtatatctctctctcagttggttgagtatgtggacacggacctgggcgatggtggaacacactcacccccaacccccaaagagccaactctgcctgagtgattgaatccactgtttcccagcttctactcattagtttctgtcaggatattttggtttgcatttttctttttaagaacttatggtctaccaggtaatttgtttggaatctttctgatttttaaaaaagattcacttatgtattttatgaaaatgaatattctttctgcttgcatgccagaagtgggcatcagattccagtatagatggttgtgagccaccatgtggttgctgggaactgaactcaggacctttggaagggtcatccatctattgttaactgctgagccatctctccagcctagtggtgcacacctttaatcactcaggagtcaaaggcaggtggatctcttgagtttgaggtcagcctgatctacagagtgagttccaggagagccaggacaatgtagggggaaaaagagcttgagtctatagacagaggacctccctggagatccacagagctgattggacctcattttatacatgggtctataggaagaaggatcaggcacagcgtccattacagctggattacagctgtaggtttgtaggcactagggtcagtcaaagatgcagcccacagaggcactgtcagcatctctaaagctcccttccccatgataacagtgtacttggctgagctcccaacaccaaagcttggcttgttaccagggtcacctagtacctagtacctttcagggttcttgtgcttgaaggcagatacgccctagaagaccatgatcacagtgctaggataaagtaagcagccagtgaatgtcctccaggaagccccttcccatactaggagctcagaatcatggtcctgtaaatggggacctatcaaaactcaaggtgactttgtggacaaggaaggtaatggttcccattgctgggcaggtgacgagtggggaggaggcagaactggccaggatcctaaaggacctggaatggtcaattatgactgctaatttgatgaggtttagaattaccatggaaacaagtgtctctgcgtagttgtaagggatcatctagattaaattaattgaggaaggtaggtacatcctaaatatgagcgtcaccattctatgggtgaagctcctggacagaataaaaaggagaaatcgggcttcgctcttcctcactggaacaaaatgtccagctgcctcaagacctaccaccatgacattccagacatgattgagccaaaagaaatcctttcctcccttaagttgctttggtcaggtgttttatcatagcaaggagacaggcgatacagtttgtatccacaacaggaaggatggctatacggtggttttcacaagaggatatagcccagagtggggcactgactagccttggtagaagggagctgggaggccaacagtgcaggtagaatccagcaagatgtgctaagggcagaaaggagaccagcttaaggcaaagctgctgaggttgtttggaacctcactagctggaaatatggaacagccttcctgggactccacaccctgtggacagagaagaggcctgaagtagtagcattccagactgctgatgctcgccattccggctggatgccctcccaagacaccaagggataggactgtccatctcagctgggattgggtaaccagctggattctttctacagacatgctccctaccaatcaccgcatcggctacacaccaggacccactggaagctggggacagtgaatgacccgtgttcctgctgacctggaagccccttctcttgcaccctgccaggccacggagtgctgtcctccggcctgccctcccttcttctacccgcagggacgcccacggccacacgggggcgcgagcgtctgctgagcatctacctcttgcgcagaggctgaagaacaaagagcctccaggccctgacctgaggtcccaggtctccttcacctggagccttctgcttcctgggtctccgagtgtcggctcaaattaggagttaacttttgctcagcactgttcttagaaatctgttaaagaaatctccctactccttgatggcctttatccccagcctggagataaagtacaggagctctgagaccctaaaagggttactgggttactggttttatgtgcgtcctgacctgtattccctgcctcttccttggagtttaggaggatcctggcagcaaaatcctttggttttttccctcccttttggtttattaaggcaacttctttacacatttggacaaaatagacacacaccctggagaaatagaataacgaaaacgcagaaatcggcagaaaaggaagcaagcgctccgtggaaactgggtcaccgcaaacaaggggaatgacacgactaagtcagacttgcgcaaaaatggctctttctccctaatttctaggtagacctcactgtgtgcaaaacctcagtgaaatatgcttccgggacaccttataaagagatccaaagaggctatgtttcaatcaccgtcaatcagggagaatctatctgtaggcctgtcagcgataagcacagctcaccaaactgctctagcgtgccaggcagggccaagccgtgtgaacccggagaggcagaggctatgcctgtccatgtgtgataattcaacactgcctacccagctccttttcccaggactcttgtagaaggtcagtctctgctgggcttgaaatcatggccaccttgaaccagcaagcacttctcgctgggtcttcacagctgtgaatttctgaggatttgagggaacagtgaggtcttagagtggggagctggaggcccatagaaagtccctcggagagcaagggctgacgcaagggggtgccagagtgggctcattttcacaggagcagaggtaaacattctatttactgaaggaaccttccccagtgtttctcccttactgtctccatgctaagcagcagagttttatgctaagcagagtccattctcctgagttagaggttttcaacctgtgagtcatgacctctttggggtttgaccctttgggatcaaacaaccctttcacaagggtcacctaagaccattggaaaacacacatattttatggttaggggagaggagtcatcacaactacactaaatggtcccagcatcaggaaggtcgagagccactgtcctgattcccactggcaatgcaagatgttcctatacaggccacgggagtagcccagatgggaatgggtaggaaggaacctgaggtcctcctggaggaggaggcagtaaacaagggcctggcccacaattcagcgcagcgttacgtagcaaaagcctctcgcatctgtgttttgttcaccatggtagcactagccacacatgctagtgctactaaactggagcacagggctccaggtggggacggatgttgcaggtgggaactaaaggaggaattgcatatgataatttgtttaaatgctggttacaagcacatgcataacttctctgcagtctgctgaaggggtgtggggtggactgctgtagaggaggttgttccaatgtgctgggggtgagaaggatgatggtggtggtggtgatggtgatgatgatcgtggaaggtcctggaggcttgcaggccgggaatgacatgccatacattgctcctaaccatcgatgggccgggattggaggtgtttttctgggagaggcttattttgagtagaagggtcaagagcagtgctcgcagacagctgtctgttcttccacacagatgccaagttcctgtaatacatcatgcccttcagtgacaggtaaatgacaacctctcagtttcttcgggcctcaaggtgtaaggcagcatgttcagagacctgccagcgatcatcataagcttatcttttagactagaggagcgggggtgggggcaccttaattatgcaaatagtacggagcacagtgccatacgaatcccagcccatttgacaaccatgcatgtggactcaagccaaataggctaagggacgaggatagaagaagaaagtcacacccgggtgcctggacctaatgtgatttctgttgtcccatggtccttgtcaaccaccaagggacttatggcatcctaactgtgcatgcggctgccttaactaagtagcgagccaactggttcccttctcagattcaggttagcagatggcaggaatttgtccttgtccattgggcacaaggcagaagggggcagtgttgagatgagagtccgcaccacctacctatggtgtttcctctacattttaaaattatgaacttattcaaatatccagcaagggtaggagaatgtgcaaccctgttgtgtggactccagcgagaagaggtacatcagttttgctggatctttgtgtttatgctgtttccccccttgcagggtgctccacagggccaaatatatccttatgtgtgccttctacacagccccataaagtccttccaatatccccagggatttagaaacagcaggtactgacaggaacagagctgccttagtcccctctggaaaccatgttctgtgtaaccaaggctgtgcgaaggccgacctcttgggtgtttctcattgggccgttctgctggggtgggagggtgttttggcagtggtggctccagaatatattaatggaggctcttactaattcttagtaatagcacagtaatgatagggcagccacaagctcaatccttgatggtcctgcgaggtgggaatggttggtgattatcataggacacacacatggcttctcccatgtgccaacgtttctgggaacccctgggagtagcctggtgtttgtcctgtcctcatctgttcatgctttttggagtctgtgtgacagctatgacatagaggagctcctctgctacctatggagcaaacagatgactcaaggaactgaagtaccagttcacactgctccagctcacactgctccagctcacactgctccagttcacacagctccagttcacacatgctaggacctaacagagaagtgggagctgccacacggcctcccactattgaagagtacaacccctcggcattaaagggagatgctcctactcggaggacattactcttcgtacgccagagtctcatggagcccagctctctacgtgaggctgtccttgaacctctgactctctcgtctctacctcctgagtgctgggattacaggtattcaccactatgtttggccatgaccctatagtccctatatctcctatattcccagggaagtaggttcatatatattttagaatcctggatgacattcagtgtgaatatggggagggacacacacacacacacacacacacacacacacacacacacacggcatttcactagggtatatgtgtatgtgtatatgaatatatatttgaaatgccacaaactgattgggttcctttctcatcctggagcacgttgcctggctgtggaccatgagcttgaactcagccgtgcctaggaccttatagagatgtcatgtaaagacagaaagcctggagccaggcccacactggcagtcctacacagcctttgttcaaccagcttttccacagggtgaaggagacacaacccattaaaacacaaatgtctaaaattaaacatccgaatctcaacagagagcgacccagcggcccctttcctcctcttctctcccagggatgcgctgaccgtttgctcctcaggatggataggatggctggtttctgctgccctcagttccctttcattccactgacatatcattcctagaggggtgggggagggggcgtcatgaggccttctggggaaagagaaaagggcgactactcaagacattttataaaagggcgaaattgggaagaaaggaggccccgtagggggtggagggtggagaatgtggccttgtctggggtttctttcagctgaaacctgccgcctagctgccttcagttcaaactgtcaccttgagttcttgctggcttttctgccctcacccccaaaacctcaacagatcgggccctatttacctattcacactcggccgtggaaactcattaataggcttattagtaacagcattcacgggaggccattgacaaaaggggttccagccacttgaagaagggagaggggctaaaaatcctgcaaagagatgattttctcattcagacgcctggctgggaggaaagctttcctggaccactgaggtcacttgaagtctaaatgatgcaaaatgaatttttttatttttcaaaaattcaaagcatgctttaaaaaaattttttttaaacttaaaattttcctattgtggatttgtggctttcctaacttgggggaaaaaaaaaggtgctctttggcaatcagggcctttggacggtggctaccttttcatcttcatacagaacaaattctgcacgctgcctctgacgttagttaaagaaggtgtttttgttttcagcggaagggcttccctcctattcagcatctataaagctagagatgaatggggtgggggagacagggacagcggcttcctgggccattaatttatgtgagaatgtgttaacctcattttcaatggctggtgggcccactgcagtagggaaagagctctgtcctgagacacggagtttctcatcagtggggatcataaagatagaagtgccagcctggagcaggaccattcccttgtgacttcaggttagggaatgagcacacattgacactgaatggctcagtgtcaacctggctgaggtgttcccacccaggccacagaactcattcaaaacacacccctttccactagacataaacagatcatttcgtttggaaatccggctgttatttttgttgttgttgagttttcaaattctaatttcataagtatttgcctgaggcattgaacatggatttgctaccccttgctttttagtgatgtgcatataagtttcccaggctatgctgtgaacaaagatgatctgatcatgtggggcctgaggaatcgtgtgtgtaaatggcataaggtagagtattagggattctggtacgtctcctctttcaaacctgtgtcccaggtggactttactgtctggctttgtttgtctttaggcaccagagagagtctaaggcttttctgaacttagtgacctatttgagccaggatcttatatagcccagggctgacacaaactcagcatgtacctgaaaccattttcaagctcccgaacttctctttatcctgcgaggtctgggacctcaataattgacccaataattaagattcaatttatttagacaaaatgtagctggcttcaaacttactatgtagaccaagttggcccccaaacacaaggcaatcctcctgcctcacacttctgagtgctagagttacaatttatatggccttgactttaaacacaactgctcaagggatgaaagagagaaagggagtgcgtactgaaagataaatgatctcaaggtagtctagtgggagagacaaatgggagatgccaatcattacagcccggcctgacatttagttaaagaatcctgctttgcaacagaagagtgtaagagtcagggagagaatccaatttgctcacggtcagatgacttggtttttggtagagtgagtgtgttttctgtttctgattctttgtttctttctctgtttctttcttaggtggcatggagatcaggccttgtacatgcaaggcaagcgttctactactaggctacatctccaacacctctctagactctttcaagtttcttccccctctcattaattaattaattaattaattttcattttatttgattggtatggatgtttgcctgcatgtctgtctgcacattgtgcatgcagtatctctgaaggccagaagagggcgtcgggactcctggaactggacttagaggtgattgtgagcaagccaagtggatgctgggaattgaaccaatctctggcagtattcttaaactacggagccatttctccagccctactttcttttaaatatttatttctatttttaaactatatgcctgtatctttgtgttcacgagtgcagtttcctaaggagaccagaggctttggatgactctgcaactggggttacaggccattgtgagggactgatatttagccagcaactggcttttggcctttaagaaggcaggaagcactctgaactgctgatccatctccagccctcctttggatttctttatgttaacctacattgatactattaaagatgttttctgttgtagattgccttttcccatggcagccacattaaagggctcatccagcagccggttgtgttaacctctccgatcttcagttttcttgtcagaatctggttctgttactctgcaggcagatgtgcggataagtacaattacctattcacgtgttcccttcctaaaggagggtttcccaaacactcgtcccctgtctattgttcagaggaacaagacaacgcaacatctcccacgaacatccgctgcttccaccctcaaagcttcatgacatgaaatgtctggccccagtatgctgcagacctattctaaggtgtctgaagttgcacagcattctgtcatttgtttcctaacttgacataaaacaacgtaacgcatccactgtgcaccaaagctggctaggaactggggcagtggcgtacagaggccgttcaccaacagggttccgagaggtcatctgtgcacccctgcgggcagcgcggcggggcccctcgcctgcctggcgggtgtctctttgcggctgctaggcttcgggggcagcgcggggctcgggactgccccagcgcgaggcgctgattggcagagcgggcgccgccgtccaggaaacggctcgggtttcagcggggggcgtgacccgcccgaggaggctgcggcggcggcgcgggcggcgaggggagagagccgggagaggcgagcggcggcggcggcaggcgcggaacgggcgcacggacgatcgaacgcgcggccgccagagctccggcgcgggggctgcctgtgtgttcctggcccggcgtggcgactgctctccgggctggcgggggccgggcgtgagcccccgggcctcagcgttcctgagcgctgcgagtgttcactactcgccagcaaagtttggagtaggcaacgccaagctccagtcctttcttctgctgctgcccagatccgagagcagctccggtgtcatgtcctagctgttctgcgatccccggcgcgcgtgaagcctcggaaccttggcgccggctgctacccaaggaatcgttctctttttggagttttcctccgagatcatcgcctgctccatcccgatccactctgggctccggcgcagcaccgagcgcagaggagcgctgccattcaaggtaatcgtcgtgccgaacgcctctgggagcttcgccagccgggaaagtgggtgccgtgggaggatgcgggggcgcaggatccccgggaggaaggcgcgggtaaacctatttgggggcgcaccctgtcagtctctgactgtattggtgatggaggagtggatgaatgcggatggctggctttgggggagttctttcagcacctccatcccaatgctgacatctgcctctgccgctggcacccctttcctgtcagactccggcgggcacagtcctgcctactgggcgcgttcctttgagctcagagccggcgcgccgtggggccgcctgccagtggcacagcccataggcggttcgggaagggcatctttggggtgcctggtccttggattctggaagctccagcctggtactacacaaacccttatgagagatcctttcttgggaagaaactgctggagtgtggtcaggcaacatccccaaagggatggagatgccgggacgacacctttagggaggcagtggctctggtccgggattccggtgctggccatccctcaccagccacagcggttggcgcaggagggatcgccgcgcgcctggggctagggggcgaactggaccgacttttcctagttcgcctagctgctccgaccgctgccgcgccgagatgttgaaagcacaggcgagttctaacttgcgcgctcattctttcagcgcgggggaatcggtcgagggccctgcgtggcgctggcttccaccctcgcggccagggggcaggcgcgggaggccggcttcggctccgtgcccctgcaaacttcccaagaccttccttctcccccccacctcaccccccagttcaataaaatctacccttaaaggcagacttgctttcaaatccacggcacccattatgtgtttggtgtgaaacgctatcaacatttaaaactctattgtcccaagcgtcccaaatccctgtaaatcttccaccagcctggactcattttcatctgaaaagcctgtttagtttgaatagaaaagcaatcaggcgcccctctcgctctcgttggaatgtcaattaaaatgcagatttctcagagctctttagcgccccaagaagtgggacaaaacaggatatttcaggctgacaaatgaaagaaatgctacaatgaagtggggtggcgatgtgcaccccaaactgcttggagtacccactgaaagagtaggtcagggattatggtcttacttacgacagcttatatttttggggtttcgttgtgtttagggcccccccttggtgtcccccccccccatgagcccatgacagctcccttccctattcagccccgtggagaagtaagggagccttgaaccagggtagagaggctacatttagtattaacctgggagtgttgacttctcccaggagtaatccacttgagaacaaaatgccaattgctctgcccgctgaggtatcctggaactaccctttaaggtagcagtacccgtcgcaccgcccccctcccccaagggcttgccttaaattaacctgccttcttgcaggacaggggagagtgtgtaaacgtgtataacactgcgcaagctcaccagccgggccctttcggccgggtccctttgcctgtctttggaggcagacttgtgtggagatgaccccaaggggcgggtggccgtgaagagccatccgtcagagtgagggtgaggactcctccctcgtaggctgagaagagagtatcctttcagggggaaaaataaacacgctggggctttctctggggttcagcctccaggaaggattatggtattgaaggcaggaagctgggattgtggccgccagcagcatgctgggcctgtgttcccaacacggagccttgggacctaattatcctgcctaggaggtcgctcagcacttttgtccactccggtgaggagctgtgcagacctgctgccgtcacttctcgccttacagaggtttgaggagggggctcctgtgggggctgggacttcgaagaacgaacgttcaagttgagtcagcctggggcactggccatcttcctcattcagctggagctgaggtactcctgggtagtggctagtagagacagtgggcccagcactctgcttcaagacctactgggacctgagattgcaaagttgctggagaggggagtttacctgcattctgaaagttcttaggaaatcaacgagaatgtttgtgcactttcctttgactggtatgtagaaatagacaaggaattatcttttgtgactcttggctttaagaagaaagaagacttgggggaacaaaaatccttccagccaactaaaaacactgggcacctaactgctcatatacccctggcttttgttgttagctataccattctacctgtgcttaaaaaaacaaccaaacagcagcttcctattcccctcttggagatggtacgtcctctctgccttagtctcagtgaaggctgaaaggaacagattttaggacggaggttctggcagtgtcgaaatcctgtgtcataattgaaagcatcaaaagcgcacgggattagaattctttttctctttctctctttttcattaaaacgctcacccatccccagtctcataaaatgggcatcccagcatccaaagcccatggttttgtgcgatcctttcctgccattggtttcagcagattctctaaagctcgtgcattctgactcaaagattagtcactgaagacactgaacaaacataaagttatttgtactgtggtaagcttttttttttgggaaattctctgctttggatctagtaaattgagtgcccccttgtaactgatacttgggaggtttagccaataggttagcgtattgaaagttcccaggccaatcacataccagggcagcttgtacgtatcatcaccattactaataaaatcttgaattattcatcaagggttgtatctttacccctttgacgtcggttgcagatatttagttagtatgcctgtacactgccttgtagtcagtggaagggaattcaggctttgaatcccccggttggattaaactcactctttgtaagtggctgcttggcggaagattgaaatacacgcctgcattcgaaaatgaattctgacaagtgtaaactggtgggaatgtttttgaagccttcctgagattctttgattctgttggtctcctttctttctgagaaccgttctgaagcgaggacgtgccgctcagctcagctgaaatgcggttctcagagcagacccttcctccagtcagcgtcttaaaggccagctggaataagagacgttaatgaggctggccatgccaagcccagcgttttaaactcaggtttttctgcagttgcccttgaaaggaatgaaggtcaagttgcttcagcaaccttgcagctttgatagtggacggaagggcacgctgcagagctgggtggctgggtcctacagtgatggtttatcttgcgtctcttaaaagtaagcttaaaaaaaaaaaagattagcctactgcagcttgtggactagcctggaaacacctgggacgctgaggtgaggatggaaggcttttccgataatgagaaagaatgtgtttgcgaatgtattgagaggctgagaaatggttttatcccatctgggtttaagcaagttggcactgggggaaaaaactgaatctggctgaatctctctctttcagtggcagccacagcagcagcagcagcagcagtgggagcaggaacagcagtaacaacagcaacagcagcacagccgcctcagagctttggctcctgagccccctgtgggctgaaggcattgcaggtagcccatggtctcagaagaagtgtgcagatgggattaccgtccacgtggagatatggaagaggaccagggattggcactgtgaccatggtcagctgggggcgcttcatctgcctggtcttggtcaccatggcaaccttgtccctggcccggccctccttcagtttagttgaggataccactttagaaccagaaggtaagttcatgcgtgccattttaagggtaccaagtcgttttggggatgtgtctgggggaagtggtctttaagtgggaggcctgtttcagccggctgccatatgagtagtctctctccgcatcatatcggagcttagaagggagggtcttgtctcccaggcatgagtggagtggtttggtttgctctgttctttgtgcttgggtgagggaagcagtggcagttcttgtttagccagtgccttacagcactctggaggggacgtaccttggcagggtgactgtggccttctgcagttgctctctagattgagggaaaagccttgaatcacactatcttttggctaaaggaaataggcagcctctgaaagctgactttttttttctttttccgcattgtttaagagaaaagaaggttctgaagttgagcatggagagccgtgccatgctggatcggtttttaagctggtgtaagctctttgtgctttcacccggcatcacagagtgggcaggtttcatgttgggaagattggaaagtgaatttgccaagagtcttcccccatctggggaaaagccagatttcactagtgtgtttggctttgcacacttggttgcaaatgtgagaagctagttgtgaggaggacgtggctgaaatccggagctgggcaaagcgctggtccttctcccaggtccttcagagacgtggtctgtggccaagcctctctccttggtgccgcacgggaatctgtcatcaggagggaatattggtaggcgagttattttttgagtggtaatccgagcgtgacactgcagatcgcagcactcatcgccacttaatgaacgtgtttgctgagggcccacctggtgccggctggctttggagtccgtcacggtcctgagtgctggcaggtcagctgagttgctgtggctatgcacactgaatcagggtcctgattcatccagatcatccagagggggattgtaggagggacaggacccctcccccaagggtgacctcaaggagggctatgtacccatctgagaggagggcttgagaaatgggtccccagtaagatccacccagacagacactctccctggctttgtgtgtatgtcgggccacacagatgcctggaaatgttataaattaccaggtatctttggaaaggaaatgaggtaggagttttgtgcatgaggtgtgttcaacatacagcctcacgtccttttccggaaccacctctctgtgacttatcctgtgacgtcagggagagtgtaatctgcaacagtgacatgttttcaaagggcttaatgtgagggggaaaggattgggtttctgaaagtctggtctgcacttctttaattttgttaataattaaaatggatgtccccctaattgccggttgtccctggagtgtgtggctcagcactaactaaggaagctgagctaggatttcctacagcgtgggcttcagaaacagccccggttaggaaagaattgtcatttttcatttggactctcggggcagtgttgctgtgagttgatttcagttgcagagtataaaatggtcctggagggtttcctggactgcatctaattacctcagaaaggttacaagatgtttgtactcgcaaggaggaggcaggtgggggagaggaaggacagtgggctggagtcccccaaatggctctttgtgtaagaaccgatatccaacaatgctcacattgttgaaagcagatcccaccacctggggacctgtaggtacatgtaaggttagggagggaggctgagaagtctccgaagttgtaggtcacactttgccaatgcccctgggtacactttgctaggctcagagtttgcatgaggttcgaatcacatatagagttgggagacgctaagaaaaagaaaagaaaaagaaaaaaggaaaaaaggaaaatgtctcaaggtgtggagtttcaccagagcaagcttgggaaatgcagagaaaccccagagccttgattggtgggatctctttatcaatagtcactgaacagtagtaccatccccagatgccttctgaggaccagctcaagagatttagttttcaccagtgacctggacagaaagcagaaagcacagctcctggcattgatggtggccttggccatccccatccccagcaagctggggacaagggggtgcacagttctcagtgcagcaaacacggtaccctgagatgaatgttgcttttggatggaggaggtggtgatgctggatttcggcagggtctgtgctcactctccttgtctgttagaccaacattgccactgacatccaggccatcaagctagaggctaggctccatgctaggctctggtgtctaatgtgtgcatatgtgcatctctccagccgccatatttgatgcagccaggacttcagctaacactgagttcagcttctgtctcctgaagctttaccatggaaggcatccgtttgctaatttagaagctcagtttagataatgtctattgggccggacaaatatgtaatcaggaagttcctagaaagagcctgtgcctcactactaaggagcccttttgaccctctagggagatgttatgttcagtcatgtagttctgtgcagtgtatgtagccatgcaatgtatgtcctcaccccgaatcctatcctgtccgtgtgtctctggacactttctcaagtggcagcagcaggattgggtcaagtcagttgacctaagaaggcagtcatctctgtaagattttcctcggtatttcagaatagaaatgattgtatccagctggtcatccctgtgacaaaggacaacagtatcaacagttggggacttcggaggggtggtcccgattctaagtactgttctgttgattcaaatcctgaatgttcccagtgtagtcaagcttgattactgccagtctcggctcttactttcagattccccctgacgttgtcacctgctctggttaattaagtcattgttgacattaagggaatctgtttaccccagcccagtaggagctaaaataaaagggctttcccaaacccaaacccttaattactttcccaccctctgctaagtgcaaagggacggcctgggggtggggtgggggtgggagtgagggagtaatttacatgccttaaaaaacacccaccatttcttgggcagtcttctgggttgatgctgttccggattgaagtgagccagcgaaaacctcgtgagtgtgaggtctacgtggagacctgctgaagggttccccccccctcaccaccaccaccacagggtagttcaagtcctttgtcagagagtatcctacatgctgtggtctcagccccccacatttaattgccagttagaagaagagaaaagaaatatctgcgtggtgcaagtggatgatttaacaggagtcttgtgtttcctattatctgcattttttgttcctcagtgtgagtgtgaatatttaagagttgactgtaacttgatagtttcgctgaggaacaagggcttattcttggtcaattaaaccaaatgcaggcgcatgctgttaaacacacaatgaagtacacattctttattagaatatagtgtatttcacaattcatgggcaaggaactgtgtttaatattacttctagagcaaaaatctggccagcccagaaaattggcatttatataactctttcttgctggcttccactgatctgaatagagcaagtttgtgtgtgtgtgtgtgtgtgtgtgtgtgtgtgtgtgtgtgtgtacctgtctgtctatgttgcctgtttatttcaatcagttaaaagactaaataacttacttaaaaaaaaatagccaccccttctcagatagcctctaaagactttatgctgtttttaagccttatttttaaattattttaaattggggtctgtgtaggcctgtgcacatgagtgcaggtccccctggaggccagaggtttttgatgctagcccgggagttggttctggaagtgaatgtggatcctctgcaagaacaatatagacttacaaaaactgagctatctcttctgctccaatacagttcaacattttttcttttttctttttctttttttctgttgagggtgagaattcaaacaaccaagcattccaatatgagatgtttccaatatctgatttaatgaataatcacatggttatgaaataactggggtagtgtttaaacaggaaggggatgtttaatgttcacattctctgtggagtgcgtgcagtagccccgtgcctgcagtagccctgtgccacacttatagacagtttggctacttacatagttagggtggtcatgaaaagacaactaagtccctttcatcaggctccgtcttaacttttccatttctgattgaatccctgggatcgatccagcagggtgtcttgtcttggtcagcagctaggagttattttgggggaagggatgctgcaggctattttacagataattatgggtttcctgtgcagaactgtccctgtaggggctggagcaagtgatgattctgtgattaagagcacttcctccttttgcagaggaccagtgttgggtccccaacacccacagggaagtactcctgattgtctttatctccaggtgctgggggccagcgcctctgacctactgttgcctgcaggtgcccttctcatgtgggctgcccttgcccttactgtctttgtggcttcgtagagaatgatgggaaaaaattccaagatggtagtcccactggtgactaaaggtgtttagtagtagctttttcttaaaatacagttggtgagcaagatagtggtgcacacctttaatcccaacactagggaggcagaagcgggtggttctttgagattgaggctagcctggtctacagagtgagtgccaggactacacacacacacacacgcacacacacaccccagaaagcttgaagttgtagttttacgaaagtgtatttaaccgtcaggactaactatgatctttcttttgggctggtagctgatggtttggtttttttttttttagatgggcatctcccacagcctggcttgggatttgccttgtagctcaggtcggtctagaactttcaatccccctacctcaacttccactcctaattgtccggcatccttgaagagcatgtgtcttgattttctgtaattttgaaaaacttggcctcggattttatggcttacttatctttatgtgtatctttatgtgttttgcctgcatgtatgtatgtgtaccatgtatatgtttagtgcttgcagagaccagaagaggacttgcggtcccctggaaatagagttatctacgtggttttgagctagcacccagtggtcttcacttcccccgtggctctccagcccttggattaaatgtggaatgtgctgtttgcttgcttgaagccaccataggcagtgacaggctttgtggactttctacactctgagaataaatgaaagtccacttgcttgctcttggctgggtcaagtcagggagctaaactatcacatacctcctctttaacttcttgtccaactaaagaatcatgaatcccaagccgtttctggacagagagaattccaggttatggtgaccatgttttatgaggatgttaaaaatagctcctaaggaggatgctgacagattcaggaaggagaacccggcctcatgtttatttgggtgttatttatgtagcatgttcctgagacatctcaatcctgagcactaaggaagtcaacacattgtttcctaaccctggaacttgtttttcacttcttatacctgacagtttacaaatactggttcccccccccccccatgtgtggccaagtgttttaaaggtatctaacaccgaaaatggccaatttggtgtgctgttatagatcaaaaggagatctttgagactagagatctctgtcaagtttattctctttggaaacccttcaagttcacattgagagctgacagttggctagccctagagtcatgtggcttgcttcaagccgcctctcccccattccacctcaaccccttggactgccactaagactgttgcttagctgattgtagcaggtaccttgctgaatgtgtaacctgtatagattatgtgtttcagatttaaaaccactcaggtctttaaagactaagggatctgatccgacatttgacttaaaattttaagtagaaactaagtaaagttgttttgaatagtatgtgttgtgttttctggaggtacagtctcataggaaatcgcccttgggtgctgagtttgaatgtgcctactatctacttgaccttagtcaagtgagataacctggttgaaattccaagataatatctgtctaaattgcacagattgaatacacactggactgtagttcctggcccagtgtaggcgcagggtaagtgctgatttcctcccaccccacacctttgtcaaactaaataaaacccacatctcaaagacctaatatgatgcttgccttgtaatctataatgataaatgtcagattttcagaccttaggccttcctttatccaactctttttttgccctcgggtttttgcaagccccctggtgtttagacatgtgaccctttatctgcttacagtctaggtgttcaaggttgactttttttttttttcttctgttaaggaagtcaaccgtagccacccagcacatagtgagaatatgtcatggtcatgggtatattttggcaggagagtcctctgtttgaggttttcaaataatcgatgtaggccagtgaagggtggtagagaggttggtgtgagcttggttgggtgtgttgggtgtgagcttggttgggtgtgttggatgtgttatagtgtgctgtgccctgtccaagccagtgaagaacccatccaccattgcaggtgttgcttgtcttttgccatcttctcctgtaatgccaccatccatttgcctgccaggggagctaggtgctgggcttccggtgggctgtatggcagggagttcacagaactgtgctggggtccagactagtggaagagctggacattcatgtgcatggttcctctaagaggggcttgtgatggcagaggctcagggtgagatcgtgtccttcaactcagtccttgggctaatgatggtttccatgaagacaccttagctcctgctctttgctccgtgccttgtgataagatgctgaaggtgcagatgctgagagcgccaggcctttattaagtgcctgtaagcggctcacatgtgctagggatgttgacaaattgccccttcccaacaaacaggcagatcccaggatcccatttcatgaataaaatttttgcaattcttagagatgctgtggtttccggacaccttcacagtgaccacacacccaccctttaggtgaactaattggtggaagatggatttcacagctcattcctccttcctcagcaagaggatagatatttgatggagtgttaggcacccctcttgttttttttttttttttcacccctactttggactttaaacttcagaggacaggctggttggttctgtttctccttcacctccccacacccacttccttaagtcctttgaagaagagtttcaggcaataaaaattttctagcacttatattctgtagttctggtgcgatgtagggagttggtccataccctctgctaccgtggggaccagtgggacacagcacagagtcctagacgctgacttatgctgagtcactggagaaaagctcagaacaagaagggccaccttgctcctgcctgactgttcctcatcgttaggtcttcctttcctcggatcctccagaccttagcttcattgagttgctgttttgatagcatttcaagcttctcctttcagcatttcttcctttttgcaacaaggtgggaaatcaaaggccacctggactggactacctggaactccttcaggctgtggtcatgaaaaggacaggtgtggaggcctttccgggaacttttttctccagagattagggactcacctatcttctctccatctctatctcctcccctctcccccaggaggaaaaagaaaagaaaaaaattccaagaacgagaagtgtggccctaggggcaaaagaagccaggaaatgaagccgttttaaaagccagcaaagctcactttggtgactttaaaaaaaaaaaaagtgacctctggtcgcagctgggtatggaggtgacagtgactgactaggatactgatctttgtagaggtcatttgtgaaatgggtggggatgctcagagacagcaggtatgaagtaaggcaaggtcactgctgaagggaaagacccacccacatcagcttccctcagagctgtacagcctttgcatataacgaccacttcccaggctggtagagagaagatggcatctctagatgtgcttttctagtctcagggtaattagttccctttgagtcagtttcccaacttattggctgattggttgacctagagtctcatgtagcccttgaacgtccaattcttctgtctctacctcctgagtgctggaattacaggcaggcaccactttagccagttcccatctcatctttgttgtagaaaagtgttcacccttgaaggggtggccagtctgaggaagctgcaccgcgctgtagcttccccttgacgtctctttcctggcacttcactctgatggctttcttgcctagccatcatggaggcaaggaaatggccagggctgagaggccagaaaacccctgcttctcttgggcagagtaatgatgacttccctgcctggcacagtgacacaccttgtcctcgggaagccacaatgtttgggcacctcgcctggatcttcctagactcagtggctgagtctgaagggagccacttttcagatttgcttgctttctgaaagccttccctccaggcaaagctgaggtctgtggggcaggagaggaaggttaaccatggtgctgccatcttaatttggaacttccaagcagatgtggctttcagtcctcctggatggcatccccaggcagaggcagagagtcctgtgtccatccgtccgtccgtcccccccaacgcaaaacactacagaaaagtgatccttctggctctggcctacctttctaggtcctgtggtgttaaccagctgggatggtgtggccccccgctccagaacgatccctgccctctcctgaaagcagctttctgtgaggtcattgctgtccagcaacttgcggaccattcctccagcagagattcccttccagcttccatgcaggcctgagctaactgagccccagcaacaggatcaaacccattccaagaggaaggccatctgttcctcagcctccagctgctggcccttcatttgcaattggctgggaagctttggaggggtcaggtcctggggacacatctgcagtctctgaatggtgttataactggggtcctgctgagcagagaaaggccaagccctttaaataaacttgctgaacaatacccccccaaaggtgtagagtcagagaagcaggaggcagctttgccctttagctaactcttaaccttggttttgtagccagggcacttgaaaactatttctttattcagaaagtacttaccaagcggagaagggaggggctgctctgaacaaggaaaatgtcatataggatttgggcatcgatctgccccttaagggaattagagggcaaatatctccacttgagtgtatgccatttattgaatatttacctcagtgtcaaagaggtgagcttgttccagatgcagcttgtaaagagccacaggcagcatgaagtcctctcgaacttgcctctggaatgcagttcagccttgggaacaccagccaatctccctagttcattgcaagcaggtccccaagctgtagctgctttaggtcctgtggttcttgggcctgtctgtagtttggtgttagggcccttatttcctgcatccgggggcctatgataacttagcctaatgctctagggactttctatagggaccaggctgtaatcgggcgtgtgacttcattgagtggatgaatggcagttatgcaggtgttgtccaccttggttttattgacagggtctctccctgactgggaacttaccacataggttaagctggctggtgagcaggctccctggagatgtctctgtctcattcactacatctaggtttttttgtttgtttgtttttgtttttttggttttttttgtttttgtttttttgtttttttttttttttggtgggttctgaggaattaaagtgatgcttgcaaggcaagaactttatggactgagctatctgtcagctatctgtcagcccagcccccagaggtacaataacctgtgggccctttggctcactggtttcttgaagcaggtattaggcctggtctgtatgagacggagccttcaggacctgcagatgtttagttccacttgagaactttgcaggaatcctcgctcagggaaggcgtgtatataagatgtgacagatttattcacttgaaagaaagccctggtttggagtcagaggcatgcaagtggatattctcatggggccatcttaaccctctgctgactcatctactgacctgttagaatcaggctgtgacccataaaaccaagccccaggtggctcccggctgggtgaatatgtctgcagagcttcaggtagagcatttgccctactgtgcacagagtgtttcctctcagtgtgctcctcacatcagggtcagtgagggacttaacagaaagccttgggttccctctttgtgccaccgtttgccagtagctggcctttctggtgtctcagggacagagggggccgttcagtacgaccacgttcattttggacagcagcaagccttaagctttggtctttggacaaagggtttctgagctggcggtgccatcctcagctgggagcccaggagcacccagccagagcactcaggccattcaggaggctgaccctgggtggaggtccttatgcacgataaacctcggtcattgcgttcattttccttcctcccaccttctcagaatgtctccacgagacagttgggtgagaatgaatatgtctgcgtgttctacgtggataaaacataggctgtgacatcatggggatggggtgacggcatgtgtcataatgggaaactggaaatcttatagaagagacatttaggttttgaaaactgcacaggagcctctcaggtagagaaacagtttaggtacagggaacagggacaggggacagaggacagacataccgtctggctaggcaagccaccatgtgaatgaacggggggaagaggggaaactgggggaatgtggtactcggtaatgatgtaaagatttcctagagagacactcattataggttgggtacattccattcaggcctttgcctctttaggagcccctatagcattccttgatgttgtagctacgaggagcagcaacctggccccaaaagagattcaacagactttcccagtggcttttgtctgcctgtggatccagccctagatggcaaggtttgggactagtgtgtcctaaggagtcctgcagaccttggggagcctgtgctttctcttgcaagtgcgccttcaggacgcaggaggcctgggcctggctggccagacctcggatacagacgcctctttgtgcctctgagccacgagtgctgggtactttgacataacttgtaatgccagtttctacttcctgggtgctatggaatctaatggctgagttctctgggacatgctctctcagaacaaaaggttccattttccagttcttgctcaagcaaagcatcaacagctaggggatttgtgtagctgcgcagatttgatctctcctcgcgtcttggtggcccagtgggaatttcagtcttgggagtgtatgaattgagtgcgtatgttgtgaccaggcgcctctgtcatttggacactatcgtcgcatgacaggattgggggggagagaggtgcgggtgggtaaggagctaagctgccgccgctttgagtctaggtaccgggtgacacaatgattcttaggcccttttgccttttctgcatttttattttctcctgggctcaggcataatttgtttcaaactggagggctgtccaccctgtttctcaaagccaaacctaaattacgaggggtgtgcctaaatatgaaatatgtaatggttcccatattgaaacatttgctaccttctagtcctctccgatgggcggcttgagccagcccagagtttctggggctgtccgactactgcagctgaggtagctattggtgggggtgatgctaacaggaacgtgtctgaagagatgctccagctattggttgtaaacaaagagcctgggcagcctgctcacctctctcctctccctagcctcaccatcctgccctcccccaccccctttttttatgcagccgtatttcttgaggttgaaaacttccatctttgtcctgtatgggtgttggccccctcctctctttcaggatgagttgtacagaggccttataaggatgctatcaggatgtgcaagttggcacactggtaaaggggaaactttgaaagagtaggagctgcagcagccagctctgggatgtcgtctttgtgtctggggacaaggctagctaggccgctcttcttcctgactccaccaaaggaccccattgtccttaatatcttttatactgaactctggtgccagctccatgctgacagtgccatgcaaaaatatgtacaggagaggctcttccaaggtcccagtcttgccaggtgtcaccggtttctaaaagcctaggtggacattccagtaccatgtgccctgcattctgggtgtccttgatttgaagttacaaagaacctttcaagttctgtaccctgttctatggccagtgaccacagctcaccaggcccatggagtggcagggcatctttatggctcggagggcagagtgggtcaaccctttgccactcacctgttatgaacccagtgtcctgtgactttgcagtgacatttggcagctcgatccccattctccgtcaagacttttggcagtcctgtggctttgctgtttatttgtcttgtattagatggcactgtctgggagaacgccgggccatggtattgtcctcgtcccagggttcctgtgcagtcctactgggctagaggagtgctgggaggtggggacagcttagctgggcagccccgtcccttgacaggacatgcctgctgaagctgtgccttctcctccaccctcctcctcccctttccctcctgcctcctctctcctcttctctcctcatcgtcccctttcttccttgtacgtccctcttctgggtgaatctactctgattctgctttgtcctttccagaagaatgtgttttgggatctgattgtgccctgtggggagcccccctaagtggggctgtttgaggtaccccactgtatctttaactcagatcctttagacgctgactaaagaagtcattctggggacaccctagaagtggcttggtgtggtgcgaggtgatttgttgccccagaggtggttggcagaagtggctccttctccctgcgatggtgggaagctgccatgtgatctgtgggagacgattggccagggcaggacttggacgcccatctgttctctgtttgcagttgggcgccatttcagaaaccacaggggaaaagtttataggcaaacatgataaaaagtgacagtctgaagtgctgctatcgctggcttggcaacttaaagcattacctgaagcagcttctaacttccagacgctctagctgcaacgggaaccccaagatggccatcctgtgggcgctggggaagatttcgtttgtgcgcagtgaggtgtcttagtctcggccccatctacttcttgaaggctccctttctagggtgacttcacgaatagcaaggtgtcatacccctcccccctagcttacaggaaggtaaatacaagctgtcactagtgacatcaggtgaggtcccacccagaggttgtgacctacttggatctgtagaaggacttggagaagggtcaggaagattctgcctcagtttccctttcgcctgggtctgaagcccctctcatttctaaatccctattacctcccagggaatagtggcttgaggaatctttgggaagaaagagggctcatggcagggtaacagtcagccacgtgtgcggaattttaaagacagaatctcactacatagcccaggctggctttgactgccctcactcagtagcttagtaggcggtaaactctgaagccgatgcaggctttgaacttatgatcttcctaacccaccatgtgccaccataccccaccactgttgatgttttcattattggatttgatgctgtgaaggaacccctttatcttttggtttgtttgttttctgagtatcagagtagtcagctcactgaaaatatgaccagtatataggaaactgctggcatgtctcaagggtttgtaacctgtgggtagaaacacagctaagcctccacacaggagagcctctggccactgttgtgtttgtcgcaggtagaaacagctgagcagagccttcccagaaagtaaacatgtcgccttgtttgttcagagagtttaggtaacaatgacagtgtatggcccagctcccatgcatctttccaagtttccatttaattatgaaaaatgtatgagaacagactttctgtctgcggaaacccctgaaagagcatttggtgcctctgctcgtagcttctggaactttctccccactgtgctgtgcagagtgcagagggtggaacttggaagcgtgtgctccggtaagccacggcatcagaaatgttaaatccaggaaatgttgatattgctataaaagagactgtttggatttcccagggagttccttgtcctgtgtcaattgtcacgtgttacacagagcagcttggcagagtcgggcaaggagtggcctgtgtggagaggccatctgagtgggagagacaggtggggtgtggcgagcacagtccttggtgccttggccccttataggacactatgaggtggttacaatatggagttgtaacaccacaggactcttaagagcaggcagtgattgggaggagccagtcccgaagcctggtgaaggatttaggcacagaagagaagcctttagctctcaagtctccagggctaggcgggagcaggatggcatcttttcagcatgccacttgggttccatgttcttagtgccctggtccgtgatgtatctcatgtgtgatccatttgcagggagctaccaactgcatctgtgtcctgggatgctgttgggttggctttttcttctcacccccttattataatcctgctctctcctgtttcttccccctctacggtatttgaccttctcctttctttctgccctttcttttcctgtattcacccaatctccctactccctaggatcaccaaggaggaggtaacattgctttctgctgacgctgctgacccctaagtggggcctcttgagagaaggtcactagggagttgtgcattctgcctatccaaggcagataccttggaggaggccttggcgttaggatggcttgatttcatagatacttatctttctgacgtgcttgcagatgatactctatactgtccccaaagccagtcgtcttcctgggaaactagagagtttcccattttgcccatgccaacctggcctcaccattgactgagtgagatgggagcccatcagtgaaagtcttgagattaaaaatccagttgtttctgaagacagtggagcaccacagttatagcttgagaacaacggcggatgactgacattggttgtggctggaagatcaagtatacagccggtggctcccaggcacctcccgtataatgccttcttgtatgttggtggttggggatcttgtggctgagaggctatgcagggcagagaggaaatgagcccagtgtccctgtacccagggcagtgtccctttaccaaacatccagtgtcctgtcctacctgagacccctcttcttctgtgttcctcacagcatggtgatacagtatggtagaattggtccagcatggtccagtagtgcagctaaatttcaatgagtcttggtcctttgttgatgttgggtggaggaagggtttctccgtggatggtgtagactttaaggctccatcattcttaacattgtacgaatctttggtttaaagatgttaagaccagactggcagatggtatgagacttaggttcaaatggaacccccctttcccctccttatttctcttcctcatccttaaaaatatgaaccctttgttttacttgttgttgctgttgttcattattctcagtgttagtgtgtgtgtgtgtgtgtgtgtgtgtgtgtgtgatgtgtgagtgcatgtagacaaatcagccatgctgtgtaaaggtcagagtgcagtctggtagagtcaattccttcttcctcttctacctttttaagggtttctgggaaccaaacttggctttaggcaagcatgccttcctcctcggagccatcattccagaactgcctctccctcattcacttagccactcaggtcagctgcctcttggtttaaatgggcagggaaaggcctgagctgagacccttccaactgaattctcaatgtctttcaaacttggttctgtgtagtgccacagggtgtctgctacttcttggaggagactcctatcccctcctgcaacagaagctgaaacaccttcggtgaggggccacgctatcagtgtttggggcttgtagaccatgagatttttttttttttttcaatgactctggtctgcccgtataacacaaaagcagccctagacaatacatacccaagtatgtattgagtatggcactgctccaagaagtctttgtttacaaaagcaagtggctgacttgtccctcaggccatgctttgctggctcctgctgcccacggggccttcgcccaccgtttccacatgaacggctacctacctgcctcacccttaagactcccttacacacttcctattttctctgaggtttttcttcactttcatttgccccactgcaatggagggtccaccagggcagggatatggctaccctcctgttgcttcctgagtgtacagaacaaagcttggcctgtggtaggtatgcaataaacagagggcacatgagataaacaagcccttgaaaccttacctggctgtcagttgggtttgctttctgcccctgctttgtgtgtgtgtgtgtgtgtgtgtgtgtgtgtgtgtgtgtgtgtgtggttgtggtggggtttgtgttccatcaacttctgttttcttccctatgtgggttttacttttgtgttcctgtactgttaacatctgtgcccctcttggctgtgtgcatttgaagtgggggtcccctgtgagaagcctcaggccccttgtgttggctgctgctgcgcttcttggaccagatgtttattaaatagcaggactgaaacatgaattgactgtattctagtcgtgagagaatttgttctttggagtgggctctgggcagaataatcgccttgtgatgctgctgcccagatctggaacctgcccagtgtggggaaggaagcattgtgttttccaggcttgggactctgggtaccattcacagctctcactgtgggatgaaagcttatttcatgagccctcgtggccacctctggccctgagcaaggtcaggagcttccttcctctcactttttttgggagaagctgggaggttggatcatagttggtttcattctgccctgtctttagaggaaggcaatgtctgccttctctgtgtacagcaaagatatccagtgtagggatgggcgtgggcacaatgacctatcagaactgagctttctgatgtgaaggtttcctctggaagtcaggacacccataggcaatgtgtctatttcagtgtttggaggtatagggtaggcagatggactttagagtgggagagacccctttagtttccagccaggtgactgatgcagagtgatggatcatggagggccatggttgacctgggcatcagaggaggaactgggctaaacgggagtgagagggaggaccttgtgttcataaagaagagcaggatgcttgacggagatcagggactctggggtagtggtgggttggtgggcaggatggatctggctccaccagtggaatgctgggtagtagtacatgctacttatccagtacatgtagtctatgtgtatacatggctggtttatggtatagggccattaagtgccagtaattccttacttttctttctttggacgttaaaggacccccagcatctgtcattttgaggaagatggaatgtcccagctcgcccagaacagatctagctcagtcctgatcgggccccaagagcacataaaaacaatcaagccaatagctgcctcttcccaagtggtgaagagtaattttgtagatgggtctgtttgccccttgaatttgagacattttatttatattgaaaagcttggttctgtgagaacaggcaaagtgaaatatgaataagtagctaagtcagtgtgagaacgtgtatgtacgtgtgcatgtatcacatatacagtcatgctggatggctagcttggaaatcaactttacagttttcttgtggatttttcttccactttagggtttggttggtttttaaagccctatttccagtatgtggaaatgaaccaacccaggacagcttccgctggatcgtggacagcttctatggccatcgtttccactgctgtcagtcaagtctgggttcaggctgcttcctggcttctggggtatggggagagatggacacctcctggggccatttgtaagacaagcgcctcctggggaagaactggcctccactgactgttgtcggaccttctctcttttccctctttcccatctgcctctgtcttctctctcccacctcttctgcagagccaccaaccaaataccaaatctcccaaccagaagcgtacgtggttgcccccggggaatcgctagagttgcagtgcatgttgaaagatgccgccgtgatcagttggactaaggatggggtgcacttggggcccaacaataggacagtgcttattggggagtacctccagataaaaggtgccacacctagagactccggcctctatgcttgtactgcagctaggacggtagacagtgaaacttggtacttcatggtgaatgtcacaggtgagttggcttctgagtgtgaccctctatctcttctgtagatgttttctgattggaaattattacagtttttttttcttttttctttttttttttttttttggccaagtgaagtcactagtgacctgctttcatagactgccaggcaccagtgtcaagtttgttcttcattcatttgagacaaggttgcccaggctggatttaaactcctgggctcatgtcagtttcccatcctcctcccaagagctagaccacagggctaggctagtgtacctggctgatctatttctgaaattcctcactgggacctggtgtaccacacagtttacaagtgacagagatctgaggagcagaagcccacagacttcccactcccacactgcccagcattcttgtctcttacagtagagaattgaaatgcggggagccagagtttaggtcctttactaagctctcaagtctctctcctcgttctttccttccatatagtgaaggagatgatcagcaccaggcctcctatgttggccaagtcgggaattctgccttcagaaagttagttagcagtcagaaggcccacataggaaactgtcttgttaggttgtcatttctgtcttgaaggaaaccctaaaagctaaaaaggggaaataaatcaaggtttggctattacagagtcaaaatttgtcagaggtggccatggagagatggctcagtggttggagcactggctgttcaatttccagcacccacagggcagctcacaactgtccctaactacagtttcaagggatctgacatgctcacaccgaaatatgtgcaagcaaaacaccaatgtgcataaagtaaaaataaataagtcatttagaaaattgttggggacttgagtactgtttgaggctttaaaaaaacccccgagaaagcagaaaaccctgaaaatcagagaccgactcctggcagacagacacttcttgacactgcccggtctctgacattcctcctgggtggtcgagctcactgaggaggttgatcactcggagagctcactcggccgcaggtgacctttgcctttgcaatgcatccacgtgtgtgttcttttgaatgcagatgccatctcatctggagatgatgaggacgacacagatagctccgaagacgttgtcagtgagaacaggagcaaccagagtaagtaacctgcctctgaaggtccccgagaggagtgacggggagtcctgcctgtcacctgtctcctgtcgactcccccgtatgcagtgctatgtccttggccctcactgttccccgctctgtctcctgtccctattttccaacttgcaaataaactgttgctgtccaccgtctcgccacttgtctgttcttcttgtgtcaagagctctctcttccaaacaaacactacttctgtccctggtcttactgtcttctttggtctctccgtattcatagatagaccactactagaactgtgaccatcttggttttcttcataagtcccgtcatgcctttcctgacttagggttgattgattgccttcctccgctccctggagtatttcattattatttgttgatttattcatttatggaaacaaggtgtcaactttgttgctcaggctggacttgtattcctagctcctgggatccttccatgagcctctggagtactgggcccacaggtgtgaaccaccttgttgactgatttattttggaaagtcctccatgggcttgtggttggaggccagagttgctccttatactcagcatatggcttaacaatgaattatctgttacagaacacaaatttctgggggcgtagggacccttgcctttgcaatattgcctcttactgagggcagaaagtatgtcttactttgaggatgttggtgagaaagggagtgaatgccagcatgttgtaaggcagtgggcaccaggcgctcactcttgacgtcgctgacttgctggataagaaatggctggctgctgggagctgccagcctgagttccagtcttgactcactatttctcagttgctcatttgctatctgtgcgtcagatgggaagggcagccgtgccttctgggaagttagaggtattaaaggacagcatgcttcgaagatttgagtgctcgtgaatgcttgttccacaaagaagcaaaacacagagttagttatgttctttaggtagggctgcactgttctagagagaagctgtattggtaaccgattttgtttgtttgttaactttgtacattcagtgttattgtgaaaagattttttttgtcataagtaaatttaaatgaatcataaataataacatttagttattaaaatgagcctatggtggtgtaccttgatgggtaaatagtgctttacctagcatgcccaaagccctgctttcaacccccaacgttccctaagctgagcatggcggcacatgcctgtagtctcaggactccagagatggaggcaggaggactggaaagaaagcagctcacagtaatattaagagattttattcttaaataaaatacttctttttaaaaagtttattttatttatacatatgcatttgcctctctgtgtgtatgagcactgcatacattgcattgcataccctggaaccggatttatggacaattgtaagctgattttaggtgggtgctgagattagaactttgttcctctatacagaacatcttgaactcttaaccactgagccatcttgccagcccataatagagcacttcttaaataaaatatcacatactttccccagccccaagtgcagcatctcccattgtcaacaacatctaagaccactgaagaacccacattggctcagccttagagcccaaagcctgtggccaatggggttcatggtaggccctgggacttatggaaatgaaaaaggacacgtgtctatcattgtggtactacatgaattttatcatcctaaacattgttgagaatcacattcacacacacacttctggccaacccttagcaccacagtctttctgtagctttgcttgttcagaaatatcgtatgttagatttatagaccatgtaggattttcagattggcgtcttccctctagtgctacgcattagccttttctgaagcttccatagaacttcagctaattttttcttagtactgaaaagcaccctctggtttgtgtatacatggtttatgcagccccccactggaagatatctctcttagctgttgcctaggtttggcagtcacaagtagcgagatgctgtaaactaggtgtgggcttctctagctgtacatttcctctttcccccctggaacatgacaattaaatgctgtggtaagttcagagtcattggaagctttccaaaccactcttcaaagcagccatgacattcttggttgctaccatccatgaccgggagtgtcccttgcttggcatccttggtaccattttgtgatgccagtgctatgggtttttttgccattctagaatgcatttctccctatgactaaagatgggaagcatctttttatgtgcctgattgctatctccactcactttggtgagtgcctgacaaaggctttggcttattttttaattgggttgtttgttttcttattgttgagtttcaagagctcattgtatattttggatagcagtcctttttctcttttcaaatcctctctcctggtgtgtgaatacctttgttccaacagtgtcttgcagaacaagcagttttgaattcacaggacgttctgcttatcggctctcacgagtcccctcgtgccattggtgtcgaagtcaggagcaaagccaagggtgatgcggttgcgcctcatgtgttctgtgtttcatgtttatttcccagttgtgctcagtttgctctgtgtctagatttattttctgttgcctctgaatgttcagttattcctgtaccacttaatgaaagtgccaccacttagcctgtgataactaagggagagaatgttgttaggtcttgggatgaatattgtcactccaccgaatatttggctttgtccttaagtctctcaactgtttgggcatgaagagaaataatgtgactagtataatttttgctctagggagagtgaaactcaggaatgtggttttcaaagtgtgcctggaccagcagtgttagcatcacctgggacctccctagagatgcacattctttaagcttgtccttagaacaagatgtgggatgtgtgtgtctgtccatctgtccatgtgtccatatgagtgtgtatttatgtttcattttatattaagatgtgagaacttctgggataggggtacacacacacacacacaatttgctccaaacaggcacatactaccagccatgttcataaaaatcaagacagtaagggaaagtgtgtgccactgtgagttgggacagccttgcaaagacttgttcctgttcttactgtcctctgataactgaagacttagcagagcgtgttgttcatagttactgttcattggctctgcctaaagcaggaggtggaaccctccccgatccagctttggaggccactggtgctggctgctggctcaggcactgccttcaggaaccctcaatacagtcttgttatagtgaccagaaacctatctcagggcgcaaagggggatgtccagccacttgcagcctcgtatccataggcattccaggtccccacaggcgtggcatgatatgtttgtgtagttgtttatagctctcaaatgatactgcatgtaagtgcctccatgtttgattgagacatcatgttctacccacttggtcttgctggcacacctgggaactgttttgtgttgggtcaagtatactacgtcaccaggagtccacgggatgtcatgctgtgtaagagtgggtatagattatgtaacaaccaaggccaagtgataacaatctcctgatgattcatagtttgcctgatggggacttccagggcttctgctatgaacaagtctagctgcccagcatctgtacagaagggccaggcaggagaacactatgtaatgggtgccacgccatcgacaggttaccacactttcaccttgcaactcgggttttggtaattagctctggactgacactagctctgtccctgagatgggtgctgtgtggtgattaagggctggggttagctgtaccagggagatgctgctgcagggaggggcctgtgaaacagtagatgctatttaaagtgatagcagttcttagctggctacttggcctctgccatctgttagtgtgattaggctggtctgattcacaggtgcagcctggggcagctgagattaagcagctgtggcctgggggtggggggtggagtggggtgggggaccgacaaagaatgtcagggctaggaacttggcaaggtggggaaggggatgtgactgttggaacttttgttttgtttcctcctgccacctcaggtgtcaaatacctgggctgacctgattgctagagaaaatgaggaagttctgaattctttgcattttcagccacctggaaacatccttgtgtccacacagattcccctggagcctctgttgtctggagatgccacttagggtgtgtgttcgaatattcgccttaagtaaagttagcctaagactgggtggactgtggtcttggggcttgtgagcataggttccctgcttccctttgggacacttcatgtgctaagtctgtatcttctagcttgaaaaatgtcatataggtcatcccttctgccagattgccagatagtcatttgtcagtgtcggaaagcaagctgccctgatgcgcagaggttgtcagtcccgagtatcatatagaaagcatggtgaccaaacctgagcacaaaagcaacacacgaagaattaagagggctggaagatggttcagtgggtgcctgccaccaagcttggcgacctgagttattcctggaacctattcagtggaaagagataaagcactcctacagtcagtgtcttagggttactgttgctgtgataaaacagtgggactaaaagggacgtggggaggacagagtttatctggctcacagttccctatagggtctcatcatcaaccgaagtgagggcaggagctgagccagaggccattggagggctgctgcttattggcttgctcccccatggcttgctcagcctgcttccttatagaaccaggaacactagcctgggggttgggggtgggtgggaccacacagaatgggttgggcctttccccatcaatcaaccagtaattaacaaaataccctacaggcttgcccacagcgggggtgggggaggtggggnnnnnnnnnnnnnnnnnnnnnnnnnnnnnnnnnnnnnnnnnntatggaggctttttcttaattgaggttctctcctttcagaagactcaaggttgtgtcaagttggcataaaactatctagcactatgtgcatgaatgtacacacacacacacacacacacacacacacacacacacacacacacacacacactgtgcattcctgcatgggctgaccagatggatagggctcccttccccttttaagttaagtcttcccatcccaggtgtgaagggcgtctgtccccaggtcacatttaagcagctgattagctaatgacctcacaccttgccatcgcctgttcctgagtgcaggaatcctgtgactccatcctaagcggatgctcaacttgttttctctggaccggatgtttgatgcagtggtttgtaatgtattcaggttgagggcatacaagtttctccatttgtgcatcagcatggaatgggttgcttacctagttcttgccttccctggggatttaagtattcccatagattacctggcagcagattcgtggagatttattattgttattgttattattattattattaaagtatttcctcaagcttgtgttgaaagggattgctttctggagattctgagagttagttcttgggtagatcatgcttcactaagtttgtctctcttacttaagtgcaggggctccgacagcagggcaagattcccgttgttggagtggtcctttccagtagcaagggattttccatttcgttttcatccctgttgagacctgcaaatgccatgtgctccacatcagagagaaaggcagtcttcttttcttctttttcctgggggaaggctttggagggactagggatgtggtctgaggtcccggattctttgactggtaacccggttgctgctaacagtcctgaaccatctctgttctgatgattgtgggttttttttttttttttaaaaaacaaaagtgcgtaggctgccgaacattctggaaattcctcctaactgaaacctcatcagtaggtctgttcgggtgccttatcacaaagggtgctgatggtgagcctggaacagctagctcttctcagccccgcctggccagctgcagggttgctgggatgccttgtcttgcagaagatcctgagaattccatggaggcagcctccaggagactctagtcattttctcttgtgagtgatatcacacctcttccctccccccagcccaccatgtgtttctgattaaccacctcactggtcagtgagctatttgatagagatttctagaagccaggctgtggtggtttgaacagaaatgctccccaaggctcatgtatttgaacactcagtcaccagggaatggcactgtttgagaaggactaggaggtgtggccttgttggaagaggtgtatcactgagatgggctttgaggcttcaaaagcccatgcctggttgtgtctttttctctttgcctgtggatcaggatatagaacttctgatccacttctctagcaccatgtctgcctgtgtgctaccatgctgcttcccattgtgatgataatggactaacagatctctgacactgtaagctagcccttggttaaatgctttctcttataaaagctgccttggtcatggtgtctcttcacagcaatagaacactcactaagacagtactcctttttaagtgacactcccagtttgactctgctagatttggcttctctcagttcatatcaaactgaagtagatgaatgtcggtctagtgcaaggatagtgacattaaaacaaaacaaaaccaaacaaacacatcagggggcacagcattcagatgtcccgattagtgatatttttaaaagccctaattatagacttaaggcaagggccttagtgaggctttagggagtcggagagacttgatctaagagctgaaacagcctgtgcgctttaaaaattctgcatcaataaaaatacagttggcagtcgtcagcgtccccggctcacataaatcttgaacttttgacttaattactgtgggagagttcacagggcagcctgctgtggataaagagcattgctaagggagctggggactccgggctagccttggcctggcctctggctttgtgaccttgatcaaatcacttaacctttctggtgacattgatcctgttggccatcaagccagatggaggaacattgtaatatgattctctgtttttcctttaaaatattgggctgtgcttgcgttttggttctggacagaacagccagtaaaccttagatgtcagtacttggccgtgtaagtggtttttacaggggcaggcccagcagcttatgttttatcattaagtttaaattgcagggtcaaaaaaaaaaaaaaaaccctgtagtcctaccatttgttgacaaaaatcaatacctgcatagcacacagaagcctggaaagaatactggaaccttatcaaaacagcttccttggtttagagtaaaggtttgcccaggcatccatactctcgctttgccttagaggctggcagcaactcaagctgtgacctatttcattctattcttgctagctgatgaccatcagcaggtgcactgaagagggacagacacccattgtggacaatgcagcagcccatatagaggaggaaagatggacctccatggtaggacagagtgattaaggatgaccatggagctcttgggggactcggagtagagttagggtcactctgtactcagttgcatcttaacagagtgaaaggctgcctgggctgccctccgagaggtgattggtactggaacaggggtgaatggctctaaggaggtcagctgcatctctgtgatgggattttatttgcttcttatgacatatctctctgttctattgatttgcttgttagtattattttgtgactaacgggacctttttctttcgctgtgtatgccgtgagaagatagatagatatggatgtcagagccaaagggaagtcttgttcactcacaggtgacttggttctgcttcacttttggtgctgggggaggtgtctaccctgcagtcacatgactttgtgtgcgttctgtgtacccctaagacgatgccgagggcaggagagaaaacagctgctcttgttcctggtatcagacagccttgtgtgctcttggcttgcagattcatttccagtaaggttgttgaataacctgtgtgtgaccatccgctaggtaccaggattgtctctgcttctgcaggttcctaccctggtgcagcagttcctgctccgtggaagttttgcaatgctcccaagctttgggagggtagaggctgtcttgccttctcccagatgcccggctcttgtgtctctggttgtctgttctagttacttggttgctggaagagtctgcagggagtccccagtattggacctgcaattccagtattagggaggatgaagcaggatcttgagtttgaggctagcctgggctacataacaagacagtatgaacggacaggaggctgctgcggcaggaagcacaataggatgcttgtatgggaatattctttttctagatcgcgtagctcctttaagttcatatctgggagagtgataaaataaaaataatgctattgttataaataataaaatagtttaatctcttcttcaagcatcatgtttagtgtttaaaaaaatgcactcttgggctggtgagatggctcagtgggtaagagtacccgactgctcttccaaaggtcctgagttcaattcccagcaaccacatggtggctcacaaccatccgtaacaagatctgacgccctcttctggtgtgtctgaagacagctacagtgtacttccatataataaataaataaaaaaaaatgcactcttgccatcttaaaaggaggtttggttgcaaaggcctttgtcctaatgtagctctcaatagagaattgcactggccagaaagccaggtgcccagcagagcgttgggatggcccttccctggtatacaggtatcttgaacaatatgacctttcagctactggggggactgttgtgaacttcggttccagctacagactggttgcaattggatttcatcgtgccccaacccaccttgggtctctgtgactgaggtgagaagccatgcccactgtggtgtgcggccagtgtctgtcttgtgtgagcagatttttctagatacagttccactccagggaggcacctacttgctagaaatccctgcagcattctttcatcctattctctaagccattctttggctaccaggacaaaggcgttggttgccagtgtgctgtagacacaagtcaggacagtgcagctggggggcagtcccctgcggtagtgcagacttgttgatggcttcgagtggaaaagaacattgctagttcctgaggccagcccctactttttgatctcagagagcatgaaaatcatgccttatagtttgtaaacacctatttgttggcttcctttatggtttttttgttttttgttttttttgttttaaaagggcattccagagctcagcccagcagtaattgatgctatctgaaagagtgactgcattaatatttagctaattcatgtgaataggccattgtgtttacttaaacaaatgacatgagtccagacacctgacagcatgaggtatgctttccatttaggtcagatttgttaaagtctttgtgtagggacaaagcttattatttatttggggatctcaatggctgctttcagtggctttgggtggatttttctaagtagaagcttttaaaatggaagatgattgaaattgtttcagggtatgccaggtccttggggtcttgtgataagtgggagtccagtggtccccccatggtgaactctcaaaagaatagatgtgtttacaagcattcaatacccaggccacaaggtccgctcatagatgcagatcacagttgcatttcacaaatgcaccgggattgataagaaatggtacagattcttttcttctttcatggcctctttctcaccctctccgttccccacccctgccctccctcccctctcctctcctcctcctgtttttcttctgctctaaatgggtaagcaactgtggttttttttgcacagtcttggtgtcatgagtttgccaccgaaatcccgccaccttgacacttgggaattcgtgaagaagatgccgtgtgcccttgataagaaatctcagctctgcctcctatagcaggtgttaagagcaaggcataggtgcagttattccagaaagtgattgtaacaggagagctgttcaggttgacacccctctccccaaatatgctccctgactgtggccactttgcctctggtttgtagagtatgcgtgcggctcctgcagacccttatcatgtggaaagtataatcgttgcccaatatttcagtggaagttctggacaatactgaaggttaaagtgttcaccctaactgactatctcagatgttctagcttttagtgtctacaaggtggcatagcaggcttgacttcttggtgaacctggtctgtaacagctaggaagactgggataaggactgagattcaggcatcagactaatcttggttatttgtcagttgcaagcctcttggtgttgcgactattggcaggtaatgtcagtttgctcgacctgcagcaggtatggcaatagcttccttgggattgctgttctgatgttgtgaggagtctggtacatgctaaatatgcacaagctcttagaacagtgcttggcaaacaaacactgggtcactagcagcctcgagctattagtccaggcttgagaatttatagcagcgttctggatggaggctgtggcacctgtgtataaggtgcactgtgcttgttatttggtcatggaaagatctacctctttttctgggcttcataagtcacttgtacctgtgactgtgagggtcatttaggggacttagcttttgattagttgcctcttaataagcctaggcatggcgttaggattatagtgctcataaccaccaccggaaaaaaaaaagttctctttcattaaataaaaaacattaagatatacttatcaatacagtattttgatttctcacataaggtgcaaggaaattaatgatggcttcctcgatattttaccacgttaagatgagaacttatactatcatcaattgccctttataagactgcttgggctgggcgtggtggcgcacgcctttaatcccagcactcgggaggcagaggcaggcggatttctgagttcgaggccagcctggtctacagagtgagttccaggacagccagggctatacagagaaaccctgtctcaaaaaaacaacaacaacaaaaaaaaaaccaaccaaccaaacaaacaaacaaaaaagactgcttggggcgggttagaatgtgagcaaagcgagtcagtgggtgaagaacttgctctgtaagtatgagggtctgagtgtgatccccagaacccattagaaaaagccagataccatggcatgtgcttgtcaacccagtgctggggaaatggaagcgtagaggtccctgggagctcagtggcgggccagcctcacctacctgggaagttccaggccagtgagagaccctgtctaaaaaaagaatgtatttatttattttttattttttggcacttgaggaacaggcacccgcagttgacctctgacctcacacacatgcgcatgcacccgaacacacatgaacacccctctacccgtgcccacacagaaagagagttctgatctgtaagctgatatgctccctgaggacagtttatttttacagtgtgtatatttgaccattttaataggcgcggtgatctaaaatgatgtatttttggagggctgagcccttgttattacatgggctgtttctgtgaatataaagtagcattttaaagcatgatttgacatggaattatttcttggcnnnnnnnnnnnnnnnnnnnnnnnnnnnnnnnnnnnnnnnnnnnnnnnnnnnnnnnnnnnnnnnnnnnnnnnnnnnnnnnnnnnnnnnnnnnnnnnnnnnnnnnnnnnnnnnnnnnnnnnnnnnnnnnnnnnnnnnnnnnnnnnnnnnnnnnnnnnnnnnnnnnnnnnnnnnnnnnnnnnnnnnnnnnnnnnnnnnnnnnnnnnnnnnnnnnnnnnnnnnnnnnnnnnnnnnnnnnnnnnnnnnnnnnnnnnnnnnnnnnnnnnnnnnnnnnnnnnnnnnnnnnnnnnnnnnnnnnnnnnnnnnnnnnnnnnnnnnnnnnnnnnnnnnnnnnnnnnnnnnnnnnnnnnnnnnnnnnnnnnnnnnnnnnnnnnnnnnnnnnnnnnnnnnnnnnnnnnnnnnnnnnnnnnnnnnnnnnnnnnnnnnnnnnnnnnnnnnnnnnnnnnnnnnnnnnnnnnnnnnnnnnnnnnnnnnnnnnnnnnnnnnnnnnnnnnnnnnnnnnnnnnnnnnnnnnnnnnnnnnnnnnnnnnnnnnnnnnnnnnnnnnnnnnnnnnnnnnnnnnnnnnnnnnnnnnnnnnnnnnnnnnnnnnnnnnnnnnnnnnnnnnnnnnnnnnnnnnnnnnnnnnnnnnnnnnnnnnnnnnnnnnnnnnnnnnnnnnnnnnnnnnnnnnnnnnnnnnnnnnnnnnnnnnnnnnnnnnnnnnnnnnnnnnnnnnnnnnnnnntttgaaatgaagagatggaattttcaatttatttagtctggctagaattactttacaagtgtttcaagagaccgtgttcctgcgcatttggaagggcgaggctgcttcaggttgtggctttacagtcagtgcctcacagttttgccaccattccaagcgcagcctagtggggtctttcctctaggtttctcccagaccgtgccacggttttagttagggctgggttctcccttaaaggactctctggggaaggaaccgttcatttgtcattaggattcacgctcatgcttcttgccacatgggccagagcagagcggtgacactgtagcagctgtcatctccagggtgagcaggcagaggagggaggtcagaagaataggtacctcgcagcctctgcgacctcaccgtgggagcagcgttccagctattcccctcttccctttaattaaacaggtccccagggaggagctgagccaggggcatgaatgccaagagtatcactaagagccatcttagaagcttcccgcgtgggcaaagagaaggcaccgatgcccagtttctaaaagccaggtgggagaggcgctcttggaggcagccttggggtgtgcggaagagcggtctctccccgtgtttaacctggcactgtggcacccagcccccgtgccaccctgccgaacttacgtgagcttcctcccacctgtcggatacctgggactggctgagcaggctttcatctttaaaggactatttgcttctgtagtaacctttaaaaatgaatgtgtagagaggcccaaacccagaagaagacggggaaagcctgtaagtctttgtctgggttggggaagttgagcgtaagagcagagaaggacaggtctgcaggacctcagacatgggaactcttcagtcctctaccgccatttctccatgttgttagaagcaggccctgctcttcttagttcagtccttagacagtggcattgcaaggtagactctaaaataagtaaaattaacaaataagcaaagatttcattaggtatggcagcttnnnnnnnnnnnnnnnnnnnnnnnnnnnnnnnnnnnnnnnnnnnnnnnnnnnnnnnnnnnnnnnnnnnnnnnnnnnnnnnnnnnnnnnnnnnnnnnnnnnnnnnnnnnnnnnnnnnnnnnnnnnnnnnnnnnnnnnnnnnnnnnnnnnnnnnnnnnnnnnnnnnnnnnnnnnnnnnnnnnnnnnnnnnnnnnnnnnnnnnnnnnnnnnnnnnnnnnnnnnnnnnnnnnnnnnnnnnnnnnnnnnnnnnnnnnnnnnnnnnnnnnnnnnnnnnnnnnnnnnnnnnnnnnnnnnnnnnnnnnnnnnnnnnnnnnnnnnnnnnnnnnnnnnnnnnnnnnnnnnnnnnnnnnnnnnnnnnnnnnnnnnnnnnnnnnnnnnnnnnnactcctggtcttaaaataatgggcctacatcattattatggataaggaacattttgcaaatgtgaatgagtgattacaatttcggagctgttagacacccaggcttaatgagggaatgcccttgatttttaacaggtgcaggtagcgttaattacccgtgacaacgttgtgctaattaagagtacccaggaggacctcccaccccacccggggaagatggttgtagcctatgaggacacatgctcaggctgttttgtatttttaagatttatctgtttgttttatgtgtatgagtatcacctgcatgtatatttgtacacacatgtgtgcctggtgccctcagaggacagaagaaggtgttagaaccctggaactggaattgtagttgtgagccaccatgtggaatgctggggggtcttctgcaagaccagcaaatgttcttaaccacggagccatctctccaaccctcccaccgaccctgggagttttggctaattcgtgtttgagctgtttctagaaggaaggagaaaggaatttggatgcctagggacacaattctaactctaaaggacattttgatgcttgagaaatgaaggatagagagatggctcagttggtaaagtgcttgctgtgacccaagttcaagactagaatctgttaaaaaaaggggggggggcagggcagatatcacagtgtgtacctaaggtcccaggactggagttcaatggccagctagtcttgccaagtcaggtttggtgagaaagagatcttgtctcagagtaaggtaaagggagatacccaaatttgacctttggcctccattcatatgcacacagaaacacactccccagaaaataaaggaaagagggtggaaaggatgaagggagagctggcctttggaatgtgcggccctggccttggtgctcgcctgatcttttcctagtgcatgcagaagggggctgtggcctggtggcccctgaggtgacctgtccaatgcaaatgattgtgcaatagagattttcacatcagggcaataatgttgaccctggtaggacattcattgtggtgatactggacatttagaaattctgtggagcccctgggctttctgggaattaggaaagtcatagctttcagcgtggcaaacataatccataaagcctaattcctgctgcagatgcattaaaccctccagggttcctaggttgtgatggcttcacgtggttcgtggcacaaggttaggtatcttagtctctgtgtggggttctcttttgatattttcttcattgctgagtgaactcctaaagaaaatgtccctgcaaacatttgacctgaggtgctgtgtgtaggctgtagttttgcgtgtctcagcaccggaaaggagagacctacttgaaaaaaacaaacaaacaaacaaaaaagcttactttatttgattgtgtgtgtgtgtgtgtgtgtgtgtgtgtgtgtgtgtgtgtgtgtgatcttgtggaggccagaggacaacctgtgggagggagtgggttttctcctttcaccagatgggtcctaggactcatactcaaacgatctgtcttggaagcaattccatgtcataagacagatacctaattgaagagacccaactcaagcgccccagagagggcctaccaagtcccaccccccgctcctctgatttctgtctgtttgcctcttaatgaagccaggtgtcaagttttccgtggtatgtttttccagaaagccagagacctggaagtttccataaaggaacattggttatttgtgtgacttttcttgtttcttcataaatccgtcattctggagcccacacagggctttgatggccaggccagtccctcaaactcttctgacttgtttatggctttgtggcccttggccaccacaccccagcatgctttggaatgacttgtgcatgaggccactgaaggggaaaacacaaaaccacttgaaatcagggaattaagaaatgggaccaaaacttgagctggagggatggctcagtggttaagaacatgtattggttaagcagaggagctgggttcagttctcagcacccagagatcctgtatgccccagagggcacctgcgtctacaggcgcatatctagccctcatagaacatgtgattagaactaaaaataattgtctttaaaaaggagctcagatttgtttcggcgtaaaacacaggtagaaatatttggcattctgtacctcagtcgtgtgtatgtgtgtgtgtgtgtgtgtgtgtgtgtgtgtgtttgtgtgtgtgttgttcatttgttcttccaacttctgtcacctctctgggttaggaaactgaaaaacaaatcaaaataaaccctccaaaacctaccctagaatgcctagaacaccatcttgtttgatcttttttttttaacctccaaaacttttttttttgttactccaaataaaatgtctgtacccattaagaaaaaaaaccctcccccagcactgagggttctcaggtctatttttatgtctttaaatttgttttgttttcttagtcccgcctgtaaatgtgatcacaggatgtttgccttttaggtccagcttattttacttactctattcagggtccatctattttacagtgtgaatcaaaacttgatttagttctatgattaatcagtattccatccagtggctgtgcccagcaccttttgttataatttatgtgaaggtatctgagtcctagctttcagctctttggggtatgtagttggtggaattactgggtcatatatggcagtttttgaaggtcagtattgttaaagagctgagttcagaaggtgccgagtgccctgctgccacccggtttgttggcaccttcattgccggaagatggcatttggtggtgttaagacacacctcctctgcagagagtcagggcttctttaccgatccgagtgaagacgttccagttccacctgtggctgtagatcaatggctctcaaccctcctacaggggcaaccctctaatacagttcctcatgttgtcgtgacccccaaccgtaacattatttttgttgccatttcaaagctgtaaatttgttactgttgtgagtcatagcgaatgtcttaggtgaccccccctcgtgaaagggttgtttgacccccaaaggtcaaaggtcacaacccacaggttgagaaccactgtggtagaaggtctgatggtacagttctctggacaaccccactgcaaagcaaactgctacccgtcaatgccggtttaagcattaacaagtgtttgccttcacatctgggagatgacaggcagctaaatgccagtccctctacacatgtgtgagatgtgtatacaggtgcgttcacaaggagtggcttgacatccttgggagcctcctggaaatggggctctgggagggaatagtgagatttcctatatcttctcagccatggatgtatttatagattacctttctgaaacccggaccatagggatttgtattgtggggaagtcatagggcgtctgatgtcacatggacacctccttcaagctggctcagagtacagctgctggatgtttattctccttgttagcgaacacctgggtatttggaaatctttgaatattttgttgttttgcaatgaggaagccaaacatccaggtgacacttggggcctttgacctttgactttctggtgatatgttttgattctgcataagttaaatctttattccctgttgttatttgagtatagccaaggctttcaaaggcatttagagaggtttgggatagccaaaagagtctggaaaaaaacaaaaacaaaaataaaaaaaacccacaaaaaaacataaaacaataacaataaaaaaaacctgtctggactgccttctgtcttcgaatgggtggggtgtggaacatttgtggaatctgctttgtgtgtgtgtgtgtgtgtgtgtgtgtgtgtgtgcgcgcgctccaagttaaagagctcaggggcttagcttcagtctgctttgtttcaatactgaaatgttatttcaagaaagaccttggtgaacatagttttagaactcggctcgccagttctgttccttggcagctggaaaataacgatgaattccacacaaatttggctgtgggcaggaatgaaaataacgagttacgggaatgttgcttggtgcagggctcctcctgtccctggccttttgttcttggtcagctagagagacccagaagaggaacatatccctagagcaagatttaggacccagtggacagctgaggagacattctctttctggtcatgtagctacgtatttctctgcacgcacacacacacacacgtgtttggatgccggaggctgacatcaagtgtcttcctcaatcactttttatcttatttagtgagacaaggtctctcactgaatctaacttgctggttggcctgactggatattttctgaggacaagatacccagaagaagcgttacacagttaaacaacagcaacaacaagcaaaagtgtcattagttttaatgggtgcctccgccttatccctcagactggtttctctggttttgtgtcgccgttcccctttggtgtctgcgttcccttgtattcacttaccgtgttctctagtgacaccgatcttcctaatttctgttaatcagctgctgaacaagtatctcattattgttttaatttgcattcccttgattgctaatgcggacgagcagcttctcaggtttggggggaggtagtcgcattccatgtacaaaaccagcgtacatgcacttgacccgaatgacaaaataattgtggccctgcagctctgagacacccagagcacactgaagagcacagtgcatgtcacatgctttctgcaagggtgttttgctcctgcaaagggtgtcccttcaggtcacacagaagcctggtgtgtaaacactgatttaataaatttccaaactcggtgcctatggttgctgtttcttacagagttgctattgtagttgtttaagcagctgctaatggacagtaggctctcctctacagaagtgtccaggtccctttgttgactgtttagtttctaagagtatcccttgggaaatgccatatcgttaatatttgggtctcatgatgtgtcaaggaattcagttgggagtagaagtgtcagagagaaaatattaatgtcactgcatgtgggaggttattaatggagtcacaaggttctagaaagctggaaatactgagtaacagggttctagaaagggtagaaatacccactttttggtatatgtgcttcttgttgaaaaaaaatattttatccatgttaacgtattgatgtttgtagcgtgtctctaagaagttagtatcaggggctctttcttagactgctgtagacccaaggaaacacttggctgatcatgtgctctgagagggggtgtgggggtggtatccaaaaaggcagctgccaggctgtgctgccccaagccaagatctgatgtcttgggcagccaacgtcacctctcttagcagttcgtgggcaagtccatttggaatatgccatgtgccagagtctgaatccaggcacaagaaagacattgacagtttggatggagcccagagtgaggcactgccatgattaaaggctcacaggcatgacatttgagcgggggctcaaagaactgaatatttacagcagggctcagggctggattatgaagcgtagactctgtagcttggggctgcatccctaaactaccttccacatgactggcaggaggagaaccagttctgatcatcccgaaagcctgggatacagagggtgcccttgtgtccctgtctgccttgagttctgcagaagagccagccggtcactgtttcttccacccctcagagagacattgccaagtagcaccctgggactggaatttgataggtttccataagactatggaattggcatggcttccccaatcaggacactcatattgaatgatgtagggagcttttacctaataagaagccacctggctttctctcaggtggtcttgcaggtcctgcaaggggaccaacgtgagtcttttgagtagaacacagaccttctctgtcaccagtctgaagccctcagattcatcccttctccccaacctctctggcttatgagtcagggttcctttatcaccttcctgtgctggactctgaggcaactccatgattgtgcaagggtcggggtcagtggcatctaagcaaggcacctgccctgccccatttctaaccctctgcctgtgctgttaagagggatccagccctcaccccagggctaccatgtggcatcctggtggagaacagtgatcttggctctgtttggcagttacagccacggcataccattgctcttgttctcaggtgcatccagggacaggtgccccgccttctgttctttagaagggcatggctctgaagtgcctttccccactgcctagttaagttctcataagatgagaacattagaacctcatgtgagctgacaagctgtgggcgagagtcataatagcttagttttacgtgcgcttcttatctttggaaagtctcaagatatttacaaacaaacagcaacttggagtccttgctcccatgtctggaattctgggaataccaggaacacgtgccatttatttatctccccatcagggaggggaagggacagacccctggtcccagtgaaaacacatactgtccacatatctggggacccagagaatgaaacaaacagccttaggaacaataatagatctgacccaagggcttcttggaggagttaaattagctaaggcagagggtgtggcacagccagtgatcaccactgttggctctcggtgattacgtggtgctctggggactgcaggctcctggtgggaggatggctacctcccagtgaggtatgacatcgtgaggcttactggttggacttcttggccatgtaggttctcctaatggaaccttaaatctaagacaaggacacacgttcacaggctcctgaataccagcctgcctagggaaagctttctgaatattaattgtagggcagtttacaaatcctgtccattctctgcttccaccaacttcctgggcatttgaacccaggctgtgtgcatgctgaacctgctcatggccatgagctcaactccgatccagccaattccattcatactgcaatgaatggtgctctgtgataaagagcctccttcctttgcctctttcaggtacgaaaccagcactggagccttattatggaaagtgtggtcccgtcagacaaaggcaactacacctgcctggtggagaatgaatacgggtccatcaaccacacctaccacctcgatgtcgttggtgagtttgccttctggcttgactcctttcaaaccatagcagcgagattattttttaccttacaattaaggagaattggcttgtctcctttttgtatccataagatgtcatctgagaaggtctcgtctgtcgtatgactgtgttctgtttcctgggtagccaggttttatgggcttgggggagatcttcttggcccctaagcattactttttttttttttatcaggtagatgtggtataaaacatttcattttggaagttaagattatgttgaatattcttggtacgtgcaagggaagctttaattatgtttgtgtgtgtctgtgtggatatgtctgtgtggatgtgtcagtgtggatgtgtctgtgtggatgtgtctgtgtggatatgtctgtgtggatatgtctgtgtggatatgtctgtgtggatgtgtctgtgtggatatgtctgtgtggatatgtgcaagtgagtgcaggtgcttttagtggacagaagagggtgctgggttttctggagcaagagttctaggaagttgtgtaccaccaatgtggaggttgggaacagaactcaggtcctctgggagagcaatgcatgctcttagctgctgaaccacctttccagtcctgggaaatgttgtttttaaaagagaggcaacaaacattggttaaagaagggcaacttatcacacaaagagtaaagaaacagttaatttaatgactgagtccctgtctggctggaagaaaaaagtcaatgtcagaaatggttcttaggtagctcaatgcttattcctggaagacatttctctgagccaaaggaaccacctatgtttgagactcacaaataggtttttgtcacagtgcacccataagcggatcattttcatttcccatcttaaggttacacagcctgtagttccagaacaggacatttcttcccaagttttcctggttatcatgagtttgtatcatgactactgatgagatttgattggctgctacttaagttatttttctcattgttgcacagaatacttaacaaaagcaacttatggaaggaagggttcatttgggttcccagtttgagtccatcatagtgggcaaggcacctggtcacactgaatctgcagtcaggaaacagatgaatactagcacccaggtcacctttctcttcttgtatagtacacctaatgggtaacccccttttggggtgggtctccctacctttattaattttattaattcctgacaaacttgcccagagggttgtctggagggtgattctaggtcctgtcaagttgatagttagtgtttgccccactgttcctgacaggagtctacagctgggactcctctatgtcacagaattggtgggttcggatctcttcctgtaggagctttctgtgttccgacttgtcaggcacagtgacacttggcttctctctccttggtcatttctttgggttactcttaggtgtgcagattgatgactgaggagtcaatccattttgatttctctcgggtgacaaggtgacaaacagatccacccactgtaaacacagactctgctacatcattttgtctgcatgcatggccccgagtattctcttacttatggatatttctgtctctttcataagatgcaaactgtttgaagggaaattctgcaaatgcttgaattacccaagaaccaataaaagcctccctcaatacaggattaaccaaaccgcatagattggttgaattgaagatttaggttgactaaaagttaaacattttactgtctggttaagtgaggttacactcacaaaacttcctttcaaagcatagcatgtagtcttaacttacgtatgggtgtaaacctccaatgtcaagagtatgagttattcaggagccttagtgtgcaatttgatagggcactgtgtaatatttatcctataactattcataacagagtatcagagccttcttttatttcttactttttttttttttttttttggtttttcgagacagggtttctctgtatagccctggctgtcctggaactcactttgtagaccaggctggcctcgaactcagaaatccacttgatccacttgcctctgcctctgggattaaaggcatgcgccgccaccacccagcttatttcttactttttatttatttttatgtttttttttgtttttttgttttttgtttttttttttttttttgagatagagtctttcttatgtagcccaggctagccttgagcttgtggtgtagttgaggataaacttgaacattcctggcccacatgccctcatccctggtttgtgtcccccactttcccatcctcagatactgagggctgacattaggcagctactctatcaccgagccatcttccagacatttttgaaaatatgtatattatcagttgagatgagatcttgttaagttgcccagtctcaggtcaacgtttccatcttctttctgcctcagcatcctgactggtacctcctcttaagacctgcatcaccagacctttggtcttgtttcttatagagacatttgtggtatgctagactcagatattttagtaaacacacacacagaggagtgacgtgtgagaggatttcttttgtcacaaatggctctaaatccgttcatcaaagggcacatgactgggatttacttcagtctgcggggacaaaaatctgacatggactgtttgcattaagaatgccagatttggggctaaaagttctgaatacttaattttaaaattaagtaatttattacagagagaaaaaaaaattgttctgtaggagtcctttgagattgaagcctaacacaggtctacaaattattcatggttggggccattccaagaattgaggagtcaaggcagggccgctgtcgccccagggtcttgcttacagcaggttttagcttgagttgttgtgttaaacattcaaaagcccccgtgccccacctcccctttgagctctctggcagctcgtccctgtgaaagctctgaagtctctctccgagtttagggctgggatttgaatggacctgctgaataatggagctgggctgtctaatgttaatcccctggcaatcagtcttgctgaaaagagcatatgattcagtggtgtgatgtggagggagcgtggagtgtatggagtaatgcagagagaggcctgattatgtcacaagtttgggagatcgcccagctcaacccgggccaataatgacacaatgctggttgggaatatccatcaaagcacaactctagtgatttttttttctaagtcttaagccttctttataaatactcaaaagtcagtggaatataagacattttcagtaaagttcgaggtgtgaaatttcctctctctctctctctctctctctctctctctctctctctctctcaaaacctcagcatgctttggagagcttctaataaaacgagaagtgagtcagccagagtctcgtagagacttacagggctggcagtcgctctgaacatcttggcaagtggaaacagaaaagattcaggcgtaggcaacaaactcctggtggccctggagcccaaatgctctactttgctatgtggtaacagggtctcagttgccgctgtacttcacagaaaactagaaaccgttgccagagaacggaaggcctggctcttgccacactgcctctgtgctcgctccgtctggggttcaggtattggtaggaagcatcaagactgaatgctccactcctgcacccccacaaaaaagccgtgaagctgtatgatttaagtgatgctcttgtgtcctggaataaaacagcgggccattgttgtgtacgaggggatagctctagcctcattaaaattgacactattactttgcagccatttacagcaaaggaaaattagcacgaagctccaggccttggtgactgtggcaataataaaacagcccgccaggtaaatggctacaggaggcagtgagccttcagtgtgattgctcagtggggatgctaaagcccttgatctgacggatggcccaccaccaccaactggcgcctagaagtcattaactcttttcaacatctcttgggtctgacccaagaaccgaggccctggcatgttaggaacaaatacagcttggtgcagcgataagagtagccagcctaatgtcagaaacatctgggcaccaggagagctgtcaggctctcctgaacctgcaacattggaaagaagatgtttgtctcacttgtttgatggccgtgttagtgccttaaaactgctgtaacaagtgtccccacatggattactctttaataacttttggtagtcttaactggaagaagtgtgtctgtgtgcgtttgtgtgtgtgtgtgtgtgtgtgtttgtgtgtgtgtgtgtgtgtgtttatgtgtctaggagtgtatggatgttagaggtcaactttggtgctagtccataggagtctttcgctcctcctcctcctcctcctcctcctcctcctccttttcttcacaaggtctatcactgcgaccttgagctgagcaattaggctagtctgactggtcagtgtgtctgtgccatctcagctctgggactgcaagcatacatcgttctgtttggctgttttacatggatttgggggaacccaacccagattctcatacttgaaaagcaggtgttttcctgattgtgccatctcctgagccccacaaatcttaattaggcaaactgagtgccatctggggaccagtgggtgaagttctctttcctgctgacttggcatctttgggtaatgctgtcatcttagactggtttggttgcttggcttgcagagcatcacagagcctccttactcctccttccacccctcaccccatctcaaggctgaggagatctgggtccagcaggagttggtgatacgtacaaggacttggagaagacgctcctgtaggcctctcagacctggtccccttgcctctacttcagatgattagtttcaggcaagggggagatggctcagtgggtaaagcacttgccaagcaaatggacttgagaactagaggacaggagtttggatccttagaacccaggcacatgctgggtcatttccagccctggagggcggagacaggctcctgtgagtaggctagctagtgagattggctatgtctgggagttccctgttagaaagaccctgccacaaagaatatggtagaaaaataaatcaaggaaattcctgatatgaacctcagtctgccataggtatgtacacgcttggacacccccccacacgcaaggatacatacatgcatacatacatgcatatatatgaagaagtgagggttagtatccttcttcactcaggtaggcccttcagctctgaattatgagccttttttcttgctaaccgctatacttctgtgttcccagagactattaaatacttactggtgactcctgatatttggtatggtggggtggggtaggggggcagtgcagtggaggtatgaacaacatgtctgatcccttactagtttaaatacactctctggaatctcatctcccaccccaggtgtggtatgcttagggctgccatttgttgtccttcacttctggcagggtggaggtggctcagcctttaccaccagtcctgccctggcttgtcactggcaggccagaaagacactgttggctagcccttgacacaaatcctccacggctcagctctagacatgatgcgacacagcctggcagcgtgtgccgggtacctcaggtgtggatttaagaagaatgaagtcttgcttcttctaggcacagactgttcagccctgctgtgtggctgacccctggcctggagcctctggcagtctctagtgagaggaagaaattgcacaaagcatcggtttgctacttggaagatggaattacagaggcttctatgtgatctcatagcagtgaggaagggattggaggagcctggttatccaatgtgggacctggaatagtgttcaagtccttgatgcgatagtaggggccaggacaggggtgtggctcagttgatagagagcttgcctagaatacatgatgaagtctgacccctccctccacccaccccacattgcatataaccaagtgtagtatggcatatctgtaatcttagtcattgtggaaaggattagaagtccatggttatctttggctacagagtctggggccagcctgggctatatggctatatggataaaaataaagatgcggtgctaggatgtttggtattgaatcatttagccattgagttcattatagaaacttccactagcaggatctccttgatttctgctgagaaagatcttatacaagtcttggtttccatctcattggcttcttagagcttgatgtgaccggagtgggggtggggggaatcttgggtacagaatttaaatgactcagaggttttaccactgaatgctgattttccttccattcttgcttgtaagccttgtgttcctccggcaccagccaggcttcagcacggggaccctcagagaccctccagtggtttcctgggcttcaggcctcacctagatctctctgcgtttctgatctggctgccagcagacactatcccacttctggttgtagcttgacaccatgctggagctgtctctctctgccagctctggacttaggaaacctagcctcatcactgtggatgagctgagggtgaaggttgtacgcaggtgagagttcacagagggagcctttgcgaaagaactcagaaccctagtctcagagtagcagtgtgcaggaaacacgtccccgattgatctgtagccaagtctaccttccaaaggcccactcttagggacttacttttggcagccaggccacaacccctaatggccctttccagccctcaaaatagtgccaccagctgagattcaagcattcaaaaccggaacctttaggggccattcctgattcaaaccatgatgggcgacaacctgctttgcttgttgcacccagccaagaaagagttgctacgagaacagggctctaaatcatggcaccgggcgatctgcacgcttatcctgtgcttcttcaccagtctccaggctgagacacacactcaggctagtcctcattacaggggtgctgaggcttagtactttcttgatggggatttcaaaactccctggggtcaaagccggttaatgagatttcattactccagagaggttctacattcctgccttaccacagggcttccaggggcaaagactggtcggcgatcaactgcttcaaaggagttgcttcccgggaagaagttagccctcatagatagcggcttataggcaccaatctggtagggatctctcagtgcttggttaatagtctatttttgctctgttcctgaggaccttcagaagccctttgacctacagttgaggaaggaaagttattgattcccctcagttctggcaagagtgctggtaaaggtgaccaaagagggctaatgtttggttggctgtctgatctttggcatggaatctgcaataggagcttaggaggatgtagaggtgtcctggttaggttaatgccccacagttctgtgcgaagatgatcttttcctgggactgtgcatagaaagtgcagatgggagcaggtagatagaaagctacttagccgcaggaaacctgggagcaagcttagcttgaggatgcgttcgtggatcgcagcaacagtgtgtggtaatgggccccttgggttgaacatggctaatctgcaaatccagtctccaaaaatgtcttaattctctgatttattgtattgtcagtcaaggattgtcctgttacaagtttcagattttggagaactcaggatttcaaggttttagaattacagatggccaacaagtaaaacagatgcacgcatagcctgacatccaagaaatgctctaacttgaagcacttctggccccaagcattttagataaaaagcatttaccctggagcagagaaactagttcatgtgtaatttagatttgagtttagggcatcttaacatatttcaaattctgaaacagaaaaactagagtttttaaacacatgtgttcatacatcttgattagcatctgcctttttgaactaaagggccaggtgaattgagtctgataccagctcttcttaggagtgagtatggccgtggcaccatctccttccccttgtaagtgatccatgtaagtttttgctcatagactcccttcccctcagagcaccctgctgttgtgactgagttcatcatcttcctgtttggtttttatgtccacagagcaggagaagggagagtgaggccagggtgtgctgctaacataggagatttgatttagaaggttgtttcactagtgtaggttttacatagctgtgggaggaggtgaccaaggacattgatgttgtcacatggggatggtgttctgttcttctgtgaagaaagaggaggcagtgaggaagtccctgtcctgatttggagggagaggttagaacatcgtctgtgttgtgttgtgttgtgttgtgttgtgttgtgagggtgagctctgtcttgttggtgcagtgtttggggtctgggtgatggttctgagcctttctgctacttgagtgcaccgtgagctacaagtagtcttgagcgtctcccattttggctctaggaaaacaaagagtctatcctttagcttcttgcgttgtctgtacctgagggagacatttcttgtttgctcagatgtgctgagagtttttccttctgcttgatccaccccaggagcaaacccaggcatccgagggattagcatgaagctttccggacttcctccaaggaaggcttttttaaatggtgaaagttgataatgagagccaagttgtcctgtgtctacacataccggtctatttcagttcatccttgtggcccatatgctgctgacagagccatagtatgtcatcatatttaggctgtgcataccctctttttccattacaacatgaccatgacaagcttggtgtacatctctttattgggcacctgtgtgagtactcttctaggatgtatttctcaaaataggctagcttgatcctttgaaacccacatggcataaaattttggctttgggggggggggtttcccagtgattcccattttgtttctttgcaaatcccacgagtctaatctggaattcagcctttctgacaagaggatgtgtttaatgcctgagcaatttaaaaagaacaaaaccttgtccagcacatttttcctgtgagggcagcccggcactgcacacaccagctaaaatcacacattcctttaggctagtggggtgcagggctgtatggtgtcctgcccagtggggtggatctcagctgtgtttacctctgctcctcaggagggagattgtggacatctgacgtctgaattgacatcagcatccaaaggccagtgtggcggggaccttgggtagacttggtattgaaagaacaactgtcatttagtaaatggaacaaggtagtacacttcactgagagggtgggtttgtcacgatcctaggagcaaatcacatggattcaacaatattgtcacatttcctgtgtctccttaaaacaaaacaaaacaagccccccaccctccccacccccccaaaaatccaaagccatggttgggctggaggtgtagctcagatgtagcgtgcttcccttgcatgcatgaagccccaggtttcacccccaataccacaggaactgagtgtgccagtatacgcctgtaatcccaggaggaggcagaaggatcagaaatctaatggtcagccttaaggccagtttgaagccagcctgggctacataaaactggccattttaaactgtttttgaagatctagtttagtgatatttaacacacgcaaaacgtcactctcgtctgtctcctgaatcttgtttacctcccaagagtcaagtcccctgtaaagaaaagcagaggccctttcgaatcaaaacatgacagacgagttgacagtgccgtcgtacccctgaagccagggagctcgagggtgtcttaaaacatttggggtataaatgacaccaagctcagctcctataatttgcctaagaagatctaaattgacaacccagcaggtagaaggagctcaattccaagccagtcatcctctgtgacattcattagggtattttgccttcacatgtttgggtcttcccaggcctgagccgggccagccctttgctctgtctatccacgccagtgagcaagcacaaaggaatcagtgctgttgtgcttcgagcattctgcatggtgtacccttcataagtcattttgggacttcggcactggaggagagacactcttctcttcctaaacaaccttgctctttagactctgcaaaggtgtgggagagggcctggggtggggttggttggaggcagccagagccccagacagattctgcaagactttgcataggcaggtgttccaacaggagggatggctacccgctgcaacaggactgaagatcagaagagggaaagacggtaagccaggcactgctcagtggttaaaagtgcatgctcttcttgcagaggaccccagtttggttcctagcacccatatcaggtggctcacagctgcctgaaccccagctctggaagtactaatgtctctgagctcttaagtgcctatactccgcacctccctaacacacattattaagaaaaataacaaacataagtctttttaaaaaaaggaatgcagaagaggtcaggcagaggtcagggagacagctcaatgggcatggtgcttagtgtgtaaacatgagaccatgggcccgtgggcaaaagctggggaggcagagactggaggacctcttggttttgttgactagctaaccaagtcagctgataagttcccccatctgtaagatctcaaaatgaaagggctgggggggggggctggtgagatggttcagtggttacaggctttacctttgtggaaggcgagcaccagctctacacagagccatggcaagcattcctcacatacagtgcacatacagtaataaataaaataaaactaagggagagagcagccaagggagacacacccaggattgacctggcctccacacaagaggtgtgaacctgcacacacgggcatgtgtgcacacaaacgaagacagaggaaaagagaagaaagggaaaagccataaagaaccctaggtctagtggtgcatacctgtcacccaacactggagaagccaaggtaggaggatcatgagttcaagcccagctcaggccacagagcaagaccctgcatttccaaagtaaataactcaggaagcagagacagacagatctctgagttcaaggccaacttagtctatataacaagtttcagagctaagggtataaggggtgtgggggtagaggaaggagtaggagagaaagacagaagacctggttggggcagattgactaagcactaatatccttgtcctggcaccaacagtccttctgaaagtacagtgctcccttgatccttgctctgccttctctactgatcattttcagttctgaccatcttttgtgccgatatgtagaggttgggaaaaggttaggggaaacaaaacaaaactcacaatccaactggcttgagcctggccagtgcgaatacgtccgcagaggcctgacagggcaatgaactcattttgctaattgtataatgagcatgaggcctttagcaggttattgggccctgaacatcagtggctttgatggctgcctctcctaatagctatgcctcaccaactggtttagtgcgttcttgttgagagaaaagtcaggctggcttaaaaaagacttctctcttgtttttacttgtcttgcaaatcgcagaatgttctttctctcttcagcccattgcagttgctaagaaaccaccattttggaagaagggcaattaaattttgatttcaatttaaggatagagcaggcaaggttatccttcaatgaatgggttgtccaagaggacactggctgcttccagggccttcctgggaactcggcacggtttcagtctcgctgccagaaaaagtagctttcaacttttgggagcagggtaaggagtcttaagtgctgcttaacttttgagaagaaaaactcaggagactgaggcaccagtctggaaaccagggcccttggcttgattaatttataggtgcgattcaagagtcctgccctctgtctgatccctgggatacctggttacccgcatctgtccatcagaggctgctgctctgttacagcaaaagttgtaggtctatcttatgcaaacacatcattatatccagaggagtcctgacatgttataaagttccagtggtcaattaacaaagacttagtctccatcactcaggtagtccccctccccctcccccagctccataataaccttggaatgaagcgagctcttgtccttttcccctctttggctgggtcttggctcccggctacagtgcaaggctggagagttaatgtgtctatgtagtctctcagcagtggaggagtagacacttgaggcaagggggccagagggggagaggagagagagagagagagagagagagagagagagagagaggagagacaggagggcatttttttaaaaagcacttcaggctgtatttactaagcatttattcaaaggaacctcattccagagctgcgggccaactgtcccatcggccatggccccaccctttggactgcttttccacagtgtcttaatttgaaattcacacaggggcctcaaaaggctatttgaaagcccctcccccttccttccccgccttttgggttcacggatcagcagcctctaagtccaaattgtaaccattttcaaatcgcagtgcagaagcagaggtaagctgtccgtgggcttagccccttcctcgtatttatttcactcatttccctggaaaaggaaaaaatgtgttttctataatatctgagagttcaccatgctataagaggagctcacctctctgtaaatccttcctgctggaggagatgagatttttgttgtcacgtagaggagctgagccagcagtgggcttcagtctctcatccaaaaataattcacaggcctaatccctttacttcagtgtgctgtgagaagctgtgagaagctgtgagaagcttcaaacctgtgagctttgatgtgcctggggctagatgaggttcaggggagctttttggaggaagtcattctggggtctcaccctcttctccggtgcccactgggaaggctgtacgggctcccctgttgccagcgtctcctcaccaagcatctgaattacttacaccccagctttccaggagttttccatgcacttccaccaacttcctggtgaccgctttttttatccgcacccccccaccccgaccctgccccccccccccatgacaaggtctcactatgtagcccatgttgacattgaacttctgtccctcttgtctcggggttctgagtgctgaggtgctgtggtcatgggtgctgcaccccagccctgctgttgttcagggtctgttgacaccagatcgatggctgaagacaagatggcagatgccggcatcctggggccttttccaagacgtttcaggcctcattcttcaacttgttgaagggcagagactaaggttgcaaaggaaatcaaagcctgatgtggagaaatgaaacatgaggcctactgactttttaaaaacattttaaataacattctctgaggtttcattttatactgagcgcagctgtaagaagttttggaagatggtgtaagggttctattacacagtaactgtacttgcagtttttctgcccaaagtgagaaagagccgacaggggagagcgggtagtttggaggttattttgtataaggtgagaaaatttgaaaagatgaattcaagactgcgagctgtaacgtagttcagtatgccgtaatttgcaaacgcagtaacactgaaccattgcaaaggtctcctttttccctttgggtgaaaatagtccggatagcttggaataacttaataaccggagctcagcagccctttgaccacgagcaagctctggaccaggccctgccagtattacccccgcaacagattccctgtccaaggctggtgcttgtggtagacgctgtgttctgaaagcactccttgttcatgggcagtgttatgacgtgtgtagtgtttgcgtgtgagatggtttattagaaacaagtatggctaataaaaaaaaaggcttgcaatgaaattccatagatctggctcagaaccttagagattttgtagtacttctgtttccaaggaaggttacactgtccatgcatgcacacgcgcacacgtgcacttgcatgcatacatatgtaaaagcatgtgtgtgagtgcaaaattggaaaaaccaaagcagggaatgaactgataactaagattccttccctcgggctggagagagagcctcgtggcaaaaagagtgttttgttcttgcagaggacccaagttcagttcctagaactcatggtgggttctcagaactgcatgtaactccattctcaggggatctagtaccctcctctggccttcaagacctgcattcatacgcacacacatgaacagacatgtgcaaacacacaggcgtgcacatgcacacgtgtggaagctagaggcagatgtgcttagtcaccctcaactttattatttctttttttttaggctagaactcaatgatttgtctaggctggcctgtgagttccaagggcctcccttctccacttctccagtttaggtttcagccatgtgctgtcccgccttgctttttaaatacatggtctagagaactgaactcaggactgcaagcttatgcagaaggttctagatcaacagagccatccgtctgttgagccctgcaactccttcttttatgagaaggaaatgaccttcttggtatttgacaggtagaaatgagcattttggtgagtttggctggcagtaaccagcccagaggtcagcttctatcctgctggtagctttcctggtatatatgcttggtagagacagaggagacatgaatacagggacttccttcccattttaaaggacccagctgggattaaagcaaatcttgatcattctctgtggtacccaagtccctatgacccattctagagggtcatggtcatcatcccagagagtagtgggtttcctgtgatgtcttaagaaatgaagctttgagattttttttttttcagttacaaaaatgaccagtccaacttctctgttccacatggttgataaaggaggagatggatgactctataaggggctctgaaatctttattgcgtggcaatgtaggtgtctatgaagtgatggaagattccagaatgaaatgtgctccaatcttttctcttttttaaaaaaaagtttcttaagggccagtgatgatcttatagagtcagtttgtatatggtctggctctggttcagcaaatttcacagtatgatattttaattggaaaggccccaatacagaaaggcgtagagacctatcattctaatttgctgctttaagcccagtgtgcaggactcacaaacagagggccatccttgatatggtgagctggtttggtggtagtggtgctggtgtgtagggttctttttatttctcttagctattttttgttgttgttataagacaatcttagtactatgttagccttgtctagaattcactgtttagaccaggatggcctcgaactcagagagaatcacttgactctgcctccaagtactgagatgaaagatgtgtgccctcgtgctctgctctgcctggattgtatatgttaagctaggacagtgtaactctctgttggagaaagaagaaaagagaagggtttgggtatataagcatgtatttgggaatgggttggtaaccagggtgcatgtggctattgatagagctgctgcgaagaaggttccagtaacttagtaatcacagtgtttttgtatttgagattaaacagcagcctactctgttagttaattctttcatgctctcaatcattcattcattttactgttgtaagagcagtaacatgtattgtacccctagtatagctttcagtgtagagacccttaccgtccaccataggtagaccagatctctaggatatatttaccttatgtaactgcaagtttctatgctgtgactagccactccctttctactcttcttcactcctgcccaccacagttctattcttctgatatagcaattgagagttttagatccttccttataagtgggatcacacagtacttgtcccatgactgacatattttgtctagcataatgtcctccaggtccactcccactgtcagttggcatcaaattgcatgcttttcttctttttaaagctggttcgttttcccattgtatatagagagcagagtttttatgagtgaaaactcattctcctgttgatgggcattgagggtgttgactaacttaaaatcttagtttttgtgaagagctctgtgatgactgcatctcagatcttcactgaagtgagagttgctggatcagatgaactgctttgttattttggaaggtgaactccagtttcctgtccttaccctaacaattgtattcccaccagcagtggaacaggggttcactccccaggccctcaaccgcacttgtcttattatctctttaatgatagttttgatttgcattttcctaacgattactgatgatacacatcttttcagctgcttgttagccatgtctatgtctttggagaaactccttagcccacttctaattgggcattacctagttctttagggacctcatgtgtaggtgcaagcagaccttgacctggtccctctatgggtttctgccgagaacacctctcatcggcagtggacccttctgatctaagataaggagaaatgtgctttattgagaatcttctcagtgagctagaaaggaatgaccaagcatccctcctgtggggcctcctttgacactgtgaaacttaccctgggaactggtatctgtccctgtgtttcttgagtgccatatcagaatatgctaaggaatatctacttctatacatctggtgcctggcgcacagtgacacttggttcttgtcaaatggatcaatgattaaagaaagaaccactgaatgaagtctgtgtcatgattaaaaagcaggatccagtaggtttggtttcagcccgcttggagctttgctttccaatttgctttttaaagcaggggacacaagacttcccagagcatcttagcaactgactggaagagatcatgcataggagaacctctctcgatatgcaacactaccttaagagttagctgtgtcccttgcctgtgttctctaacactaccttaagagttagctgtgtcccttgcctgtgttctctacctcatgtttaaagtgaatctgggcatcatctcaagctaaataagtgaataagtggccttctaccagctccatctgtctctcgggttgcagcaataaagaatttccccttgtttgttaggtagtccataactcggagtgtaacgtgttctttttctgattctctaaataagttatcctttacaagggttgtgcttcagtgactcactttgaagtcatttgtgttgtgcatggggcccctgtgttattccaatggagtcagccagcagacagaggcctttttggcttgagttcccccccaccccccacccccacacagccttctggacaacacaacttatttattgctctctctcccccctcccattgcctctctccatcagaacggtcaccacaccggcccatcctccaagctggactgcctgcaaatgcctccacggtggtcggaggggatgtggagtttgtctgcaaggtttacagcgatgcccagccccacatccagtggatcaagcacgtggaaaagaacggcagtaaatacgggcctgatgggctgccctacctcaaggtcctgaaggtgagaactttctgaatcctcaggagcccgcagtgagggctcccttggagatttggccagggtctttgatttcctgttggatttcagagatggttttctttatggagcagccagtagagtatattaaagaatgagtagccattaggcctgctaataatgtttctggaggctgtggagtaggggaggtgctgatacacttggaaccagagaattctgctatttattagccccaaggagacgctaaagctggggtggggtactgctcccaaggcgatgtagagagtcaacgggatggggtagatggaaataactggaacgctctagacaatgtactaacgtttttctgatgttgttttatgatatttaatgctatgtggataataacatttgaatcaaattttagtagttagaaacaattcaactttctttttcaaaaaacttctctttcaccttttatgatgtatgtgtagtctagagagtaaatggtgtgtgtgggggagggctgttttttacatctataaaaaaaatgagcgaatttccttccctttgtattaaaagaaatacttttttttcatgtactcttttttttttttttttttttttttttttttgtggctccaacctctttagtttttgggtctagcttcctcttcagcgtgctgagctaagtctgttttgtcaattctaagccactgtctgcctgtctcccgtgctcccagggagtggagtatacagcagtcagtcttcctgttcgactataggagcaacaggcggctcatgaagaactctcaacctatagtcttctctctagccagccatacccaggatccacagtgctggagaaagacggccagcccggagagctgctcacccgtcccactgactggtcgcctcttgcaccctgctctcatcactactgttctccaccacttgacttactttgttctcctccctcccacagctctttagatgtaatcagtggagattgttttcttgtggtgtgttggtggtgggaccataggcagcaccgagtccttcctggttggccgttatattgttttcctatgtctgttctagcactcggggataaatagctccaatgcagaagtgctggctctgttcaatgtgacggagatggatgctggggaatatatatgtaaggtctccaattatatagggcaggccaaccagtctgcctggctcactgtcctgcccaaacagcaaggtaacaacgttttttgtgtttgtgtttttttgttttttgtttttgtttttgtttttaagaaaactggatataggagtttaaaagactcggtgctttgggaggcagcaggcagcttctagagtaactctcatggccttggtttatttataatgatctttctttggtgatgcagctggcgtcatgccagtggccatggaaaaatgcccacaatgttcaaagtgcttgaagattatcctccgtccctaaccctgttttcaagcgcttctttctggtctgtcttgattggactgcacacttcccatgatcactgtgtctgagtgctcagggaccttgcatttgcatgcctgttgagtctgcactatctgattatgaagcaggactcacatttctttttacgctggttatgtagagaagtgctagcatgataggattcacctaatgaaagttttgttctttggtttggttccacaccggatcctatccaatattggagattgattatcttccagtgactgtgacactggaggatggtgaaggcagacggtggagttttcagttatttttcacatgcagacattcatattagaaaacaaaaaaactataaaagttcagtttttctgttaccagtattatgctttctgccatgttctttcaatgatatgtaaagcaagatgattttagcttgagcaaaattaaccagaatctggtaaccaagatgacatcccaccctggttcccatggtgcccaagggatgtgtgagatgtccacctaatctgccatgttttgttccatcatacagaagatggaacctccccttttctcacagtgggggagtctgcatccaacaggaccagaacccaaattagccctctggatattgaactttttgttaacccacccccaaatccaaatgaaaatgaattcaaagagaacgaactctgtgggccaatttttccatgtgttcaattgcatgcatgtctaggtggtgacgccggtgtggtgacgggcctgcagaggtgagctggccggtgtctcttcgtgtctctcggttgtgggctttgtggatgggctgcagttggaatctcctgatggccagcacgccctggacccgctgggacgaggcctcttggttccaaggctccctccacactcattcctatgtctagcccttctcttgcttcgtttgttttctaggccgccggtgttaacaccacggacaaagagattgaggttctctatattcggaatgtaacttttgaggatgctggggaatatacgtgcttggcgggtaattctatcgggatatcctttcactctgcatggttgacagttctgccaggtacatactgctctttctctctatgggttggtttcttttcttggttgattgctataaaatcaacacagcttctgttcttagaaatagccccgtttatccattgcataaagatgcccccccaaatgttccaaatgacccctccccccggaacaagaaacaaccttagacattcatgcacgaagagatcccatactagaattgatggttaaataaaatgccaccttttaaacccaaagggatcttataatcttagtgaattgctgaattgttgactcagtgggcccatttcccaccccagcccccaagaagaaagtcaaaattactttgtgaaattcaaagtaattttttccccattgtaaatcccactttggtaaaagcccatatgtggtttgatgcctctccatccgacttgctgacatctcatttgagtgcagatgtatttgtattggggtacccaggaagcacctctgaagggaggtgtgcagaagcagtgtgttaccttgggaatcgggtggcttgctgcatgccttgatagagtggcctctcgttgcttttcctgcaaaagcatgtgtgtgctgtcttgggctcgatgttatttctgcctcatcgagaaataaacatcagcaaagcccatcactgtctaagtctttaacccatgcctctgttctagtccaactttctcggtacatgctgctctctctcgtgcattgcctagcatttcctttggaaaactgcatagactgggttgcagctcatgacgctcttctgctccagttatgagtgccttgtttctagagtaccatgctgactgcatgcttgttttatagctcgtaaaaataaatggatcatttcgtttttgtgctgtgctgctgagagttttgactatctttgcaaatgtttgtttttctgattaaaatgtataagcttgagaataatacccgttgcatccaccttcccctttggttatgttatgagtccgctctgtgagtagttggtcttgaaacagagatgcctctcctgttgagcttgcttgtacttacagtgccacgctctcaggtgcctacctggcacttcttaaccaatttgcctgacagcactaccccttaaggagatgcagcttgagaataatcatgtttggaaatacactgcttgtagattgaccagttgaggaagaaccaatatagttgacagaagaatatgctaaattaatcacagttctgctcacatgcagtaccatcatacatttaaaggttcagtaacaagtcaggataactggatatacaaacattttattggttcttaagtattatatatatatatatatatatatatatatatatatatatacatacatacatacatatctacacatacacatacatatatatcatatattatatatgtgactatctcaagattgatacatctgtttgtttaactgaataaatattctggaccatatgaagggacttgccaaaacattttgggccagcctactagttgagtgtgagccctttggagctaccatcctctggggtcctgttgaaccttcccctggaggcacctccctagctagcaagcatcatccctgtctccttagaagcaacagtggatgaggtcccttttaataattctgtttggtttatgtcgagccgccatcatgacagacagtcctcctgtggtgggtgtcctgggtgtcctgctatgaccaggggcttagcagaatgaggccttgtagtcccccattacagtctggtatcagctgctcactggtggcagatgcccattgaggctggagaaggcagctgcctgggctgtagtgataaaccgaggaacccttggctctttgttagcatttggagaggcccaggcaggaggcccatggctgctctgcatctgggtatctctgtgcattgacctgtagatagggaagcccttgatgtctttggcgtcattccttgaagtgtgcttcgatacatccctctggtatcctaactctgtggcctgcttatttgtccctctcccgcggatctgcaacccagcgcctgtgagagagaaggagatcacggcttccccagattatctggagatagctatttactgcataggggtcttcttaatcgcctgcatggtggtgacagtcatcttttgccgaatgaagaccacgaccaagaagccagacttcagcagccagccagctgtgcacaagctgaccaagcgcatccccctgcggagacaggtaacagaaagtagataaagagtttgaagaaatttactcccctcccccacccagccagctcttggatcttcttccctctgattttccccctaacttctgtgagctccagaactgcaggcaattctaatctgccactgtgtggaggttcagtcagcggttgggactaaagagcattaagtcacaatgctgctctgggcttggtaggctggctctggttttaaaggacaagagtgtgaagactggagctgcccagtgggatgggcagaggaggccatgccctctgcgcccctcaagctcacggctcctttgggagaacaagcatttggtctggctccattgcttctgtatgaggccagatgttcgggttcaagttttacccttcataggaaagagagtttaattttctttgatttactattttaagtagagatcagaaacagaggatggaggtatacctgaactaatgcttgcataaaagtggtctgtgatgtcttctaaactgggttttggctgattttgtctggtttttaaaacgctgtatgcgtatagtttattgttacaggtttggctagggattcagtgataggatgattgtgtgtgtgtgtgtgtgtgtgtgtgtgtgtgtgtgtgtgtgtgtgtgtgtgtgtgtgtttgtatttaggttataagtacatgtgtgcaggtgcctgtggagaccaaaagagagtgtcaggtccactagtgctagagtttatcagcataggtggtaggaattgaactctggtcttctagaagtgcagcaagcactctttaaccactgagccagttctccagcccccagatacgatgattgctatgtagaacagggagaaaattacctttaaccttgagcttgatctttgatggctggctttgggggaggtaaggcaatagaaccttccctgtgccataaaacaaagcccttcaaaggtggataaggaaaaaatgcttgacttctgtacttgctcctggattccaagagccaggcatgtgtgggtgtaaatctttatgataagattcggaacttgattctgataagattgtcactattttttttaaattagcaatggaaatgaacaacctggcctgtgctatggggaggtgcatcttagtgtttgttaaaactgcatattcattagtttcaaccctagaaattcttatttagtacttcttgaatggatctgtaagagtctgcattttaaacactttctcgggtgatactgtgtaataccttaagaatctctgggttcaacccaaccctgcctttcctgggccctttctgtggacaaggtgggaactagcaggtcagtagtggcttggacacagggccttggctgttctcaacctagcttcacactacaggctgagcaggtccttgtcaacgtccttgaagcctcgtttccaacaggtgtttcttgcagagggttaagatataatttggagcatatgtcagatgcagcctttggccagctgttgaatgtggagtcaaaaaggctcagttgggttccttttaatcctgagaatgctgtgctactttgagtgacaccactgtcatttgtgggaccatagaagctagatggtgctgaagttaaagttggttgcctgaatgagttgctggaagagtccttaataaaactcttacctggctagatagtgttaaggcttcaggctgaatggccactcctttggccactcctttggctactccttcacagcctctcctgatctcttagccctgggccattcttaacatctggactctggtctagggagtttaagtaaagggagcaatgtcctgtctcatttgtttttataatagagaaaagaagtaaaatccataagttgaggtagataggccattgacccttaattatttcatcatttaaaaaactgatgtgtgtgtgtgtgtgtgtgtgtttatacatgtgtgctggagctcttggaaagctggaagagagcactggatccctcagagctggagggccggtagttgtgagctctctgatgtggtgctgggactagaactcgggtcctctgcaagagcagcaagcgctcctaatcactgagccatctatctctccagcctgcatcacttttaaagaaaactctttctatttctccattttccatttccatttccatctttttacatttatatattacatttatatatttatgtagcttgggcacgtgtgcgtttgtgtgggggcatgcacatggcatagcaaggttagtgaaggtccttttgaaatggtggccaggggacaacttacatgggagccagcacctttctctaccacgtgattcccaggaatcaaacaggtcaggttcagtcaggtcatcgtatctgatgaccgattttgttgactccatcgcttttaaagaaaaaaagaattaacacctattacagcgctcttccttttgcttcatgtgaaaaagacagaggccctggagttcccaggcacatggattcagcatgtcttcctttctgtttgtccaactgagtttcttcattttctgtccacctaagctgtccattttgtttgtttttatattccctgtgtgaccggagggaaaagttgttttttttttttttcatttacctccctttcttcttgtattcattgttatttactgagtgcacagtttcttttagtgcatgggcctaaatcaggactcttgggctgggagtgtggctcagtgctggcatgctcgcctagcttgtccaagcctcagtatcaccaaagaaaataattaagccagtttcgtgtcagagaaagcctgcccatttgccactggctgcaaggttagtgaannnnnnnnnnnnnnnnnnnnnnnnnnnnnnnnnnnnnnnnnnnnnnnnnnnnnnnnnnnnnnnnnnnnnnnnnnnnnnnnnnnnnnnnnnnnnnnnnnnnnnnnnnnnnnnnnnnnnnnnnnnnnnnnnnnnnnnnnnnnnnnnnnnnnnnnnnnnnnnnnnnnnnnnnnnnnnnnnnnnnnnnnnnnnnnnnnnnnnnnnnnnnnnnnnnnnnnnnnnnnnnnnnnnnnnnnnnnnnnnnnnnnnnnnnnnnnnnnnnnnnnnntaaatgggttgaaaaggtactgataataccccagcatttcttagaagtcatggggaagtatggtactaactgcctcttcccaaaggatttcccaaagcccaggccactgggaggaggaggaggaggaaaagtaggagaagaaggaggaggggagatgcttatcatgagtctggataaagagggttttgggctgtagctggaggcctgcagataggttaatgacagagtgaattcctcagggatgccaagcatgccttacctggcgacagatgagcctgtaatcagatgtctggaggacgggtgctcccaggcactaagaggctagactttattttgtgttggcccaagcttctatatgatgcagcatccatgccctggcccttgcccaggacggcgaggaggcgcatagcctctctccattcactccatctttgtctttgttttagaacgagaaaagttggtttgtttattcatgctgtttttttccatgtgcacaagcgcgtgctcggaaagtgtgtaggtgtgtacagaaagtgtgctgaggccaaatgataaccttgggtgtcattcctcaggtgccgtccactccttactctttgtgtgtgtatgtgtgtgtgtgtgtgtgtgtgtgtgtgctaagtttctcacctgcttgcctgaactagccaagtaagctaggttatctggtctgtgagccccagggtcccaattgctcctccttctcctcctctctgttaggattccaagtgtcggctcccaagcctgactcttctttttttttctgagacagggttcctctgtgtagccctggctgtcctggaactcactctgtagaccaggctggccttgaactcagaaatccgcctgcctctgcctccaagtgctgggattaaaggcatggaccaccaccgcccggctttttttttttttttttttttttttttttaatatagctcctagggattgctctcaggtcaaggaaggcaggcgttttgatccttctttctccttgaggtttgcttccctgccctgaacttgtttaaaacaggcatttcactttaaaaaggtagggtctttttttttgtgggtggagggggtggggggtgttttctgtatcaaataaattctttatagtctttctagtaaacattaattttgggagacattgtgcttggagtaagatacgcaactttttggtgggacagcctggtaggtagcctgtgggatctctaaggaggagtcatctctctcacccaaggctaggactgggcactttgtaagcgcttgcgcacttgcctctacttcttggtacctagtgttaaatggcaatagccagtctagagaagggcaccttgtgacccaactggaccatcagtggtcactgggcagtggtctttgtgtacttctgagtccaagtggaaggatttgcctactgtgatttccacaagtcccttgttggggaggtgggccgtatgtgagtgcagagcggggtggaggaagccttgttctgtggagtgcttgtttgtggaggagctttcctgggtaggttcagcttctttctggagccagaagtttgcttagggcaagatggagatccatctgtctgtgtccagatgagtgcatagcctacccgatcccccagtctcacacaggactgtagtgagtttgttcccagcctcagccattgacatgggtagctgagaaaaccagagagcaatttcataatgcgtttgagacccatggttattcagggtgggctggggggaacacttaattccagagctgttctcagggcaatgtattcgtggtcttagagtatatgaaactcagtgaaagtgagtgctgactgcttagcatcccagcaccgtgacctggaatctccatcgtacgaggtgtagtcgatccagagttgcagtgtaccggttctgggaaacatttgggcagctggatagttgtggatgacccgagtggagtcttcgctttcctagggatcgatcgctttccttgtccccagtttggcctgtcttttctctcagcccctgaaagacatgctgccttggctgagatccaccctagacttttgctgatgagctataagtaggttcagaacacctgagtcaggtacttttactgttgtgacagggcattcaagagtccagaggaggtagaagctgtctaaggggcagtgtgagcaattacctagattttgttatggaaggaaaaacaaaacaaaacaaaacaaaaccaaaaaactccactcccagaaactctctgaagcttggtgtggtgcaggtttttctgttgtccatagaggtgtgtggggctagacttaagatagaacacactggccctctgttctgatgtggaaggctccatctgctgcctgggagtcggagggtgtctcaagtctgctgtagtccaagggcatgtgtcaattctcaggaataaagacaaacttgactcacccttccccgtactgtctttgcttccgcctgcgctgttgtctgtgaggtcccctctgaatgttcagcttcatccagcataaagggagacggctatgacttggtggctctttaaaaagaaaaggggagaaaacccacttcctccgttaatctcccatatgtaccgtggaaatatatgaaaagcacatttagttaaaagcttgatttatggcacgtggtaaagagatcccggcatgtaaggctgccgaattggagactgtgaagagtgtgcggctttctaaaaaccgcctgccaagatttggggtggggaatgggggtggggcggagcaacagtttactacagtgttagcgtttattgtttataagtgaacttctaacagtgggatgtttttaagtgcgttgaaagggaaactccaaaatggaagtttctagattaaggattgagaactatctgaggagggaagttataagtacaagagaaagagaagaaaggaagtctgtaatacagtggtgtgaggaaccttccaaggtgggcggtggggccacaattcagagggaaggagcccctgaaaagccaggctcctccagggacccctgctggggattttgccaagccctccagacaggttgcctttctgaggagaggcgagtgaagagaaagccagtcatgctttatagccccagagaggattttaaaagtatagtaaaacgcatggaggtagaattaagatggacctctgtagacagggagagcagagtgtatgctcagagactttgcgtattttcttaccctttcccactctgggtgttttttacaaaggtattttccaggcttgtacattgaacctgaatctgcactgtgtattgaacaaaattcccacacatgaaggcagttttacattttgataccaatgtgcagcaacgactgccaaggttttttttttttttcttccgtattagtttagtttttttttttttttttttctccccgttttccattttgaaaatgttgcccttaaaaccttgtggaggtgctctgttgtggggtgggtatgcgtatgggaaacttgcaccccaggcctgtgctgtgcattctgtttgggtcaaaggtcctccacagagtagttgatgtcagactggatggtaaatctctctgttttgaggtaacccctaagtcatggtcaccagcgggaccttgctgctctatggttttcttcttctcctctaattcctacattaaaaatatatatagtcttgcttactggaactccaggctatcctggctggcagtttagggtcccattttgtaaatcagactcgcaattcaggtgtatgccatctaaaatcagaacaaactcaccttgtagagcagactggtgagctatggctgtcccagctcagcaataagcacttgatgctgtcttcattctgtcctgctaactctgagaccacctgagactcacatagacccccggaatctgaccttgacttcacggtaccattgaccaggatgtagcctgccagggcatcttggccctgggtgatcaccaggtcacacattgaaggatgcggaaacatcacaaaacagcctggggtgggggggacaaaaaagaagtgccatcgggcgtcttgctagtttctaaactgaagtctgcataattcaaccctgtgccttcttttcctgctgttcatatttattttattccaaatgctattttggctaaagaaagaatgtctactaaaacacaaaggaaacacaagaccagggtaataaaatctatatgatgtagaaagttctagaataagacctgtttcctaccttgctccctattcttgatctctcactctctctccgaaggtgaccactgctaaatccttagatatctttccagaaaacatttcctgctttgcttcccaagtcttgatctctctccccaaaggggaccatggctaaacccttagatatccttccagaaaatgcctgtggtcacaacccatcctgtaagcctctatgtgctgagtactgactcccaaggacaggccacagaagctgcgatgtgccactagcctctggccattaccatcattcagaactgtggtcttctgagatttctcagcatcccctcctcactggtcttagcacacagtgggtcctaacaactaagctaggaactttagggtccagtgatgcagaggcaagctgatgatggccctataaagagtatcctggctacacacagtctctgttggctctttgctccctggggtctgtgttgtctcattactgggcagacttttacttgtttggctgtagcttcttgcctctgattatctggtgtgaatttttactatatttctactgggagatgatttttgcctatttgtgtggaaagactgccagaaagatcttaaaaattaaaaaaaattacatgccttttgcaagcataacttgtgagcctgattcagaatgagtcaggtgggtggttccacagaagcactatggaccagctccattccagaatcttctgagtcccttgtctgtagatggagctcacgatgtttttgtggccagtggaaaatggacatcttgatgttgtcaggaaacttctggtttctgatgcagcctgctcaccacagttaggctggacaccatgcggacagtggaaggggcttgggagttatcttttgtcctgctgggatggaatgcctattctggaacaaggcaagtgggttctagaggcactcgcgtgttccctgctcaccttcccctgcttgcttctgcgtttgccttagagattgggatccttgaatgtatggctctctattacagaattaccaggttccttcttcttcttcttctttttttttaattaaaaaaaaagcatcaatttttgttgtggcacaaggagtaaatgtcctgtctgcatagtataatgtatatacagcttcttcttgggtacgggtgagatggctcaatggacaaaggcacttacgctgatgaccaagcctgacgctctgtagtcaatcttcagagcctatgtggtaggaaaagagaactgaccctcagaagttgtcctctgacctccacactgatatgcacacaaacacatgcacacagatacattttttttcatttaaaaagaaaatcacctttctccttcccaaaagatacttagaaggttcagaaaagtccttatgtgtattttaaataataagatttcatatcaaaatttgcttactgattttaacatttctttgtggggttttttttcttttgagggggggaggatagggtctctgggattgagctcagtgggtagccaaggataaccatcactgactttaatactgcaaacacttttcttcaattctattaagggtagttgggtttccaaagagcagaagggcttgccaatgggacagtcagtcctgggaacaacataggaccttgggttcctctgatgagagtctaggatccacatgggagagttcctttggctttatctttgccagctggattgaggagtttgtatactcagcaggggattgtcacccatgtgggagctggaagcctggtgtgcttgctgagtggctcttgtctaacctcacacccatgtctccgggaccaaagcctccgttgtggtctgagttgaaagcagtatccagcagcccaccatcacaccaagattgtgtagtcatacccaggcacaggctttgtgtgggctctgggtatattttctttcgcagaaatcagccaaggagagacggtgtgtttcagagatagacactgggtctgacacagtctgctatacatcaaggcaaacttggtgaagccctgtgtgctgctgggtgagagaggacccttcccgtgtggctctgagtgaaagtatcttttccttaacccttggtctcctgtattcactgctctgctttctgaagctaaagtgacaagagtcagcccattttcactatatggtctgggcatcatcaagtttcagaaggactggggagagatggagaatagcctccccgtgcctggaactctggatttcttgaataaaagacctttgagttaccagaatgccctttccctgtgtcttagttaggattttattgctgcaaagagacaacacaatgtaacttaaaaaaattatttatttgttttatgtatatgagtgcaccatgactctcttcagagacactagaagagggcatcagatcccattacagatggttgtgagccaccatgtggttgctgggaattgaactgaggacttctcaaagagcagttggtgctcttaactactgagtcatctctccagcccccagtgcaactcttataaagaaacacacttaattggggcttgcttacagtttcagaggtttagttcattattgtcatggtggaaagcatggcagcttcctggcagacacagtgctggagagagaagaagctgagagttctacatcttgatccacaggcagcagaaggggattgtgtgccatactctttgaggtttgagcaaaggaaacctcaaagcccgcccccacagtgagaaactccctccaacaaggccacatgttctctagcaaggccacacctcctaatagcgcctatgggccaggtattcaaaccaccacaccatacatatcttacagctctttccttgagatctttctttatactttggaggcaatggcagcacggatgacctcacttgttagatgtttgtgaatccctccctgctgacttgattttggatgtgtttttattttatggtgctggacattgtacatgagacaagcatcctgtaattgagcccagcctttgagttagtgatctataggctgagcaaaaaactataatgaagtcagtagagtctgtctgcacattcttaagtggctgtcttaaaacaattaaaggtaaggggctggagagatgcttcctcggctaagagcactggctgcttttccagaggacctgggttcagttcccagcacccacatggcagctcacaactgtctatacctccagttccagtctgacatcctcacatagacatacatgcaggcaaaacaccaatgtacattaaaaaaaaaacacctaatttttaaaaagttcagatgaaaagaagaaatactatgattaaacttctagaaacatttctatttgtaaacttgacctcccaaggtcaaggatcctgtgacttctcatttttgcccctgtattttgttgttgttgttgtttttgtttgtttgttttgtgttttgtttgttgtttagtttagtttctcgttgtttgttttgtcctttcctggttccttcccctttctttgtaagcactcctgctctggctgggtcccagctcacttccagcctcctctgatggagccagcattacatctgctgttttgcattttgtatacaggtttcggccgagtccagctcctccatgaactccaacaccccgctggtgaggataacaacgcgtctgtcctcaacagcggacaccccgatgctagcaggggtctccgagtatgagttgccagaggatccaaagtgggaattccccagagataagtaagtactctccctctgggagggtcgttgtctgcacctcctgggactgagcgcaggtcttggttgtgggagtctccacctgtgtcttggtaatcagggacctgtgtcttggtaatcagggaccttcgaactgtaaactgtaaactgtaaactgcagcaagatggtgcaattaacagagctgctggtgcacagggtaggctaccagcctgtgcccttgaggtggaagaccaaccttagctctgggaagtgaggatcctggaaggctggcagcttccttcttgtaggattagcgtctaaacagcttgagagtaacagaaggtggaaaaatgggctctttctgcatcaaagacacaggaatacgctcccagcttgcttgaagacaactcgtctgcctatcttgacattttttcagtgtcttcctaagattgttagtgatatgtttaacacacacagcgtgtgtgtgtgtgtgtgtgtgtgtgtgtgtgtgtgtgtgtgtgtgtgtgtatacagagattcagaaacacaaagacaagctttcccaagtctgggtatggccagctctagttgaaagttgaaggaagcttaggcccccttggagcttcgtgtcacactattccaggtattttggttcccaacttagagatctttacatatatcctaatccagggccgaggaactgtctgtgtagtcatcttatgtcagtggaaagaatttccagtttctttatatactgcagtgaaaagagcattcattcattccttcattcattccgggaatgtttagtgaacatttttggggtgaggtatgaaagaaaacacaaagaatggcttctttacctatagaattttgagaaaggaaggtatgtttctcttgacccttgccagcctcctagctgggtgtgattatagaaatagctgggttcgtgtgcacattcctatgtctacaaggctggactggggagttgtgctcatatgctaaaaacttgcagctttcgggttgagcctgtgctttgggccacctgtgacaccacagtcaacagtgtgagtctgtgttgcccagcagctcccacccgggggtacccaagtgtggaaaatctgagcgctatgcatttccaagcagtgtttagcacaaatgtaggtggagcacattcccaatgaatgaaggctatttagaaatggtttattaggttggaggcaggagttacacaaagagaggtttgttatggttgtagtaacaggggcaataggacataaattagccattttccaacgcaaatgtttattttctgccaagatgttcaatttaattttagttcttgactggaaagggggcgccttcagcagagcaagtgctggtatccattttcttttccttttttgagcttttaaaagcgttgcgtgcttactgcaaatgctgtttactgaggacagctcaatacttgcctgtactgggcttatggttttttggtttttgttttttttaaaacaaaacaaaacaaaacaaaacaaaacaccccgaaaagcatactcaggctggagaggtatctctctggtctaaagcagacactgccctgtaaaggaccagagttcggttcccagcacccatgatgtgtagctcacaacctctgtaactacagatctggggaatctgtctgggctccttaggtgcctgtgctcacatgcccataccctctccccagaaacacacatacacataatcaagaataaattgaaaaaaaataaaaataaaaaacacactcctaagtattaattccaaagacttccctgttcctttggcttctggaacatctaaaataatgtcaggtcatttgtctgttgtgtataaaacttacatgcttagaaatgtaacttgtgctgttttctatttttttttttccttgtttactttgggtagtgataaggaatcctaaacttatgtcaaaaaggtatcgtgcctgatttctagaagtttttcttaatgagacacgataaattatttgaaacgtgctgaagattcctaccctgcaactgggcaatcgatgtaaccataaaatctaccggtattgaataatagtgatttgagagttgccactttacagggacagaaaataagaacagactttcactttttttttcacctctgcgacattttaaattataaatatttaattggctcaagaccaaaagctccctatggctggcatgcagggagcctgaccaccgcgctagcaaggacaccttccataaagaaaaagaaaataaatcgagaggacaaatgtgaaatttaatagtccctccaacagtaattgacgttctggaaaaacatcactaagaaaatagcctgcgtgtgtatcggaggctcattggttccatatgcatgcctctggaagatttttatatttagttctggaatttccctccctgtgcccctcggccagactcgcggtgtgctaatcccgtatttacacatttaggctgacgctgggcaaacccctgggggaaggttgcttcgggcaagtagtcatggctgaagcagtgggaatcgataaagacaaacccaaggaggcggtcaccgtggcagtgaagatgttgaaaggtgagtgggcggatgggcggtcggggaggagagggtcttatcaggagcgagcgttccttttgtgacatgtgaactctgcagggacgtggggtcagagagcacatacttgacctggcggttgagggggttttcaggataaatgagcaaatgagacggaggatttaccttgagctgtgtgtacttaaaaagaaaagccagtttagcagcaagttgtagcttgctgggctgaaccggtctctaactccttagaaaagggtcccgattctcttcttttctgtgtgttcatgggtttagaaagtttagggggtttatttagctggttaaattttggacccagacttttaacatacaaataaggagaggtaggtgttggagtggcaactggagacagaatgtcaaaatgtggattcaaagagtcgcttagaagccaaaaaggagcaaacaattggaactgatgcagaatcccagggacatgtaaacaataatgccacgctataaatgcccgctttgttcttttcttttcttttcttttcttttcttttttttttttttaggggaggggaggggagggggtctgggaatttatccacaacctttctaacacagcttgatgatgacgcccaaggagcttaaattgctttcaactattaacttatccttgcatgggtattcttttatcgaagagataaagggaaaggtcacattataaatcctgttgttggggaatctcagaaaggagaaaggagccatgttcaatgtttccctggcttgtgggcagagaagtctgtcccgggcctgtgggatgtggcatgttctcaggagtccgaccttttctctctttgataggacacttaccacatccctccctgatgcagacaacaaagggccaggacatggttcattttgtcagttttagttattgacctgagactcccagtgaaatctgggatgttcctttctttggagactgataccaggaaggagatagcaagtatcggggcaccagggcagaggcagcccttggtacctactggaagctgtgggttgggaaggatcaggcatcatactgctttccacagaacctctggttttgagatccctggggctagtgcaaaagggaggtttaggggttggcccttccctttaagcaagatcacccaccatccttttcatcgtggtcagaggacatgccttttcaacattctttgtgacagccagaggatggctgaggtgtaaggaagacaagtgtactgagccatgtgtctgtccatagtcctctcttccctcttctctgtattggtcaggatagatttttggatacctgtgcctctatttcatttttaacccttttgcttttcttttagctcagatttttcttttctaagtatttctgtattgaattagcttagtgacagaacacttgcgtggtgtgcacatggtactgggtttgcatcctagcattacaagaatccaaacgacagcagaactaactgagaggagagcacagtaccctggaaatgctcttcctcttgtttgaagctctctgtgaatccatgttgtgttgggcctctgccacgtatgtgccatgtatgtgagatgtgacttgtatctctggtaaggtggtagttggagctttagagaggtctcttttgctcactcgactgtttctgtgtacacacacatttgtagatgtgcttatgggcctggacctaactttgaataagctaaaggctctggaatttttgctgtgtaaaaaacaaattttctagtggttcccaatgtttttcctatggctttctccccattgttcttggagttttttgggggtgcatcaggaagtttgacatgctttctagaaggtaccttggatacatcagagggtggggttaattcacaatcaagtacttcacttcgaaagacttggccttggtcttgtggcctagatttggtcccaacgtttgcccatgtgccctctggtgatctctttgttactgagcatggcactcaccggcttcagcttttatctcttcactgattagatggggaagtgtttctggctctaaaattcaactccacggtattctaagagtttgatggtcaagagtgatagcttgggagttgggagaaaccagctgattaatggcttgtctaattcgtgttcacagatgatgccacagagaaggacctgtctgatctggtatcagagatggagatgatgaagatgattgggaaacataagaacattatcaacctcctgggggcctgcacgcaggatggtgagtacgagaagggtgtgttttctgtccacaccacaccgctgactgccaggcttcaactagaaacaactgggctcttggctttctgcttttagagcatctcaagaatgcattttcccgggctggtgagatggctcagtgggtaagagcacccgactgctcttccaaaggtccagagttcaaatcccagcaaccacatggtggctcacaaccatccgtaatgagatctgatgccctcttctggtgtgtctgaagacagctacagtgtataataaataataaataaattaaaaaaaaaattaacttcatgtttaaaaaaaaaaaaaaaaaaaaaaaaaagaatgcattttcccatcacacctatcccaggcactcaagatgctgagacagaagagttacaagtttgataccagtctgggatacctaggaagactctctcaaaaatacacaaaagtagaggctgggagacagctcaatcaatagagggctggccttgcaccatgaggacttgaagtggatttttagaatccatatttaaaattgagctcttgccaggagtggtggtgcacgcctttaatcccagtactcgggaggcaagaggcaggcggatttctgagttcaaagccagcctggtctacagagtgagttccaggacagccagggctacacagagaaaccatgtctcgaaaaaccaaaaaaaaaaaaaaaaaaaaaaaaagatttgggcgtggtggtgcacgcctttaatcccagcacttgggnnnnnnnnnnnnnnnnnnnnaacaaacaaaaaaaagagctcttaaggaggagacagagggaggtggatcctgggactcactggccccctagcttagccttctcagtgagttcctggtcagtgagagactgtctaaaaaacaaggctgtcttctggctgccacatagacacatacatacctgcacgtgtatctgcatatacaaatccaaacatatccacacatacagacacaacttttaaaagtcactttaactctacccttaggaagatattaccagccatgggtacacagcaggtctgtgtctgccctctagggggcgtggaaagttggaagtggggactttggaaaggaatttctgctgacgctcttgctgtgtatggggctaagagagatttcttaaaataagagaagagcagtatgctttagttgagaagttctctcaaaatggggactgaggaatcctgtcttgctttaggcagcagatggctgagcagaatagcttcacagagagagtggaagaaaagtgcagtctcccctccctcccccatctcccaccccctggggagtgagctcctggctgctctcaggagtgcctactggtactttagaaatcagcttgacagtgatgagtagatttgaaaaatgcttgcgcagcttctctttaggtgtgcagagactggaaccttcttccagtattattgactgtaggtattttagacttttgtggacctgtggtctctgttacaggtacttgtcactgccattgtattgaacaaacagcttatatgatagagaaatgaatgggtgtgactgtgtgacaataaaatgtgatgaccctgaccagtatcgggcaggatgtggggatgtggcctggggaccattctctccaacccttggaccaaccccttgctctggctgtttgaagccatttaaattctctcttttatttcatcctatagatttagtatttacttatccttacaatatatgtatatgcacatgcatgtacgtacacacacaaaggagctcaagggacttagaatggccatgcttctgatggacattgcttttccaggaagacagcagtgtttctcaacctgtgagtcgttctacccccatagggggtcccctaagaccatcagacaacacagatatttacattatgattcgtaacagtagcaaatttgcagttatgaagtagaaatggaataatttaatggctggggtcaccacaacgtgaagaactgtattaacggactgcagcattaggaaggttgagaatcactgctctagagggaagaagggcattcaaaggaaagttgttacaactatgtcttttatttctttaagcctttggaagttattgtgttgatcatcattttggaaagattagaaatggaggtgctcccagttatccgtgcctttctgagtggtaaaaccttaaaaaagaaaaaggttggggctacctcaagtgatggtatacttatttagcgtttactaccgtgttgtgttcgaggctctgggtttactcctcagcaccacaaatccactctaggttgtaatgaccaaagcctttgctgagtcaccccggaatagttcctccagccttccctgctttaaggagcctctcccctctgccacaggacctctctacgtcatagttgaatatgcatcgaaaggcaacctccgggaatacctccgagcccggaggccacctggcatggagtactcctatgacattaaccgtgtccccgaggagcagatgaccttcaaggacttggtgtcctgcacctaccagctggctagaggcatggagtacttggcttcccaaaaagtgagtccttcccattctacttggttggatgcaaatgccggttaagtgtctttgaggaagctgggtggttcagacgtgctcacttgcttgatctagtcctcacttgtcttatacaacctggaaaatatttgtggtgttattcacgttctggtttaatggactcttgagaggccagaggcagcctcacaaactcataacaactgccggagagcggaccctgctttgaggcagggcaggtgagatgctcctggatgacctggcttcgatcgagtgagcttagaccacagttaagggtgttaaatttagaccgttgagctcgatgtggaattaaatgatctgagaatggagattgagcacagaagtatttttgacatcaagagtctgggatatctgtttattttgtctccttcggtgactctgtggtcagaagttggccaggtcccctgaggtaaatggctggcattccaagccagccacttacaatggaacgctaagcattccagctattctggaagctgtgaggcaggtgctcagacttttcatggggatttcagaggacctaagatacctttcctcacttccatacttatgctcttcccatagagatgcttggctcctacctggagtggagcttgctgcagttccattgtctctaactcctcaggttgccaaagacaaaggatcccctggaggggcgcttctctatgacttggagcctggcctactagaagggtcattaatctggattcccccaggggcttcattagtgttaagagtgagtgaggtgacctggtcagatggcacaggtgccacatactgcttctcagcctgctctccatcacctgggaacatggcttagagttagtatgtgctccaagttgtgctttgttttatttacttttttctttttctattttcttgagagtttacagcttatagcttatacgttttccttcttttatcttttctttctttcttttttttttttttgaaaccactataaaactttctgatatagagggtttaagaagccaaatttgaagagttttgagttctgattttatacatgcatggtgtgtgtgcacatagtgggagcagggtgcccctgagaaaatctttatcaaggagaaacagacatttgttggccagtggtggtgcatgcactcgggaggcagagatagtttgaggccagtctgctctacaaagtgagcttcaggatagccatagtatccttcataattttatgcataaaacaaaggtttatgatctgaaactttccactcatgacatctcaccaacactgcaaatgttttgggttttaggttaggaaatgttgaggaaccaagatgtctgcattttatgtatatgtatacatgcatgtgcatatatatatatatgtatgtgtgtatgtgcatgtttgtatatgtgtttatatgtgtacacgcacatatatgtgtatttgatttaatgtctggcagatgtggatagctgtggcatgatttcctcttgacatgtttgaactattgcacatggaaccctgggccgggcagtcagccgtaggcagcctgtcagctccaggcttggttgctgctgtgtgtccttcttggtaggagatgggggatgcttgcatgcagtgggcttgctgctgatggggcagtggtagaactggctcttcgttttccttagtcctctttagtcctcaagactccccaggaacttgttctctgggccaggctgtccagtgaggtgtcattcttgatttctcaaaacaggagtcatgagtaacagtggggggggggggatgccagtaaatgtggaattaaagagtaagtgtataaactatcagagacatttcaataaagcccctcttcatttggggccttacagtgcaaggctgggaccctgagcttggcccttggggctatgtagagctatcaaaggtgagtctcagggtcctgtatgctttacagtttgctcttgtgtgtggtacattgcaatcactgagctcctctttgggtcaaactttatcaggtcccaagacactgaaagaagttggtagttggaatctgggcaagttctgctgtcatggtagtagtttgattaggggaagcagagtgatcaaagacaagaatgtctgactggagaaactgaacagtggtgaaccttcccaatgggaggaagacctaggagccaggaagcagggcagggagtaatttctgtaggaaatgcagagcttgcattgaacatctctgagagccagttaagagaagttgtcaacagcaagccagaggatgaagctcaaccatgaagggccacacatcgttatgaggccaaagaggagggtgtgacttccatatggtgggaattagggagaagctgagatgaaggaggcagagagtgtcacccctggtgccactaaaagggtttctgggctgaagttgagatcagctgtctgtccctgttcagagtcggggaaggagcgtgctggtccacaactatgttcatggttctgacccaccccagtgttgtggactttttaggttgcagccagtaggtaaagtggagcaagggctgtcacatgaactttgcaaagagagaatgagtacatttgggggttgcagaaacagcgaggcatagacgtgtccttacaaataacatggtgatcattgactgccagccacctttcgagagcctacattggccagacaccgtgtagttgtttagctcttggtattttccagcttcctgggatagagagtgagcaagatggtaggtagcagtggcttatggcagcctctctgtcccagctgagcctctgtgtggtcggagccccctgcaggggaagctagattcttctgaccactcagactgccaaactcagagagcacatgtcagcaggaacacactaccaggagaacttggccagggccttggaagttgaatttgaagaggcctccaaaccggcgttgcactccagcccaggcagaactagctgcaggcagccccgggagctctcagatttcctgctcctagtctggctggggacacgaagacttgggtggcttgcctgcttcctcgtctctgagttttggcccacccacacatgcaagggaacacaggggatgcttgggcgtgggtgagggcagagttaaaataattctttattcatgtttcaaacacagttaggctggtttcgtttttttacttggtcgtttcatggagagcttacaataaggcgttcctagtttgctcatccagtagaggaagtctctctgcttcatgtgacagttaaccttggtttgtaacttatataaaggcatttgagggtgatgcacttctaaaacacagaggtagatccatgtgaaggaaagcctggcctttggaaacaaacagtaatgaccagaccttcctgagaccgtagttcctattggcacaaaacatcctcccatcagatgtatcctagcaaacatagcagtagcgggtcctgatgtatgtacagacacagtttcacccctgcacaggctggctgttataacaaactgcacctaagaatgtggaccgatgagtactggctgggcagggagccaggagaggacatgctgggctgtgtcgcaagcacatcatgtaaaagatggaaagggggaatcaagaaagtttctgggcagcagtccacagaggtaggggaaggacagtgaccacagcctggccgaagggatgagcagtagaggacagacattggagccatctaggagttggaatggtcaggactcgagtctagagcacgatcctttctgattaaaaatcaaacagaaaagaatcagaggagtagaagcattggctttaagatgtcaagagggcacaactgtctgtggaaacatcctgagtctcagcaggggccaggatggaggtaggggtttgcagctgctttctgcatctaagaattgatgctacaggatcgaagaaacacgcaaaccgcatgtcacagtttctttgctttaagggatttgggaagagaagagtcagcctgaatctgcaagagagtgaagcaagaggaagatttggggaggctgctacgaaggaaccatttctagaaacagacctctgcagtgtccagagctgcagagatggcagacatggggcaacagaagagatcagttgggtctaacagtgaagagggtctttgtatagcctagaggccagactagacaccacgtagggaaaggaaaggcagaaatgatagagctaggcttcgctgtttgtagaacatcaggtcacattgttagagaagtggccatgaaatgaagactgttggagtttatctttgtcatctgaaagtcaggctttcctgggtagagagagcaagtgtgagctcaaagactttagcatggtatctgatgtcaagtttgtgtgaagctaccggagatacagcagtgttgtagacacttgaagataaaagagaaagtggttatataatcaactgttactttctgagatgaccagggcctttgtttgtttatttagattacaatgaatgattaccatgccttgtgggagcctcttgtcgatgctagtcagctggttgagtttgcagcccaggatggctcttgcagtagtctgcacccaatttttgacttggggtttattttctgtcttgcatttttttccaagagtgtttttcttttggttctcaaaacatgttgggattatatctctctttcttcttctttgattgcagtgtatccatcgagatttggctgccagaaacgtgttggtaacagaaaacaatgtgatgaagatagcagactttggcctggccagggatatcaacaacatagactactataaaaagaccacaaatgtgagtatatgatgtaacactggggagaggcgtggcaaaggttacagaatgaatgacacaggtttattggtggaagaactgaggggatttccccctctgtgttacattctgttgttttgcttaactcttgatcagcaaatctaggctatatctctaagataggtttaggatatacagagtgctattttatacagaataacaagcaaaagcctccagggctccgtgtggctctcttaagagccttcataagcaggagatggcgagatggctcagctctcatagcaatcactagaacttggacatttgctgggttcatttttgcctccaggctgattggagtttatttgtgtgctagggaggtagatgataatgagcatataaagaaatgtcactttgatactttattcaaagaaccaaatctatgcatcttagccattatgtacagagctagctggagcttattcctaccctagtggtaaattggtgaaacccattagaaaggggtgtcttcatttagtttagactgtaatgtggatacccagaagtggtgtgcaagggagccaggaatgcctaccactgggtgctggatgagtgctcaggtttggagctcaaactcaagacaggctggagtagagaaatgagaaagagacagaagtaagaagtctactttccagacctggctcttggaaccagcccggaagtcctgggacttgatctggggcctcagtttttttgtttgtttgtttgtttgtttgttttcttcctggggccctgtgcatgtcaacacagtcattttcatctgcattcacttgccttccaggcaatgcacaggcttgtcttccatggctcagcgtctctttccatatgtttcaggaagatgctataggacctaaccaacccatgtggttctgaagtcctttattttaatttttggcaagattaggtagccaggtatgggagctcaaaagctgaggcaggaggactgccaagagtttgggcctaccctgggctaattgtaagttgtgggcctctgtgggctacaaaaatgagtcggtacaattacatagggcgtggttctgttgggcccacagcagtactcttgtaaaacctacaggcttttccattttcttacaggggcgacttccagtcaagtggatggctcctgaagccctttttgatagagtttacactcatcagagcgatgtgtaagtaactctgtccttggcttatacatgggttgagttgcagaaatattacagatctcacttgtccatagaaggcatgggcgtcggggatctcagatggcaggagtctatggtagactggtgcccagtgtttggttactgatctgcctacctttggaaggtggagataccagccttctgctgccagagtggaagtacctccagtgatcactcaccactccatctcctctcttgagtgggtggcatgctcttcactcccttaaagaaacactcttagctgggcctggaagtgcacatgtacaccctagcactcaggaggaccgtaaattcaagaccaacctagaccacatgtagtaagtgcaaggctagacagggatatgtagtgtgtacgtatctttataaaaatgagaataaagaaaagactgaaacccttctgatttaggagtgtgtgattcttctctggcccaggcttgtcctgataggttgatgctggataagacacgatcagttgggatgaccaccacatctgctagctgtggctactacaatatcttaagtcttctcttaacctttgataacatcctagaaatacagtagaaattacataatatttctctgatgactcatataaactactgttagagccaggctccaactgatattatagattggggaatttagctgaaagatgttattgggagaaactgggccaaagatgctcctttttgccagttcctgtgggtctagaattattccaaaagacaacagtgttgttgttgttgttttgtttttgtttttgtttttgtttttaatttggatgtgctgggattttgtttgtgtatttggttgggttttttaagatttttgatgcaggtattgaatctacaccaccagccttcctaggaggaataagtcacagtttttaacttgtgtgggaatacactgaggctctgagctggttttgtttacattgtggcccttgcttggtagaaaaccagggacagtgtcagtgatgaagctgaccttacagagtcggtgtgcaggacatacctaacctctgagtctctgcttgattgtatcatagacttagtgctccaaactcggttggggaaatccagatgtggttctctgtgaaatcaagtacggagagtgccctgagagctcttctcactctctgctatctgatgctcttttcttggagcatgcaattcctctatgctaatcccagccctgtgctgggtcccttcacatcacaccaagtcgcagcgtctgccctgcgagtgctccacccgccatctaggacaggcatcctctcacagagtcatcttttctggccttattctgtcatctgtagatccaggttcttgtgtcagccacacagcgagatggctgatttagagaggagaagtctgaagtcaaggagtcaagaccctcccacctccacccccaccccccccaccgcatgactatcaccacagaaaagacaaagaactttaagagatggccgtggggctctttgtctatctatggaaaattccatcagaccatccacatgtcgtcctcatttagggaggctccttgggggtcaggaaagggcatgtaggatggattgcgggagggctcatttatctatggatgtaagaagtgagtgggtgtttattttttttaactgacatgtttaggtttctgcaatctggacgcattactaatgctatgttttctcttttctttgcagctggtccttcggggtgttaatgtgggagatctttactttagggggctcaccctacccagggattcccgtggaggaactttttaagctgctcaaagagggacacaggatggacaagcccaccaactgcaccaatgaactgtaagggctgtagccacccctgctgacagtgcagtgggctcatcccatctgtcctctctccagacatgtcttgggttcctcaggctcccattttctaagcatgctaagaagaatggctggagttgcctgggttcaatcccagtactgagatagatacttacacagacaactgtggcttatccaaaagaatgagcagcatcctgccaaagtgtgtggagtgggccttaaatctggctgccatgggaagggaaagccacacactgacaggagtactccataggtcaggcatgctaggatgctttggggctgcccctgtaaaatagacatggttgttcacagtgctggcaatcccaagtaggaaatgggctccttccaaagcacccttaaccacggatgatcgtcacgacagctaagcacggtggctcatactataatcccagcattatggaggctggagcaggaaggcaaagttgaggccagcctgggccacaaaatgagacccttttttcgataaaataaagtgaaaaaaagttaattttttacaaagtgatggggatgggaaggtagcttatttggtaaagtgattaccacacaagcataaggacctgaattcattcctaacatctacatcaaaagctgagggcagtggtgtacgcacctgtaatcccacagacagcagaggtagagccaagcatccttggggcttgctaggcaagcagcctagcctaaaccatcaaacttcaagtctcagcgagggactctgtttcgaagcataagatagatggtttttgaagaacagtatccatggttgacctccaactcccaaatgcgcatgcaggccagcatgtgtgtgcgcgcacacacacatacatacacacacacacacacacacacacacacacacacacacacacacgagagtgggcaagaacaaaaaatatgaaaagaaagttgccattccatcaaccacacttcctcagattgaatgggttgctgtgtttgcttacccatatttgagagctgggaactccaagtttacctggatgccatcattggggtaccatttctgagtatgaaagtgtgggctggtttctaggaatgcctccctcacactgtaagagaaattgtgttgtgttaatgacgcgtgccttgggcagtgaggtgctgccccctcctctggggcaaactaagaaagcgattgtccctgagaccgccttctattgtgtgtttcttcatggggattttagagcagtaatcccatgagcgctttctggtgtacagtggaaggctaatgaatggccactttttatagcgtattatataaaggcatttattgtgtgcctcgtgttcctgtcgctttttctaacatagagggtctgtcgaaactcataatcaagataaggcgggaagctcggactgccccgagagttgatcaggaagttagtgcaaagctccttggtggcagattagttggcacaaaccttcaagtggtagtttctgatttttttttttttttaaaaaaactgaggaacttttgtcaacagactttttaaaacaaaacccaaagtgtagttcaagagggagcatttggggaaggagaagggaggcaggctgtaaacctgtccccttccactctctagaggattctgaaaagtatccaatgctgtggtaggtcacactgtcacagagatagaggtgaagcctctatcacacacacacacacacacacacacacacacacacctacctctgtctgggtacagagccaccctcctataacattctgtctacagagaagtttctgtaatggtagtgtttgtgtagttacattttcttatctagggcttgtctccatgccacctgttagaagtaaccacatctgtatgtcacatgcttggtgacaccagttgaccagagaaatcctttctgcaggtacatgatgatgagggattgctggcatgctgtaccctcacagagacccacattcaagcagttggtcgaagacttggatcgaattctgactctcacaaccaatgaggtaaaagcgtccctccagaagctcagagcccctgcttagctcaggaattgcctgtttgttgaatacaagctccagtgttggagttgggagcccccaccatttttagggtcaggcagagttaaactgtgtgctccttttcagtcagggtttttttttttccttctcagaacggaactttgagaattctgactcacaagactggaggctgaggcccagggtgtctgtgtaggcagagggagaggtggaaatgttttgtggtagtgttttggtatgcgtgggaaggtgctggcatgtaacatgcgccccggatcccatgtcctgttggttagtgtgaatgctgcttgtgctcagcggctgaccaacttgatggaaggcagtgacattctgtcctttccacatgtcacttgccttatgtgatcctgtctgggaaggcatgtggcttggatctttctgtgtggcatgtgtgtcatacatatcatgtgtgacttacattgtataattctaagtgacagaatttttaagtgacagttggtgtctgtagttaaaatattgatcataggggtggggttgaggggtggggagctagctgccagcagtgtgcttaccacacaaacatgggtttgatacccagcactcatacggaaagcctggtgtggtggggttttcttgttatcccagcactggggaggcggagactggtggacccctagaacgcaatagtctgctgacctagcctagaaggaaagcttcaagtcccaagagagctcctgtctcataaaacaaggcttccgcatgcatgaacacccaaatccatatgaatacacacataaaatattttattttctctataatttatgcccaccaaagatagcattttctgttactctttgcctatataaagccctgtctctggcttcaacataaattgaacaatctttagggttttagaaggaatattctatgagcagttaggcccacacagtccagggaaactctacatgaattttgagatattctctgaaccaaacaatatttcctcccaaagaaaaggtagatgcagctgttttcacaccaataaagaaaaggttttgaatctcccagatccttaaaaggaaaagaaagaatacagctgatttctgatttaaaaaacaaatagatcgcataaaaagacaaagaaaaccggcccaatgtagagatataaagctttaacgtggcagccctttcttgtgctcttggctgtggcttgtactggataaagggagagcttgcatttaaatgaacacagctgaccttcagaagttgaaaggaaaggaatagttcaagggggggagggaaaaaaaagccaactttcttctcctgccaaaactgttgtttctagcctaagttcctttaaccctaggcttggaatccagtgatacttgccccccacccccagtcagatctgaaggttacagcttcatttagaaactagaagggcattaggctttcatttaatgatcccaggtccgtactcaaagttacgtattgatatatttatgcttaaagggggacccattcctactgaactttatatgctttttctaaaataagaaagcagaatgccatattgtctaacggatataaaaatcgaagtttctttccttcttaaaatcattaccacatgcttaagaaaaatggttctatttaggacaaaatttcatttttatcattgtaagcaaaaagtcctcttttgatgtggtgggtgtgtttgtttctggttgtacagttaatgctgatgttgttggagccgatacatcccccttcttggatggcgactctttctcttgccaaccctagtgatgaattatagtgggtttttgtcttttaaaccctatgatcgccaacattccatgggctctctgctgataatgctgaggctgtttgtgctgtagtctgcgctttttgccccctctcagaaaaactgtatgtcataggagttgctggctattgggtacataagcaaagccaccctattgtgccagtgccttagacagtgagacaagaaaggcccctggttagaaatcttatcaggactgggaatgtaactcagttgataagagtgcttgcttagcgtgcacacagccctgggttcaaccgcctagtactacagaaactgagtgtggcttcacacacctgtaatcccagcacttggagagatagatgcaggaggattagaagttcaaggttatctttagtcacatagtattggtagccagccagcctggaatacttgagatacttacaggaaggaaggaaggaaggaaagaaggagggagagaggacaggaggaaggagatagatatacacagaaagagacagagaaacagagattcaggagacacaaagacatacggagacacagtgagagaaacagaaagacacagagagagacagagagacataaagagaaatcccttctagttttgtccagggtcagttagtaagtactttctgtaaggcccaaagagtaaacattttcagcttcaaggccatatggtctctgtcgaagctgccattctagcatgaaagcagccacagctctatgtaaataaagagggtctgtgttccactaaactttatggactctgaaactgggaaatttatataatttcatataaatttatatcatttcatgtcattggctgccaaaagatatgactcaatttgatttttctactagccatgtacaaatgttgagaagtcgccttagttcatggaccaaacagaaacacacatgggtttgagccttgtcctgagctggaggaagagagtgacccaaagggaccttggtagcagccagggatgtgttggggagcagagaaacttttatgaacttcagtttcagtactgaaacttccctttccctagacttcctttgacagcccattacgggcttaacatccatgagggtagccacacctttccctaacccgtttctgttgcttactctggagctcctgagggtaatggattatatctgttaaactgtgcaacaaacggagatgacttctcccctaaatgatcctagaaatgacaactgtagaatgtgattccgaaaatacatattcatgtcctggctttgtaaagggtcctgctgggtttacttcactgggtcttaaactccgattgtgagccgtagtgaagagggctgtatatagtgggtcaccgaggtcctgtagcagagtgggcaagctcactgcctgctaccagcagttcactatgttttatggtctgctgcctgctggtggtttatagatgctgtgtcgtaagagaaaagttcagggtagcctggagtgaatggagttggggtatcagggaggtctttgtacactggggtgagctaggcctctggaaagcttcctgggggttccccgtcccttcccaaatctgatagagatttttcaggagcttctgtttaaaatgagattcttctcttcccttcttgcaggaatacttggacctcagtcagcctctcgaaccgtattcaccttgttatcctgacccaaggtgaaataaaacgtctctcttcccttcttgcaggaatacttggatctcacccagcctctcgaacagtattctcctagttaccccgacacaaggagctcttgttcttcaggggacgattctgtgttttctccagaccccatgccttatgaaccctgtctgcctcagtatccacacataaacggcagtgttaaaacatgagtgaatgtgtcttcctgtccccaaacaggacagcaccaggaacctacttacactgagcagagaggctgtgcctccagagcctgtgacacgcctccacttgtatatatggatcagaggagtaaatagtgggaagcatatttgtcacgtgtgtaaagatttatacagttggaaacatgttacctaaccaggaaaggaagactgtttcctgataagtggacagccgcaagccaccatgccaccctctctgacccaccatgtatgctggctgtgccccagttggactcaaggcagacaggtgttctgccttccttgttaattttgtaataattggagaagatatatgtcagcacacacttacagagcacaaacgcagtatataggtgctggatgtatgtaaatatattcaaattatgtataaatatatattatatatttacaaggaattattttttgtattgattttaaatggatgtcctgatgcacctagaaaattggtctctcttttttttaaatagatatttgctaaatgctgttcttagagtttcttaattttcaccgagcagaggtgggaaaatacttttgctttcagggaaaatggtgtcacattaatttattaacgaattggtaatatacgaaacgattaatcatctatagtttttttttttttgtaatttaagtggcatttctatgcaggcagcacggaggactagttaatctattgcttggacttaactggttattggatcctttgagaagagaaatatttacgatatatgactaatttggggggaaatggtgttttgatttatttgtgtttcaactctgctgtccgatgagcatgtctagacaccctaatgcccatgtttcaagaaacctgttaaactctgtcaccccagggtaacaattaaccagacttcccaagacaaatggtaccagcatcctcatcccaagatgccttaatccacttctctggagaacagacttccatgggaatgatagcagggtcctctcgtccggcagctggccttctgcccgggttacacattcatcacgtttgccttgcttctcagtgagttttaataacagcttcagattcttcagcaccaagagccctttggggaatctccatcctctcgaaggatggcaaaagcccagcatcattcggttgagagtctgggacctccttccatcttcttaagggtttgcttctggcttctacccacttctgacaagacctcacctcacaaaaagatctggcctaatagctacatccgacaagataacgcttattgttgatttccgtattcaagtattgttttgctttggatacgcccactcactttgctacagtcatgcgacatgtatgcagattacactgattttatgtgttttggaattggagaaagtatttaataaaacctgttaatttttatactgacaataaaaatgtttctacagatattaatgttaacaagacaaaataaatgtcacgcagcttatttttttaatactcgtgtcttaccaaatggtttcctgcgcttggaggtgtggacagtagttggtggtgtggatgcacaagaggcaaagctggtaggccacacatggggatgatttaccagaggggttgcctaggaacagcagcgcctggaacaggttaatcagtgaggaaccagaagttgattcaaccctggatcgatcggctacttgccgtcatctcaacagaagaagacatcatttcttcctgggtccttcagactttccagaggagcagcacagaggagaccttaaagatgacttaaggatggggaggtatcaatgacaagactcagattggctgggtgctgggacctgccactttccaggctaccgtccttgtaatgcacacagaattcatttcctgccactaaaaactgagcatttttcttgtctgcacatgcagatctaggacctataagctctcattatatttacttaggaacagcttcttcacctagacagggagatgatgcaaagatggagctgcagtggtgcggggctgatggtcactaaacagggctgtcctgctgtccctgttggacttgggtcatgggtgaagcaaaggcaccaggagagtggcatttggttctggcctgtgcttctgtttcttattagcagagcaaggtaatgaccccaccaaaagaatgtgagtaaaaaaataaagtatgtgggctgggctggagctcagctgtctgtcctgtgtttgctttacaagctcgaggcactgggctccatctccagcagtgcattaagaaaggtgtgaaaacagtccctgggtgcaggccgcttatgctgctggccgcctatccccatcactggatgccctcggcatggggtggagtgcacctactgctgatgtaggtgttttaaagcccaggttcaggatctaatgcacatttatctccagcggatcagccttacacatcttccaggacgctggcttcaaccctggagactacagtggaaactgctctacttcctatctgtttcagggagctgggtcagcaggaatcctaaagcagttattggcgattttagttctagaattactttgaaagatttgtcacagagggaaagaaaacagggcattcgtgaaaacgataggaaacaccttcttttctttttcttttttaaaatctgcccgaaagaaatatacacagagcttgttgaggatcctggagtttagggccacccccccccccccaatattgaaggaaagctttgggaggtagatggttgtcagtgaaccaggaaaccagtttatctgtgaagaactgaaagatggcaggtatttgaggtgtgtcctgggccctgttgtttccaggtggaaagggcacattcagaagggtctcttgaagtcctgtgataattgtggcctgcggtggtgatgggaagatggacagttgggctacaaagacagctctttgggagagctcagtgggtcccttgggtatgagggggtccccttgtccatagcctcttccctggggaacgtctcaccatctgatgttggagaatgctcctgaacttcacactcagggaatgaaaacaagttcacggtacagtgtcattacagatgtgtgcagctgtggatcaaggccccaacaccgttctgaagtggtgctgccagcttgtcctggctaataaaggtttctagaacattccagagagcttagctagtgcagatagaaacttgaaactgaactgcaggcttctaagagtcacccaaatgggaaatagcctaaacaactaagaccatggttcttcctggtgccatagaaaggcctggcaagcaatctggagtagaatcaattggcatgcttcgtacaccttggttgtgctgggcaagtcccaggttctatctggacatccatagatctcatcataaggattacctataggcgcttatctccagcagatggtctctctcttcctggagaattttttttacgcatgctagtggtttttgtaaagtatattcacagtgtcacatggccatcattaccctaatacctaaatgtcttcagatttaatttcaagtttccaaggagaaacccagtacccattagcagcttttccaaactctcttcctagcaattttcatctgttctctgatgagatacttcacacacattgagtcctacagtaggtgacctttgtgtcttgtttcgcttgtttagcataaggttcatttgtattgcagcatgtctcagtgtgccatctttatttctaaattatattatgttacatggatatattgcattatttgtccacctactgatggattttatgaataacagtgctttttaatatccatctatagttgtttgggttgttttgttttgtttttttgtttcctgttttttggttttggttttggtggtagtgatggctgagggcagttcatgtgtttttctttctcttgggcatagataggcctaggggtagaattgcttggtcacaggcaatgaactccatgtctgaacttttgaggacttatcatctcaattcctaagcagctgtcctgttttatgttcccactaacatttgccaatttttccacatccttgataatacttgctattgtctatgtttttattattgtacccttgtagacatgaagtgtttgctttctggacttcatagttgaggaagtgggtaccattcagatcacggaacaaaggcatatactatcttactgggcttttcagaaaaggttattgccttccaaatggtttggtctgcctacagcacttacaaattagattcggtaattgggaggtcttgtggcttctcatggaaaggaaaggctgagtgttgctgatcctgtcttctgacataggagccatcaccaccttaaccagagtggttgtggcttaccctcttccccagagacactcacttgagtttccagctcttcttttcctcctgtatttgtctcccagctgtatgtagttctgccccggctgcacatggtcttgggagagtatggaaggttaactgaaggggctattctgcagatttgaggaagccgttatccatgctgggtgactttggtgatgtggccggctgatggagttcactcaaactcctgtaaggaatccttcacccatgttcctataagtgagcccggtagatcgtggttaaccaagccaggcttgggtgagaatgtttcattggtctgttgttggtgtagtctctggggtgaggaggcatttggctgtgtcatcccaggaaagtcacgcaatactgagatgtcaaataactccatccttcccctcctggctgagagatgaaggaagaagccagcacttgacagtaagagactctggttcatctctacctcaaatccccagttttcttccaaatatagcctggcaaccttgagcagcctgtggggactgataaatgtgccgttgcttatgcatgcacatgggagtcctccagcctgtgttttgatgttatttatttattattttgatgtttttaagagatgaaagcagggcttatctcctctcgcagttcatcctaggaagccttgaagggacttggcagacttctgggcaaggtcaggagaagcctttcacatcttacatatcattcggaacagggcccctttagctcctgttttcctgttttgggggaagttttgaataggcaccttaaaattactttgtagtgtggactcaggagtcatgagaggcacagtacagacagtggacatacagacagtgccaaatattacctaagtggagccttaggccacggagtagttcagagataaagtttagtttaaaatatatatgtggacaagtgactttgcttctccacaaagaaccctgtgtcctcctgggtatgtctattcaggttcttggtcctcttgcagttcctttgttgggagtacttgagtgaattttgcctgtatcagttgtaagtcaaactctatagcatgatggacttggaactagaacacatcagtagataaaccaagaagaaaggaggagcttagaatggcgatgtgatgtaatgaccccagcattccagaggtaaggactgaggtaggactatctcaaggctgaggtcagtctaccctgtctcaaaaaccaacaaacaaaagccccaagcttggcaagatggcttagcaggtaaacaaatgtgcttgcccccaagcctgccagcctgagttcagttgccaggacccacgtggtaaaaggagagagctgatttcttcaagttgtcctctgacttacagatgtgtgacacatatacgtgtgcacacatacactcacacatacatgcatgcaataaaaagttagaaacaccaagccaattaaaaaaagagaaccctggggctggagagatggctcagtggttacaagcactgactgctctaccgaaggtcctgagttcaaatcccagcaacctcatggtggctcacaaccatccgtaatgagatctgacgccctcttctggttcatctgaagacagctacagtgtacttagatataataataaataaatcttttttaaaaagagagaatgataatgtttttttgatccctaaataggataaatagtggtccccatgttaaatgaaatttgggttaaatgagattttatctgagatgaaccaaactgtccctgctacgtgacactcaaatattagtgtgctctctctctctctctctctctctctctctgctctctctctctccctcgctgtatgtatgtatcgagataaatataaagataaaataagcactctctctcctctcccccccccccaacacgcacacaacatccttactgctatttgattgtgagtatgaccaggaccatgtccctctcccatgtctaaagggactctaagacactgcatatggctctggcaggccttgtccttctccctgatttcctctgccttactaaaaacctaaagttagctaccaggatctattcccttatttggccacttctgcctcctgagactgactaccaaggtctagctatcaaagtattgaagttctacaatcaaaagccccctttggatcacctagttaatattcccaatcaaaatgtaaaatcccatcctaacacagggcttccccttttatctttataaactgccatttccctatgggccatgtttgtctccggactatccaaggagagtcctttggtcaccgtcatctcccccactccatgctgggacaaataccccttcccccccccttactcctcctccttgcccctcccccttgctccctcttcttgtatctcctgtctttgtccctcctccctgccctctgcctctctggggcaaatcaatctcctttatgtggagaatttggtcttagggtcttgaaccaacttcagctacctataatgcctcttttttttttctttttagtttttcgagacagggtttctctgtagccctggctgtcctggaactcactctgtagaccaggctggcctcgaactcagaaatccacctgcctctgcctcccaagtgctgggattaaaggcgtgcgcaaccacgcctggctacaatgcctctttttaaaaatgtatttattacttttcaagtgtcatgtgtgtatgggcaagcacattccatgacacacttatggaggtcaagggaaaactctgtcgagtcgattttatctctcctcctttacacggattacaacggtcacactcagttgtccggcttgggggctttacccagtgaactacctggtgagctcttcttttaaaacaagcaaaaacatctactatgtgttaaattattgaagataaagatcaaaatctcaaatgatcatgatgtctgcacatcccacctgctctgctcacctttttaagcaagccataggcaagcaacgggccctccatcaggttgttaaaggaccattgtccacttttaaaatggaacagaccaagctggtgagtggattttgtaccatggtccaaaagccagacgaggtgggatcagtagttctggaagattctagatccaggtgtggtgttgtgatgagcaaaccacagtgactaccatgacaaagggagattctacactgaagcactaacagcctggcattcttcaagttaaaggttgtctcagctgtgtgggtagactgtcatgtgtcaggcaggggttggagaggctggcataagctgtcctctctacagggaagtcttctggctcctggttaacagtagagtaccttgttctttctttttaaatacaaggcctcatatatccaaggctggctcataacccctatatagccaagaatgaccttgaatttctgatctccctgccccttctaatcttctaagtgctggcattataagtgtgtgcctctgtacccacttatgtgtgatgctggggactaaaccacatataccaaggcccctgcatgctagactagcactgtaaatccctaccctttggctgaattttcaatggaaaaagacagctgggctggagacccacacagactcagggtggctccttgcacatgacgcttgctgcttcctatgggaaaggttgtgtgtttctttgcacaggtttttactgcagaaatcctagtaggaaacttctttcctggcatggtctcttctcaggggcccagccctttggtggtggtctcttgctgcctttaggtcaaagcaaaatgtagaaatctcatgtgttgctgctgtcacccacgagcagccagaggtgcaaaggaaaaggtaaactcaaaacgttaacctataaaacccatggcaagtcacagggctgggagtgtggtagtgagagagcctgtttgtcatgcttagatcagacagtgacaaacggaggtccttggacccaattggacctcttgcctgcttttgtgtttcctgtacgctaagcaacacttaatttttaaatgggtaaaaagtatgtaatttgtgatatatacaaattacataaagctccagtttcagtattcataactaaggttttactgggagccagccataccctctcatttacataatgcctaaggcagctttggtggatgatggcagtgtggaatggttgaacagagatgacctggataggatgtgccagtgcaatgctggccccttgaaggtggctcataggtgagggctttagaggtagcaagatgctgaaactggatgatgcttcaagaatgccatccaatcaaaagagagagctggtgggacagaagagatggctcagtggttaagagcacttgctgcagaggacctggttggttcctaatattcacatgacgtggctttcaaccatctataactccagctccagggtatcctatatcctttcctggtcttcatggagatcaatacgcaaatagtgtacatatatatgcaggtaacacacttacacattaaaaataaataagtctaaaaaagagagagagagagagatctgaggggtgtggtcaaatcaccaaacatatcctctgaccaggcagatttttttttttttttcgagacagggtttctctgtatagccctgggtgtcctggagctcactttgtagaccaggctggcctcgaactcagaaatccgcctgcccctgcctcccgagtgctgggattaaaggtgtgcgccaccacgcctggctcaggcagatgtttttaatgtgctttggcactagcagacggcccgtgtatgtatctagcttgccttcctgacaccgtttcatcctcggagtgccacatagcaacatgacactgttcttccaagtagggttgctacagagctccacaaaccaagggctaagtaaaaatgactgttctaccagaaggagagagggtgagaggtgaccattcagcttgcttgtttgccaagaagaaaaccaggcctctctattgaggggacaccctgccctgtaacgctatcttccttgactggtctggaatagcagggacacaagtctgagggcttggggatgaccctctcatgggcttggggatgaccctctcatgggcttggggatgaccctcttatgggcttgctggcctagttgtggtttccatcacttggtgctgttgtgtcaattcagatttctatggcagagaccttttgttgccttccattcaaaatgcaaagatcacacggatccttgctctatattggagccactgtagttcacctggacaggtaactaggaatgatctttttttctcttctcttttcttctcttttctcctcttttcttctcttttctcctcttctcttctcttctcttctnnnnnnnnnnnnnnnnnnnnnnnnnnnnnnnnnnnnnnnnnnnnnnnnnnnnnnnnnnnnnnnnnnnnnnnnnnnnnnnnnnnnnnnnnnnnnnnnnnnnnnnnnnnnnnnnnnnnnnnnnnnnnnnnnnnnnnnnnnnnnnnnnnnnnnnnnnnnnnnnnnnnnnnnnnnnnnnnnnnnnnnnnnnnnnnnnnnnnnnnnnnnnnnnnnnnnnnnnnnnnnnnnnnnnnnnnnnnnnnnnnnnnnnnnnnnnnncaacaactgcagttaaaaaagagctattcacaaagctctagttgctgcagacttgaaatgacccaagagccacttgcctcataaatccacacacaactcctccgtgtaaacagatccacagcaacc

SEQ ID NO: 561 - DNA, 3104 bp, Mus musculus
gaacgcgcggccgccagagctccggcgcgggggctgcctgtgtgttcctggcccggcgtggcgactgctctccgggctggcgggggccgggcgtgagcccccgggcctcagcgttcctgagcgctgcgagtgttcactactcgccagcaaagtttggagtaggcaacgccaagctccagtcctttcttctgctgctgcccagatccgagagcagctccggtgtcatgtcctagctgttctgcgatccccggcgcgcgtgaagcctcggaaccttggcgccggctgctacccaaggaatcgttctctttttggagttttcctccgagatcatcgcctgctccatcccgatccactctgggctccggcgcagcaccgagcgcagaggagcgctgccattcaagtggcagccacagcagcagcagcagcagcagtgggagcaggaacagcagtaacaacagcaacagcagcacagccgcctcagagctttggctcctgagccccctgtgggctgaaggcattgcaggtagcccatggtctcagaagaagtgtgcagatgggattaccgtccacgtggagatatggaagaggaccagggattggcactgtgaccatggtcagctgggggcgcttcatctgcctggtcttggtcaccatggcaaccttgtccctggcccggccctccttcagtttagttgaggataccactttagaaccagaagagccaccaaccaaataccaaatctcccaaccagaagcgtacgtggttgcccccggggaatcgctagagttgcagtgcatgttgaaagatgccgccgtgatcagttggactaaggatggggtgcacttggggcccaacaataggacagtgcttattggggagtacctccagataaaaggtgccacacctagagactccggcctctatgcttgtactgcagctaggacggtagacagtgaaacttggtacttcatggtgaatgtcacagatgccatctcatctggagatgatgaggacgacacagatagctccgaagacgttgtcagtgagaacaggagcaaccagagaggtacgaaaccagcactggagccttattatggaaagtgtggtcccgtcagacaaaggcaactacacctgcctggtggagaatgaatacgggtccatcaaccacacctaccacctcgatgtcgttgaacggtcaccacaccggcccatcctccaagctggactgcctgcaaatgcctccacggtggtcggaggggatgtggagtttgtctgcaaggtttacagcgatgcccagccccacatccagtggatcaagcacgtggaaaagaacggcagtaaatacgggcctgatgggctgccctacctcaaggtcctgaaggccgccggtgttaacaccacggacaaagagattgaggttctctatattcggaatgtaacttttgaggatgctggggaatatacgtgcttggcgggtaattctatcgggatatcctttcactctgcatggttgacagttctgccagcgcctgtgagagagaaggagatcacggcttccccagattatctggagatagctatttactgcataggggtcttcttaatcgcctgcatggtggtgacagtcatcttttgccgaatgaagaccacgaccaagaagccagacttcagcagccagccagctgtgcacaagctgaccaagcgcatccccctgcggagacaggtaacagaaagtttcggccgagtccagctcctccatgaactccaacaccccgctggtgaggataacaacgcgtctgtcctcaacagcggacaccccgatgctagcaggggtctccgagtatgagttgccagaggatccaaagtgggaattccccagagataagctgacgctgggcaaacccctgggggaaggttgcttcgggcaagtagtcatggctgaagcagtgggaatcgataaagacaaacccaaggaggcggtcaccgtggcagtgaagatgttgaaagatgatgccacagagaaggacctgtctgatctggtatcagagatggagatgatgaagatgattgggaaacataagaacattatcaacctcctgggggcctgcacgcaggatggacctctctacgtcatagttgaatatgcatcgaaaggcaacctccgggaatacctccgagcccggaggccacctggcatggagtactcctatgacattaaccgtgtccccgaggagcagatgaccttcaaggacttggtgtcctgcacctaccagctggctagaggcatggagtacttggcttcccaaaaatgtatccatcgagatttggctgccagaaacgtgttggtaacagaaaacaatgtgatgaagatagcagactttggcctggccagggatatcaacaacatagactactataaaaagaccacaaatgggcgacttccagtcaagtggatggctcctgaagccctttttgatagagtttacactcatcagagcgatgtctggtccttcggggtgttaatgtgggagatctttactttagggggctcaccctacccagggattcccgtggaggaactttttaagctgctcaaagagggacacaggatggacaagcccaccaactgcaccaatgaactgtacatgatgatgagggattgctggcatgctgtaccctcacagagacccacattcaagcagttggtcgaagacttggatcgaattctgactctcacaaccaatgaggaatacttggatctcacccagcctctcgaacagtattctcctagttaccccgacacaaggagctcttgttcttcaggggacgattctgtgttttctccagaccccatgccttatgaaccctgtctgcctcagtatccacacataaacggcagtgttaaaacatgagtgaatgtgtcttcctgtccccaaacaggacagcaccaggaacctacttacactgagcagagaggctgtgcctccagagcctgtgacacgcctccacttgtatatatggatcagaggagtaaatagtgggaagcatatttgtcacgtgtgtaaagatttatacagttggaaacatgttacctaaccaggaa

SEQ ID NO: 562 - protein, 392 aa, Mus musculus
QKVSAESSSSMNSNTPLVRITTRLSSTADTPMLAGVSEYELPEDPKWEFPRDKLTLGKPLGEGCFGQVVMAEAVGIDKDKPKEAVTVAVKMLKDDATEKDLSDLVSEMEMMKMIGKHKNIINLLGACTQDGPLYVIVEYASKGNLREYLRARRPPGMEYSYDINRVPEEQMTFKDLVSCTYQLRMEYLASQKCIHRDLAARNVLVTENNVMKIADFGLARDINNIDYYKKTTNGRLPVKWMAPEALFDRVYTHQSDVWSFGVLMWEIFTLGGSPYPGIPVEELFKLLKEGHRMDKPTNCTNELYMMMRDCWHAVPSQRPTFKQLVEDLDRILTLTTNEEYLDLTQPLEQYSPSYPDTRSSCSSGDDSVFSPDPMPYEPCLPQYPHINGSVKT

SEQ ID NO: 563 - DNA, 140342 bp, Homo sapiens
gccaggcccaggcagaggccgctgcagcaccacgtccctgcaaggtcccgcgccccagccgtcggggtaacagacatttcgtccagctgtgcttgggcaagcacctgggctcctgattcgcctcgacctgggtcgctcatcatctgcacagccgaaacgacttcagggctgggctcggcgctggcggggctgcccctcctccctgcccggccgccctctaccttgatgccagccccgtcacccacgccccgggcggcgctcgccccccctttgcgcgcgcggtgctcgcggccacacgggggcgctggcgcccgatgcgctcctccctgcgcagaacccggagaacaaagggcgccccgggacctcggcctccctcacctggagccacctgcttcccgggcgctgccccagcgccaggccagcatccggcctccgcgaaggagttaatttttgctcagcgctgctcttagaaatctgttaaagaaatcgctccccacttgatggtctttctccccagcttggggacacaatacgagagctctgggactctaaaagggttactaggtttgtggttttacgatgtgtggggctctgtattctccactccctccccgagtttaccaggatcctggcagcatcatttttctcccctttggtttatgaaagtgaacttcttcttttttttttttttttttgagacagtctcactctgtcagccaggctggagtgcagtggcgcaatctcagcacactgcaacctccgtctcccgggctcaagcagttctgcctcagcctcccgagtagctgggattacagacgtgtgccacgacgcccggctaattcttgtatttaagtagagccggggtgtcaccatgttggccaggctggtctcgaactcctgacctcaggtaatccgcccgccttggcttctcaaagtgctgggattacaggcgtgagccaccgtgcctggcgaaagtgaacttcttttcacatttggaagaagtagacacaccctcgggaaagagtgtagcaaaggcagaaatcaagagaaaagagaaagaaacgcatcgtggaaatgaggtaattgcagggaaaggtaacttcctcacacagctcaatcagctttgtcctaaactggcttctattccccaccttctaaagagaccgtgctcactgtgtacacaaacctatgtacatgtgcctctttgcacttatgctttaattaggaaatgctggaggaggctgagttgcagtcatcaatcaacaagcatctattaagagcctgtaaggtataaacacagccccataaactgctcccactagccaggtagtgccaggtcctgggaatctagagatgggagatgcagccccggcctttctgagtattagcatttagtggtccccaattaacccctttccaccaaaattgttgtccaaggtcagtttctgctaggctttcttccatggacaggctatcttggttcagtaaagcctttcctccctctgggcttgaggctgaaagcacacagttgtgaatctctgaggatttgagggagcaggaatcctcgaagggaggaatttagggcccatagaaactcccactgagaccaggagctgcttccagggggccccaggatcagaaggtgatggtgcagactaaaatcttttttttttttttttgagacggagtcttgctctgtgtcccaggctggagtgcagtgtcgcgatcttggctcactgcagcccccacctcctcagttcaagcgattcttccgcctcagcctcccgagtagctgggattacaggcacatgccaccatgcacagctaatttttgtattttttagtagagaccgggtttcaccatgttggccaggctgatctcagactcctgacttcaagtgatccgccctcctcagcctcccagagtgctgggattacaggcgtgtgccaccatgcccggctaaaatcgttttcattgtcaacagtaagacctgtcccgtgtatctcctgcaccgttctccatctaaggagtagaattcttgtccctacctccaccctggtaaggcaagatgcccatttagggcatggggagcagtccaggggtgatgagcggggggacctggagagggagagcaagagcagttcctggggactcctctgactaaggaggtcttcttggaggaggaagcggaaagcagggtgtgctctctagcacagcccaatacatcgtctgccacgttgaaaataccctataatactgcactctccaatgtagtggcctggccccatgtgactgttgagcacttgaattgtggctggtgctactgaggagctgaagtcttatttaattttaattgatttaactttaaataatcatgttggctggtggttaacgttatcagacagcatagcttcaggcagcgataagggtgtgggtggggtgggagcagacgggatattgttgctaatctcatcctcatctaccccaccctggctaaaaccacttgtatagtttctgtccagtgagctgggaaacctcgttgtggtggaagtggtcgtgatgtgtggagggtgggggtgattgaaaggcagggagtcacagccaagaaatgacatgccataaattgcccttaaatagcaatgggccagggattagaggacttttccggtagatacttgttaccagtaggaacagcacggttcctagactatggtttcagaatactttggagaggatgttcacttcctgtaacaccagggtggccttcagtgatgggtgaaccacaagttttcagctccaggtggaggcggggaatgttcagagataggccggagatcatagataaatttatttttaagatagaagggggacacttcagttatgcaaaagaaggtgaggccaaggttaggggtgggatgaggcttgttcagtaacttgcctagacttgcatagttagcccttgaccacgttgggataaaaactcaggtcttgggggccctgactcagtgctgtttctatggcaccacattacttgtcaaaaataccttgagaccttggacattgtagatgttacatgcagctggcttggccaaccagctaattgacctaccagttttccttcatagattcagattggcagaagccaaaggtaggaatgtgtttgtggccacaggggtggcacaagggacagtactggggtcagagtccataatgccctccactagagttcccccaggttttaattgtgaaattgtttaaacattaagaaagttgggtgaatagtgcaataagtaatgtatactctcaactgtatagtgtcaagagttaacattttgcatatttgctttatctgtgtgtgtttgtccttttttttcctgagccacttgaaagtcagttgtaaacatcaagccatttaatcctttaaactttggcatggatctcataagaatacagaaaatttcctacaaagccaagctgtcataatcttatgtaagtgaattaacaacaatctctaatattcaatctctaatattaatatgatctcctatctggacaatattaaaattttcccaattatcccccccccacttttatagtgatttctgcttttgtttaatttttttaaaaacacagaatgcattcaagtttcccaaattgcccttccgttgcattttgggcaacaaacccgattactcatttgtaaactgcaaatgtgtcgcagagttttaagtcttaatttctcaaatgcaagtcttagtaattcttaaaaatttttcacttccacttgttattgacaatagtcgttctgtgaaccacaaattgctcctttattcctcccctattttgaagactatgcagattcagcagatgaaactgtaggtgtgtgaaagaggtgtctaacaagcgtatgcacctaaacttgaaggctctttgaaatattaacaacaataataacccttacagaaatccttcttggagcacttgaaggaggagaagtgagctgaactcatggtgagtgggtaattgttttctggaaatagtaacagtttcagaggcaatgaatgctacttgaaatatctccattctggccgggcgcggtgcctcatgcctgtaatcccagcactttgggaggccaaggtggttggatcaccagaggccaggagttcaagaccagcctggccaacatggtgaaaccctgtctctactaaaaatacaaaaattagccacgtgtggtggcgggaacctgtagtcgcagctacttgggaggctgaggcaggagaatcgcttgaacctggaaggtggaggttgcagtcagctgagattgcgccactgcactccagcctgggcaacacctgggcaaaagaatgagactctgtctcaaaaaaaaaaaaaaaaaaaagaaagaaagaaagatgtggaatcccctagaaagagccaattgcctggcattggatgggtgagactcacctgccatggtggacttgtactagtggccattgtaaccccagctgagtcaggaacacagacttttctgggttttgctgccattaaccagaggggtgactttgagcccatcatccctctgtgtgccctgctttcttcccctgtaaaatccaggggtcatacttgatgcgctgtcataggtttgacatgcacttcttcacctttaggcctggtctccttcggaagaacaacctgtgccgttcaagtcactcagaaattcaagaaatggttagagcagggcagcctttattcagatgtccctagtggttttcaagaagctctttccttgggaacagaggtgtctttgctatctcttagctatttaatagggtcaaagaggattcaatgaactgggatgtgacaagcacttagacatttttatttgtatggtcctcatggtattgagaaactctttggcacatgggaaggttacgtgttttctatgattattcttagccatatacagtggtttgttcacccttatatgtggttctcctagtaggaaaagtgtcttctgcctggcactgtccttgcctccccctggaccgctgctggggagcagtgggcactgatgggcattgtgacgcctcctgtttggatgttttttcctacgcttacacactatgagaaagtttaatttctaaattaggcacagtaaagtattaataataggccaggcacggcggctcatgcctgtaatcccagcactttgggaggctgaggcgggtggatcagtcaaggtcaggagtttgagaccagcctggccaacatggtgaaaccccgtctctgctaaaaatacaaaaattagccgggcgtggtggcaggcacctgtaatcccaggtacttggggggctgagacaggaaaatctcttgaacccgggaggtggaggttgcagtgagccgagatggcgccactgcacttcagcctgggtgacagggcgagactctgtctcaaaaaaaaaaaaaagtattaataataataaactaattaaaaaaggacagttataataaaagttatatgaatatggtctctcaattaaaatatcttattgtactatgctcacctattttcagactgcagctgaactcaggtaactgagggtaactgaaaccatggcaaaggaaactgcatatcagggtggactactgtgtatggatagtaatcctcaagagacttgctcgtgtgtcaaagtttctccaaaccatgaggaccacctgaataaaaatgtctaagcgaggctgggcatggtggctcacgcctgtaatctcagtgctttgggaggctaaggagggaggatcacttgaggccaggagtttgagaccagcctgggcaacataatgagacccctgtctctacaaaaaatacaaaaattagctgggcatggtggtgcatgcctatagtcccagctactcaggaggctgaggtgggaagcttgtgtgagctcaggagttggaggctgcagtgagctgtgattgtgccactgccctccagtctgggtgacagagaaagatcctgtctcaaaaaaccgaaccaaaccaaaacaaaaacaattaagtgccgggtgcggtggctcacgcctgtaatcccagcactttgggaggcaggtggatcacttggtgaaatgccatctctactaaaaatataaaaaaattagccgggcgtggtggcaggcgcttgtagtcccagctacttgggaggctgaggcaggagaatcacttgaacccaggaggcagaggttgtagtgagccaagatcacgctactgcactctggatgacagagcaagactccatctcaaaaaaaaccaaaaaacaaaaacaaaaacaaagacaaaaacaaaacaaccaaaaaaacccgaacaaataaaaaaacaaaaacaaagaaaaactaagtgcttgtcacgtcctaactcatttcatcctcttagtgatcctattaaagatctaggagaggccgggtgcggtggctcacgcctgtaatcccagcactttgggaggccgaggcgggtggatcacgaggtcagcagttcaagaccagcttggccaagatggtgaaaccccatctctactaaaaatacaaaaaattagctgggcgcggtggcaggcacctgtagtcccagctactcaggaggctgaggaaggagaatcatttgaaccctgagggtggaggttgcagtgagccgagatcgtgccactgcattccagcctgggtgacagagtgaaactctgtctcaaaaaaaaaaaagaaaaaaaaaatccaggaaataagaaccattattttccccattttacagctgagaaaatggaaaactcagataactcaagcaactggcctgaggtcacacagcgtttgtttgtttgtttgttttttttgagacggagtttctctcttgttacccaggcgggagtgcaatggcacgatctcggctcaccgcaacctctgcctcctaggttcaagtgattctcccggctcagcctcctgagtagctgagattacaggcatgtacgaccatgcccagctaattttgtatttttagtagagacggggtttctccatgttggtcaggctggtcttgaactcctgacctcaggtgatccacttgcctcggcctcccaaagtgctgggattacaggtgtgagccaccatgccaggcctttttttgttgttttttgagagggaatcttgctctgtcacccaggctggagtgcagtggggcgatctcagctcactgcaacctctgcctcccgggttcaagcgattcacatgccttagcttccagagtatgtgggattacaggcatgcgccaccacaagcggccaatttttgtgtttttagtggagacggcatttcaccatgttggtcagcctggtctcgacttcctgccttcaagtgatccgcctgcctcggcctcccaaagtgctggaattacaggcgtgagccactgcgcccggccacaggtcacaaagctattgagtaaagaaagctgcatccagcctctcaccttaagaaagccattcccctttgcctcaaagtgaggctatacttccagaaggactttgtctccggggaagccttggctttggaattcaggcccagttctaagtttaaaatcattgatgctgttcagtagtgggatcaatgattttgcttcacttaaatgccacaagctccctgaagatgggctggagctgtcagggcatccagcccctccccttacccagaagtaaatactcttatcatagtcctccgactattctatatccttccatttgagtgcttcttttatgccgagggcactattgagatgtagcttagagaatgaaattcctggtgttgcagggagctcagatccacccgggaaggttcatgagcacttcatgtcagcagcctttatttcatctaacgtttccatagagtgaaggaacagccacccattacaaaacaaattattaaaagaaaaattccaaatcttcaaaggagagaggcccatggtagtgagcgctcccacccccttctcctttctcttcccatcaccaacgggctagcagcacaatttgtttcttgaaacttttgggggcatcggagttctggtgtcctcatttttcttccttcccattgatgtatcattactagagtgaaaaaagaagggcgtctcgagggcttttgaaaaaaaaaaagggtgactactcaagacattttgtaaaggggggaaaattgcgaagaaaagagacctcagtagggggtggaggaactgtgaatgtgtccttgtctggcggttctttcagctgaaacctggtgctggcgttcgcagttcagttcaaactgtcacctttagttcttactggcttttctgcccttgccccagaacctcaacagattggggcttatttacctattcacactccgccgtggaagctcattaataggctttattagcaacaccattcatgggaggccattgacgaaaggggttccagccacttgaagagggaagagaaaagaaaaaactgtaaagagattattttctcattcagaagcctcagtggtgtgaaggttttcctggatggtctgaggtcacttgaagactaaatatggggacataattgattttttaaaaataattctaaacatacttccccccctccccaaaactgaagagtttcctgttgtggtcttgtgggtttcagtcccttatatatgagccctctttagggaataaggagcttttgatagattggtgtcttttcatttctataaaaaatacattctgcaaactgtgcctggacatgaaagtaggtgttcttatttgtcattttcagcggaaagcttcctttccattcaacatgcataaagctattgatgaatgggggatagggacagcggcttcctgcaccattaatttatgtgagaatgtgttaacagcattttcaatggctgatggatgcggtgtaggatgggaaaggaactgtcctgagacactcgagtttcccattggtggggaatataaagatgtaagtggcagcctgcgagcaggcagacacgttcagctgcatcccttttctgagaacttgaaaacatactgctatcagaacaacccgtgtgggagtgaatggctaagtgtcaacctgggctgaggtgtccgttaatgtataggctctggggctaatccaggttagaggacttgaccaaaaacataccctcccaccaagcatatagagggataattttgcttaagaaccagtttttattttgttgctatcaaatttccaaaatacaatgttatagccttttgcctgaggcagttaaatggatttcttacttgtgtggcttttaaataacttgcataaacgttttctgtgctatatttgtgaataaaaatgattttctaatcatgtagcaccttgaaaaatatttttgtaaatgttatgaagggtgcaatgttagtgacacaggtgcaaatatgtttctaaatccaggaaaagtctgttttccaagtcaggtttgttctcaatgcttcatctatcttcaggcctcaaaaggattctaaagcatttctgggtttagtgaccttttctaaagaaaaataattaaggttttaatctatatggtcttgaacttaagcacggctgctcaggagctggatgaataaggagggagaaaaagcatatttaaaataaattattccgaagacacggcttagtgaaaaggtaaatggacataggaactttaaccagttacagcttggtgtgcagttgaagaatcagattttgcatttatgatttttaatctaagattcagagggaggaattactttgttcaaggtctatttatggtagagttgtctttagactcctttgaatttctttttattaatccaaacatatattattaaacactttttttttttgatgcaattttggctttttctgagagagccacattcaaagtcaggctgtcctagtagccagctgtgtggtcctaggcaaattacttaacctctctgatcctgtttccttatcagaaactgggaatagtactctgcagggtggttgggcagatgaaatagaatcacctatgtagtgtgaccctcccatagtagggcctccattaatattcagttttttcctctcatttctattgtttagaaggacagaaacatgcaatgtcctgcgaacatttccaagtggcttcctctcctccaaaagcttcagctgcctggcaaccctccccgcagtatcaagcaggcgcattttaaagtctctttagcgggagggcagggttagagccttcggtcacttgttttctaacttgacataaaacaacgtaacgcagtcactcagcgagccgttggccagcctcgctcgcccggggaggagggaggaggtggcgcggggcgcgggaccaggccttattcggaggctgtcgctgcatccctacggccgcatcgcggccgagccctcgcctcccgggccggtgtctccggctgctcggaggcgtcgggagccgcgcgggactcggggcggcccgggcgcgcggcgctgattggcagagagggcgccgccgtccaggaaacggctcgggtttcagtgggggcgtgacccgccgcgaggaggcgggggcggcggcggcggcgcgggcggcggctggaggagagcgcggtggagagccgagcgggcgggcggcgggtgcggagcgggcgagggagcgcgcgcggccgccacaaagctcgggcgccgcggggctgcatgcggcgtacctggcccggcgcggcgactgctctccgggctggcgggggccggccgcgagccccgggggccccgaggccgcagcttgcctgcgcgctctgagccttcgcaactcgcgagcaaagtttggtggaggcaacgccaagcctgagtcctttcttcctctcgttccccaaatccgagggcagcccgcgggcgtcatgcccgcgctcctccgcagcctggggtacgcgtgaagcccgggaggcttggcgccggcgaagacccaaggaccactcttctgcgtttggagttgctccccacaaccccgggctcgtcgctttctccatcccgacccacgcggggcgcggggacaacacaggtcgcggaggagcgttgccattcaaggtaatcgccgcgcaagacgcctcggggagcttcgccagccggggacgtgggcgccacgggagcccgggacgccgggtgcaccgtcctccgggcggggggcgcggaaggactagcattgtggaggacgctccgtgtcctccctctgtggctgcataggtgatgggggaggtgggtgcgtgctgacggccggcgttctggaagttctgcctctgctacccccatccagatgctgacatctgcttctggcgttgacgcccccctccctgtcaaaccctggcgggcgcattcccgctgactgggcgcgtttctccgaccccagagcagacgggcggaaggttcgcctgcccgtggcacagccccgcaggccggttcccggggtcatctccgaggtgccccatccgtgtgtcctgggaacttccgtaccatccaggccctgcggagacccctttttcgggagggggccgctggggtggggccggtgacatcccgtaggggtggcgatggccaggggtggcactgctggggaggcgacggctccggtgcctgggcgcccctcgcccgcagccgccgtcggcgctggagggagcgcagtgcgcctggggctagggggcgaactggaccgactttttctagttcgcctgcctgctctgccgcagcggctgggagatgtcgaaagcgcaggcgagttctaacttgcgcgctcatttttttcggccacggggccgcgctggggaaaaaagccgagggccctgcgtggcgctggctccgaccctcgcggaccacggacctggcgcaggaggcccgctcggggaccaccagcctccgtcgctctcctcgcaccccgctcccttgcagaccgttctccagaccctccttcctttctcccaattcaataaaacctacccttaaaggcaaacctgctttcaaactcagggcacccattatgtgtttggtgtgaaacgctatcaacatttaaaactccattgtctccctggtcccaaatccctgtaaatcttccaccgggctcgactcattttcatctgaaaagcctgtttagtttgaatagaaaagcaatcaggcgcccctctctctttccctggaatgtcaattaaaatgcagatttctctgagctctttagcgccccgagaagggggagaaaaacaggatatttcaggcaaacaaatgaaagaagtgctgccctgaaagggggtggtggtggggagcacccccaagctgctcgcaagttctgattggacgcaagcattaaaccgggagggcattgtggtcctgggtcagtgtgagttttttgagatttcaatttgttgaggaatttccccctagccttgaccccttgacagctcccgctcctactcagtgctggggagaagtagggaggccttaagcgaagagatgggtctgcactttggaggagccggacactgttgactttcctgatgtgaaatctacccaggaacaaaacaccaggtgatcccagtggccgagccagcagtggacagatcaccccttaggtggaagcccaaagcggagggcactgtattggtctgccttcttggagggcgggggttttgggaatgtcatggtaaattgaagagcccagcacaggcctggcatggggaccgctccgcagccaagcccttcctgcttgtcactctgcctgtctttgggggcaggcttgtgccgaggtgaaaatggaccggggggcgggcggccgagaagagccatccatcagagggagggtgacaactcctcccgcgtgcaggctgagaagagagttccctttcaaggggaaaaataaacacgctggggctttcactggggctcagactccaggaaggattatggtattgaaggcaggaagccgggattgtggccgccagcggcatgctgggcctgtattcccaacaccgagcctggggacctaattatcctgcctaggaggtcgcaccatacttttgtccactggtgtgaggaactgtgcagacctgtcgccttaggtctccgccttccagagttttggggagggggctgccgtggggtttggacctggaaatggctgaaatgcaaatttctagtgccagctagcgggatgatggaacggcttgagattcagcggagcgccctgtccacctttctctgcctggagccaaggaggctcctctgggcagggacaggtgggcgagcaggccggggaaggagcctggggtgaaacctctgcgaggacttaggattgttcctgaagtcgtgttagaggtagaaaattcccctgcattctgcaaatgcttagtaaatcaatgagaatgtttgtgtactttcctcccacatgtatgtagaaatagatccgaaattatcttctgaggctcttgactaagaggaaagaaaagttaagaggaaaaatctttcaagctatctgaaagcacatgcacacaccgtgcacgcacacaccatgtacacacacacaccgtgcatacacacacaccatgcacgcacacacaccgtgtacacacacacacactgcacacatacttttcttgcttttgctgtgaatcacaccgtttcacctgtgctatctttgaagcagaggttttctttattcctcctttggaaatgatgtggcatattcttttccctcctccatttttgtcctcagtcaaagctaaaaggagcagtttttatgatgagatttggggaggctccagcagtgttgaaatcctatgacataacttgaaacatcgagtgggtacataaaaaatgtagagtttagagatttttgtattaaaggcctccctgccacccccagtcttagaaaatgtggttcattcctgtggttcacagaatctgaagcctgagattgatgagccccttcttgtgattgttttaatcattctctaaagtttgtgcattttactgtacccttagtcacagagagtactgagtgaatttaaagttgcttggaatatattaagctttcttggaaaattctctttcccttggatcaaatgggtgaacagaatattaagttgagtgtcctcttctaacttatactctgaaaatttagccagtaggtttgcatatggaaagttattggtccaatcacataccatgactataatttacataatttacatcatcattattaataaattcctgcattattcatcagaatttgcatctgctcagtttcctcacccttctacagaggttgaagacatttagcagccctggactgccatttagtcacaggggaagggaattcaggcttcgaagtcctttttggatcagctgcgttgaatgcgctgcagttgtgttcactcttcgtaagtggctgcttggcggaagactgaaagacacttctccatttgaaaatgaatcctgacaagtgtaaactggtgggaattttctgtagccttcctgggattcttttgattttgctggtctcctttcttcccaagagcgacagtgagggtgggagactgctcacctccagcccagcagaaatacggagctgtgagcagactcctccaacagtttagctttctaaagcccagttggactaagagaagggaacgaggttggttatgccaacccgagcatttttaacttgcttttgtagttgcccttgaaactaaggtcacgttgcttctgctcattgagggcggtggaggcgatagtggatagtagaagagagcacacattgcctcactgaagtggctgcacgtatctgagtcctgtagctactgttttatctctgtttcttaaaagtatgcttttaaaaagattagcctcacacatttctgtggaccggtctggtggtatcacctgggactctgaggtgaggatggaaggatttagcagataatgaaaaagaactctgtttgcgcacatttgagaggctgaaaaatggttttatcccacttgggctggagtgatttggcattggggaagattccctgactcgccaatctctttcctttagtgactgcagcagcagcggcagcgcctcggttcctgagcccaccgcaggctgaaggcattgcgcgtagtccatgcccgtagaggaagtgtgcagatgggattaacgtccacatggagatatggaagaggaccggggattggtaccgtaaccatggtcagctggggtcgtttcatctgcctggtcgtggtcaccatggcaaccttgtccctggcccggccctccttcagtttagttgaggataccacattagagccagaaggtaagtcatttaatttcacttttcaggtttgttttgggatttgtctgggggcagattgttaaggcctgttttagaatcagctacccttgcattgtaaatggggcttctaagagcaccagatcgtggtctcttggctcccggcaaggcagagctgatgagagaaggtcctttgccgcagcactgcaggcaggatggtatagtttggtggtttcttgctgtgtgtgtttctctgtgctgggtgagggagacagctgggagttggcctttatccagtgcccgagagagctgtggaagggatgaaccttgggaggatgaatgtcatctctagtctcccccagcatcattcctactgcttacaatgtaaagaattgctattttcggacaagatgaaccactaaaagaaattgccaacatctgaaatgctgacatcttattttcattgtttaaggagaaaagaagtttctgaagtttagcacagagagagaggcttgacatctcagaatttttttttagccattgtaattcataatacttaagcaatgcatcatcacagagtggcagattctagtttaggtaaacttgaaagtgaatgtgccaggggatctcctccagctccgagaacctccaagtatcacagggcatgcgccggtgtcacagctttggaaatttaattttcaaggtgtaagtccaattacgaggactacatgaggctgaattattcagcttagcagatttggaacctctctcccagccctttggagacaacgtgagccaagcctctacttggtgctgcactgaaatctgtcatcagtagggaatattggtagctgagttatttttcgagtggtaatccgagaataaaacggcagatcccagcactcatcgccacttaatgaacctgtttgcggagagtccacctggtgcctgcctggctttaggaacccgcagcagtccgagtggtgtctggggtaagctgagctgctctgggaacacatctcgtgcgtggggtgaatgaacagcacacttacccagtggggtaggctgggagaggacagagagcccagcctccttagctggatcaggacagtttaggaaggagggttgcgtccatctgagatgagagttctgagagacatgggctccccaggaagaccccaggcacttgtcattgaaggatgaggaccgaagcacttatcacctgaagcaatcgtgtgagactggggaacttttcgttacacagagggatggcagctctataattaacaggtgtggtgacatctccctacgtctctgggaagggaatctggtaggagtttgtgtctgaggcttgtatagctacagctacaggccgattatggaactgcctcttggtgatttgtgctgggacaccaggatgagtgtaatttgcagtggtgatgcatttttacagggctttcatgtaagagggaaaaagttcctggtttctgaaagtcatgcctgtacgtctttaattttgctaataattaaaatggatgtttccgtgattgctggttttcccttgagtgcgtggctcggcaaaaactgaggaagctgagctgggatttcctacggtgtgggctttaggagcaacccaggttagggaaaaactgtcatttttcattttggcttttcagggcagcgttattgtgagtttatttcaacataaagtgtaaaatggtcccagaggatttgttttactgtatttaattcttgaaggaagtttaaaattgtgtatacatgcagggagggacaggtgaggcagagggaagaaatcgtggaaagggacgaagttccccgagtgagtctttgtgtaagaatttacatccaacaatgtgggtattgttggaagcaggcctgctcaacctgggatctgtggatgcgcttatggatcaggaaggaggttgatgaagttctggaaattttaggtaatattttgttaatgtccttttgtgcatttttatgggtttatagtttccatgagctatgagttcatttgcatccagaattatgagatggaaaagaaaagatgtcttagaggaaggtgcaaaacctggcaaagaagaggctttggaaaagtatacaagtcccaggcctcagtttccctttctgtcgtctgagggcttaagaagatgatctttagggtctcttcattaatagtcattgaatattaatgtcctcagaagtcttctgactcttccaccaaaaggttgttaggagatttccatttgacctggacataaagagcaattagcacaggggctggcatccagtaagcaccgggtgcatggccttgtcgccgttgtcgccagggagctgggaacatgggtcttcccagtcccgtgggctggctgtgccaggtgccacaatgtcaaaaaacatctaggcttttggagacagttgagaagaaagttgtttttggatggaggaggcccttggtgtttccaggaagctgtgtttgctttctgtagggtccccacttcccctcatctgttagtctaatactggccactgatttgagccctaagaccagttcttctgttgcaggagttcgctttggtgtcagaggtgattaggaaggtcattgaattatagatgagaaaggagtttttaacagctgaaaatgggctcaggtttaggctctgtgctggtgaattggaagagagagagagagagagagagtgtgcgtgtgtgtgtgtgtgtgcgcgagtgcgcgtgcgtgcgtgcgtgcctgtgcccctgtccatcagttctccatgattagaactactatagctttggttagcagtaagttccaccttgaccttctgtgcaccaaggtcttatcttgtaagactttttggtttgctaatttatttggaagctcagtttagataatgtctattggataggagaaaaatgtgactgagaagttccaggaagaagcctgggccctaacactagagggtccttttcttttggcccctcagggaaaggttatgtttagtcatcgtggctttgtgcaatatcgtatcatatcatatgtcatatcatatatcatatatatcatttgtcttctggacacgttctgaaatagtagcagtggggttgggcccactcaattgacttaagaaaataatctctagaagattttagtttttaatatttcagattaaatatgagttttccagttggtcattcattgttaatttccttttggtcattcattgttatagggcaccagcagaggagtgaaaacatggttattgactcgaaggggggcagtcctcaatgccaagtactattctgttgattaacattataaatatttgaagtctagtcaagcttgattaccctgagagggggcaactcttactttcaagttcttcctgacattgtcacctactctggttaattaagtcattgttgacattaatggcatctttgtttacaccaacccagtaggagctaaaatgaaagggcttttcaaccctacacccttaattactttcccaccctccacagagtgtgactctgaaaagtaacaacctgaaaaaaaatgtagtttgtgtagcaattttttgtcaatcttctgagaggtgatgctctcctggaccaacgtgagttggtccagagttcagtagcagaaacgtcgaggacaggatctacacagagacctccctaagtcagatttttccagtatggtttaagtcctttgttagaagtattgtaaatgccataatattaaccatacgcatttaattgcaagttaaaagaaaggaagaaagaatatatccgcataccaagagtgaatgatttaaaataatcttctgtttcgtattatctgcatctttgtttttcaatatgagtgttaatatttaagagttgactgtaacttgatagttagctttggaacaaggacttattcttggtcaattaaaccaaatacaggcttacgcagttaaatacacaatgaagtacacattctttattagtatataaagtgtttcacaattcatagaccaagagccatgtttaatattacttatagagcagaaatctggcaagcccagagaactggtacttgtatcattttatactggctctctctgattcaaatttggggtatatgtgtgtgtttctgttttgtctgtttatttcaaccagttaaaagacagagcacttactatgccaatggccccgcatcaagccataagtaaagactttattcctttcaagtctttctgacccagttgagggtgagaattcacaaaaccacagcaatccaatatgagatgtttttaatatcagacttaacaaataattgcatggctatgaaataactggggtcgtgtttaaactggaagtgttttgtttaatgttcgtagtttcaataaaatgtatccactagtcttccagtttgcagactgttgtttaggtgtttgtttagccagggtaattgttaaaaactccctctaatctagcttacccttacatttccatggaagcgaattttagtcattaaaggaaaacatgggaaattgatttttgggtgcctggctgttacgctaggtaggaaatatagctggtgtgctactctccactgtactggtccgattctcgccagggggacatctctgtaggcagttcagaaattattttttggaagttttttaggctattccacagataattctgatccagtaggttttatgcaactgtgcaaaatgcttatggtctctatttttttttccttgagagatgattttagcctttggttttttgtttgtttttgttttttgagacagagtcttgatctgccacccaggctggagtacaatggtgcaattgtaccctcactgcattgtcaaacgtggctcactgtaccctcggactcctgggctgaaggggtcctccaacctcctgagtagctgggactacaggcctggataatttttaaaaatatttcgtagatatggggtttcgccatgttgctcaggctggtctccaactcctggcagccttggcctcccaaagtgctgggattacaagtgtgagccaccacacctgtcctagccttaagttttgcatttttttccatctttttgctgtatcccatatgatttagagatttttgctgtatcccatgagatttagagatggctctactttttttagctttcctagcattgaaatgcttggtgttgctaatcataccccatctttaccacaccatcttcctccctgacttgccttcttagtgtagtttggtcaagaacttgaggccaagttcttttttttttaaatttagcttttattttaggtttgggggtacatgtgaaggtttgttatgtaggtaaactcgtgtcatgggggttcattgtacagattgtttcatcacccaggtattaagcccagtacccaatagctattttttctgctcctctctctcctcccacccaccctccaccctcaagtagacctcagtgtctgttgttcttttctttgtgttcatgagttttcatcatttagctcccacttataaatgagaatatgcagtatttggttttccgtatttggtttattgctaaggataatggcctctagctccatccatgttcttgcaaaagacatgatcttgctcttttttatggctgcatagtattctatgttgtatatgtactacattttctttatccaatctgttactgatgagcatttaggtagattccatgtctttgctattgtgaatagtgctgcaatgaacatttgtgtgcatgtgtctttatggtagaatgatttatattcctctgggtatatacccagtaatgggattgctgggtcgaatggtagttctgcttttacctctttgagtaatcgccacacggctttccacaattattgggctaatttgcactcctactaacagtatataagtgtttccttttctctgcaatctcaccagcatctattattttttgacgttttattaatagccattctgacttgtgtgagatggtatctcatcgtggttttgatttgcatttctctagtgatgagctttttttttcatatgctggtgggacgtatatatgtcttcttttgaaaagtgtctatgtcctttgtctactttttatgtggttatttgtttttctcttgtaaatttaagttccttatagatgctggacattagatctttgttagatgcatagtttacaaatattttatcccattacgtaggttgtctatttactctgttgatagtttcttttgctgtgcagaagctcttaagtttaattagatcccatttgtcaatttttgcttttgttgcaattgcttttgatgtctttgtcatgaaatctttgcccattcctatgtccaggatggtatattgcctaagttgtcttccggggttttatagttttggatttgacatttaagtctttcttccatcttgaggtgattttttgtatatggtataaggaaggggtcagcttcaatcttctgcatgtggctagccagttatcccagcaccatttattgaatagggagtcttttccccattgcttgttttcatcagttttgtcgaagatcagatggtcgtaggtgtgcggtaggtgtgtggccttatttctgggctctctattctgttccattggtctacgtgcctgtttttataccagtaccatgctgttttggttaccgtagccccacagtatagtttgaagtcaggtaatgtgatgcccccagctttgttatttttgcttaggattgccttggctattcagaggctaagttcttttaaggagaggtctgattgaacaagatgctggacaggtcattgtggtgatccttcacgtcttgaagatgtctccttctgtaatagacaaaagtcacactttttacaagtttctctttcctcactgtgatttgtatgtggtagctgacttctatttatataacttcaagctcttaccatttaaatatttatacacaagtatgaatcattgggacaagccatggccatccttgaagagtgtgtgtcaagtaaaataggcgtgctttagattttcagtaattttggttttgggaaaccggtaccatggaagagttttcagatgctgaatgtgtaatttactccactttggaatactgtaagtaattctgcgccattgtggactttggccacatcatgccactctcaaaaacttctgattctttttgacagtaccaagtcagggggctaagctgttgtatattctttcctttaaccccttgtctaactaaagaatggtaaattccaattcatttcagaatggaatgcacacatatagagtttcaggttatgctgaatgtgttttatgaggaggctaaaaatagcttataaggaaaatgctgatagattcaagaacgagaacaagggatgtatttatttgtatgatttatgtagcgcctttcttggagaggactcaattctgagctctaacgttaataaactctatatcaattatcgtgattattttcgaacccttgagctcctatattactatatgtgacccatttgtatacctgacagtttactgttaaattttccatagtgaccagttgtaatattttaaaagtatccagacattgaaaaggccaactgtgtgtatctatggtgtgtgtatgtgctcaggggggtgtactataaaatgaatgtcaagatcattgcaatggttaagtttaggttttaaactctttgaacacccttaaagttcagattttcagttgacagtgggattgcccccaaagatgtgtggctgccttaaggagccttcttgtcctgctaagcctcctggatttccaccaatgcatgttgcatttctacctggctgcaatagacgcacaactgaatatatatcgtggacatttataaatgtttcaaatttaaaaccactcaaatttttaaaagaacaagaatcttctgtgcatttaatctaaattctgtatcagccattcttaaaaatagaattgaataaaatcattttggatggcatgtggtatgctttctggagacataaactaacagagggaacttgaccttgggaggtaggtttgaatctctctactatctactgatgctgtgatttcagaaaagttagataacctctctgagcctcagagatagtatctatcttgaagggtgaatgtgcagattaaatgcaaatgaaatgtaaagcccctactgaatttcctggcccagagtaggtgttcattaaatgctgatttcttccctgtcccacttcctgtcaacatttcctggaccaacaagatgtttactctacaatattaccaatatttcctggaccaataagatgtttactctacagtgtatagtgataattgtctgatgagaagcatttacattaattaaaatgtaaaactggctctaggccctggatttgtccaaccctttttattatcttgggcttttgcaagtcccatggattttagaaatgggatcatcctgctgcttgcagtccaaatggttcaaggttgaaattttttttcccctctgttgaaaaaagtcagttgcagctctgtaataataacagcagacacatacttcatgaggaacaatgtattttggcaaaagagttttctgtttgaagcttcaaaatacaaaatactctgccacattgccattaggcccggtgaagaacattggagaggggttatggaatcggttggggtggggtgcgggatggagaggggttatgggatcggttggggtggtgcgggatggagagggttatgggatcgtttggggtggggtgcgggatgtagaggggttatgggatcggttggggtggggtgcgggatggagaggggttatgggatcggttggggtggggtgtgggatggagaggggttatgggatcggttggggtggggtgcgggatggagaggggttatgggattggttggggtggggtgcggtgtggtgtgttctgcttttggccaggctggagaggtgagctccataacatggtatggtcatccttgccatgtttgcctgtagtgacctcccctgaacactcctagatgagatttttgtctgcatggaagggagctcaaggaaattgtgatgggacccacagtactgaagtggacaggagctgaacaagcatttgcacatgatacccctatggaggttacttggtaggacaggctatgaagtaggggcagtatggatgaggtcacgtttctttagcccattccttgagatgatgatgatgatgatggtgatgatgataactggctaccatttattgagtgcctgtcatggttggactctgtgctaggtactttaacatatattatctctcatcttaataacccagaacatcttgggttttcctgttcttattttatggacaaggtaactgaaattcttggggatcaagtgactcctccaggacctcatcattagtgagtgtgggcccaggtctttgggtgaatgtgttggtgtaagaaaaatttcccttcttcctgagcaggaggattttttttttttgctggagaatgtggtgacccctcattctttcctaaatctgtcgtttgactattaaacctgttagggacactgctggttgattctgtttctttctcacacatccataccgaattctcctaaagacatttgaagaaaaattccagacaataaaaatgtttaatgattatactttgtgattcttctagaatggcttctggtggcatgtgacttattggaaagaggctaaccctgactgctgccaaggagaccaatgggagactgggtcccagttggtggtccaggctgcgccacaccgtaggagtccataacaagaagggctggcctctgttgcccgttgatgcatgagccatctcagcagagcaggccgtccccagttattccttgtcccagatgcctctgctggtttgtcctagtgcctgctaaccctcagctgttgccacttggatattatgtcaagcttttcttcccagaatttctgatttacgactgggtatgaagtcaaggcctacctgcatagacagacccctgtacttgggactcccacgaactgtggtcatggaaacaagcaccaaggactacctgacccttctaatgtcacttttctgcagagattaggaggagagactaagaaagccaaaaaagaaaaaattccaagaatgaaaaggccaaaagcagaaacacctactcttcttccagtcttggccagaaagggtgtccttaggggaaaaaaagaggccagggaatggagcccatttttaaagcaagcaaagatcagtttggtatttaaaaataaaaagtgaactccagtaccagctaatgtgtaggtgaatcgaggctggtttaggcagctgaactttgttcttggctacctgtacagcagttgcagaacactcaggggttccaggcatttccaagtgggagttgagttttggaggaaagttgtagaattcctttttcttttttttctttttttgtgagacagagtctcttgctctgtcacccaggctggagtgcagtggtgcgatcttggatcactgcaacctctgcctcgcgggttcaagcgattctcctgcctcagcgtctagagtagctgggattacagatgtgcaccaccacgcccggctaattgtatttttagtagagctggggtttcaccatgttggtctcgaactcttgacctcgggtgatccacccacctcagcctcccaaagtgctgggattacaggtgtgaaccaccgcacctggccgtagagttcttgactaggagatgctgcaaatttccctcttaaatttgcagctccccgtgcgatgacaactttcagagcttggcagaggcaagatggtataaacatgatttttagattgcagggtaattgctgtggtttctttgagttttttcatccatttgctccccaaataatttttgagacctactatgtgccaggttctgtggggatggaatagcaagcaatgaacagttgagtgggggagacaggctcttgtcaaataattgcaaaaatgaagggctaggactgggtgcagtggctcacgcctgtaatcccagcactttgaggggccgaggtgggcggatcatgaggtgaggagtttgagactagcctggccaacatggtgaaacgtggtctctactaaaaatacaaaaattagccgggggtggtggcaggcacctgtagtcccaggtacttggggggcggaggcaggagaatctttgaacctgggaggcagaggtttcagtaagctgagatcacgccattgcattccagcctgggcgacagggtgagactctgtctcaaaaataaaaaaaaaaatcaaaataaataaacaaaaataaaaaatgaagggctaggtccagtcaaaggtgaagattctgtgaaggaaaagcatgggccggaggcatgtgccccatgtttaggagttcccagggactgggactatgaagctgctgctgctgctgcttttttttttttttttttttttttaaatgcagggtctctctctgttcactgtgtcacccaggctggagtgcagtggtgcaatcacagctcattgcatcctggacctcctgggctcaagcggtcttcccaccttagccttctgagtagctgcgactataggcgcaggctgatttttcttttttctttctttttttctttttttttttttttggtagagatgggttctcacttgttgcccagcctggtctcaaactcctgggctcaagcgatcctcccaccttggcctcccagagtgctgggatcacaggtgttagccaccacacctgaggctggtcttccccttaaggaggtggcacccacctggattccccagcaaacccacctgcattgcaaggttgacccttatcagtaccagccaccttgcctgctaggttgacccttgtccagtgaggtgattttccagggcctagcctctctgctgtcccttgctggcttcacctgttgatgttgatggaggtggagcagaggccgttgagtgaatgcgtgcagctgggctcagaggcccctcttctcccctcctgtgaggtgcttgcccttgaaggtgtggcgagtgaggaggccggtcaagggcatcccggcggcctccaggccgtatttgagtgggtcgtttcagcctgcttcctatctcttttctgttactacctctaattggcagagtttcttgccaggtcaatgtggaggcagagagatggccggagggcggccaggggagtcaggccaggtgtgggcaggatgggattctgcctcctcccaggtgcctcgcctgggggatgccctgtcccagaaagcctacattcgtgggagccggcgcacagcccttctgagatctaaagcttccctctgaatgctgctttggaggattgtgagaggtagtgactcttcaaagtttgtttgttttcttgaagcttttacctctatgcaaatatgcagtttggagcagggaagaaaggttaactgtgatggcgccggctcttaacgtggaatgtcctgaattaatgtgggtttcagtcctctggctcaggatcccctgagggagagtttttctttcctctgcaaaacacaggagaaaagtgatccctgtggctccgacctgccttccttgggtcctgcggtgcaaaaccagctgggaccgtgtcccgcccacccgaaggcagtgtggggaacctttcctccaggtcattcccattcagctgattgctgccggctccccaggccacaactctgtgccttcaggcgtctgcacgggtttcgatgctggccaggcctgaacttggtgagcctcaagcagaccgttcaaacccattcaaatgaggaagaccatctgtttcccagtctccagctgctgctgcttcatttgcaaatggctgggatgctgctgaggggatcaggcggggacacatctgcagactctgaaggagtgttggaaccgagatcctgctgagagaagaaaggccgagccctttaaatcaacttgccaaacagtacccccagaaggtcctgagttgagaaagcaggaggcagccttgccctcctggaataactcttaaccttcccttttcttttgtagccttggccactttaaaagtatttctttattcagaaagtgcgcagtgtgggagggcctgctctatgggcttgggggaaaatgtcaaacgggatctggacatctatctgacctttcagggccatacagggcaaacgtatccgctggagtatgcaccatttattgaatgtttacatcaatatcagggaggtgagcttgtcccagcagcagcttctaggagccacaggtaacagtaagtgtggcaaggtgactgtccctgaaaacctgcttctggaatgagtcaggctttagggtatgctctctggaatgcaggccagccgccccaactcgcagtaacgcaggcccttagctctgtggactgcgtgaggcacagctgtggggactcttgcccatggtttggtgtttgcagggttattcccggcatgctgtggggctagggtaagttatccggctcctgagccctgctggggttctcatctcaagggaattctgtggtgtgttactgtgccccacatgcaaatatcagctactctcaaatgtgttggatggatgaatagtagaaggtattttaagaagccacaggcctctttgtaaattaaacaggcatcatacatgggtgttgataatgatgaatctcacaaaatcttcagatgtttagtctctgggaacattccaggaatcctcatttaggtaacttatatgtgatgagacctatttgttcacttgaaagaaaacctgttttgaagtcagaggaatgcgaatagaggctctcacatggttggaaaaagcaatctgcaggccagttacgccccgtaaacaggaacccaggactgccctcctggccagggctgagttgcaggatggggaccccccactacctccaaccgcccgccaggatgaggagtgcttgctctcagacgtgcccctcactttaaatatacagaggccttcctaggcagcctttgattgtgtccttgtggtgaccttgccctgcagcaggcagcactggagatgtttttctcttctctaaagcatgactctgaggctcagcggtgtgaggctgtccaagctgacacgttcactactggcagaggcgggtctcaaagtctcatccttggacactggagctgaacttcttgtagtgtgggtcttggaccagcagcatcaggcctcacctgtgggaaataaagaatgtcagcccgcacctgcaggcctactgacccagaatctttttttgttttttccttttgagacagacttttgctcttgttgtccaggctggagtgcaatggcacaatcttggctcactgcaacctctgcctccgaagttcaagtgattctcttgcctcagcctcccgagtagctgggattataggctcctgccaccagacctggctaatttttgcatttttagtagagacagggtttcactgtgttggccaggctgttctctacctcctggcctcaagtgacccacctgtcttggcctcccaaagtgctgggattacaggcgtaagccacagcgcccagctgacccagcatctttggaagtgggagcaaggaagctgtcttaaactgaccacgtggttttacgcacagtaaagtctgagaaacattgcattgatccctactccagtccctctccgtacaccttttgggtggagtgggctggggacgcagactgtctttggctgtgcatgtcctagaggctgaacaggacgagatgggagcagtgcagtgtcttaatgggaatcgggattttcacggaggagctgttggaactgggctgaataggagcctgccaggcagcagagctgggtgggcttgtaggtagagggaacagtgcccatgtggacaggtaagccagagtgtcagagagagggatgtggggcttggagcaaccaagcctcaatgcgcatgatgttctttgggttttattctctctgactttggagtggtctgtgcctttttaaaagagtagagatcatgtgcttttcagaagattcctctgggggtctgcggtggctacaagaggcgcaccatgggtgatgggttaggcgcattgcagaggtcttgtggaggactggaggagacctgtgggatgcagttttgcctgtactttctttcagagctaagctttctatcagggataggcctaataggtgaaggggtgtggggactgatcagaggaagggccagaggaaaagaggggcttcagggccgacttggagcttgggcggcagttcagtggtgtgactcccttcatcgtgtaagagaagaggctggtggaggaggaggaggttgaaggtcacttgcttgttttggatacgacctctgcagacatccaggttatgtatttcctccccccgggcaggtggaaatatgaacctacaagcagggacttgagtggcatctgcggggaggaggtgggaaaagccacacgtgcccaggagactggaatgcagggaaaggaccagaagagccagaggtggaattctgggtatatccatggatacaggaggggtggcagggaaggagaaatttcctagaaaggcaagaagtcctccttgacatgttcctgtccataagaacacatacgcacatgtacgcaccagcaggaagcagaatgctaaccgaagataattaacccccaattctgtgttagggattgagaaatagaccaggagccctgccccctcctctctcatttcctgaccttccacactgagaagacctggctaggcagccttgctttttttcctgtttagcggaggagtgaggatttcagccggaaggtctttctgatggcagatgtgtaagtgccagacattgtgctgggtgccttctgtgtcctatctcatttattattgttcctgctccgaggacttgcctcaaggtcatacgatttgtaagtggcatagtctcggtgtcagtgacaggtctgtttggtgtctctctctctctctctctctctctctctctctctctctctctctctctctatatatatatatatatatatatattttttttttttttttttttttgagatggagtctcgctctgtcatccaggctggagcacagtggcgtgatcttggctcactgcaacttccgcctcccaggttcaagcgattctcctgcctcagcctcccgagtagctgggactataggcgcctgccaccatgcccagctaacttttatatttttaatagagatggggtctccccatgttggccaggctggtctcgaactcctgaccttgaatgatccacctgcctcagcttcccaaagttctgggattacaggcatgagccaccatgcccggccttggtctgtacctttaacacccccagccttttctgaagagtcaccagagaagggacaaaaatgaggccatagccttactgctaagggaccatgagaggcttggggtatagctgtctgttgagacaggtgctttactactttgtaagatgaagagagctgcctctggctgagcactgtcattaggactcagggaatggaagtgttttgagaccagagggttcagtttcaggactggagatcacaatgcattcattttacagagtgacaactctgtagggccactcttcaccctaagattgggtcattaaaggccaggcacatcctattcactccttcacctccttgtgagccccccacatgccttttgatgaaagggttttccccagaacagtgtgtcccaagaagccctgaagggctggagatgtaccagctttctctgctatgtccagcaagtgtattttcagaaggtaggaggctcgggctgggctggccaggcagccaggcacacagactcctcattgtacatccaagccggggcgtgcaggacttcaacatagcttgtaacgcaagtatctatttcctgggcgctacatgatctaatggcctgtcgctttgggaaatgctttctgaacaaaagactcgatttatttatttatttattttttgagacggagtttcgctcttgttgcccaggttggagggcagtggcgtgatctcggctcacggcaacctccaccgcccaggttcaagcgattctcctgcctcaccctccttagtagctgggattacaggcgtgtgccaccacgcccggctaattttgtatttttagtagagacggggtttctccatgttggtcaggctggtcttgaactctcctgacctcaggtgatccaccctccttggcctcccaaagtgctgggattacagatgtgagccactgcgcccggccttttatttttttaaattattattatttttatttatttatttatttttttgagatgaagtctcgctctgtcacccggctggagtgcagtggcacgatctcggctcactgcaacctctgcctccctggtttaagcgattctcctgcctcagcctcccgagtagctgggattacaggcgtgcaccaccatgcctggcttaatttttgtatttttagtagagatggggtttcaccatgttggccaggctgctcttgaactcctgacctcaggtgatccacccgcctcggcctgccaaagtgctgggattacaggcatgagccaccgcactcggccaggactcaattttgaagttcttatgcaagcaaagctgcccatatctaggagtttatgcacacagtactgattcaatacctgcgtcttagtggtccatcaggaatttttcactcatgaaatatgactttaatacacgtgttgggaccagagagaaaaccttccctctgtgcatctttttttggagaacactgtcatgaacagccgaaaacatcagatcaaaagcgagagggatactgacaaaacagggagtgcggatttccactgtgggtggggacattgggagacacggtgactcactcctcagtaagtgcattcttaggctctttactctgtgtgcatttttattttctcatgggcaacaatataatttctttcaaacatgaagagccatccagcatgtttctcaaaggcagacttaaatgatatgaggggtgtgcctaaatatataatttttaatggttaccatattggaaacattagccatgatcccatctgatgactaggaacatgagccagtctggagtttctggagaaatccagctaccgctgcagaggcggctgttagctgttgttaccggcatccttgttagcgaccagggaggtttcagtcccgacttgtgtctaccagataccctgacaactggttagaaagagaggactgcaccctttcatcctgcgtacttatctgttgtttgttgctttgacttctttttgttctccgtttttatgttggcagtatttctcgaggtagagaactttcacctttatattgtgcggagtatttgtcccttcctcgcccccttaaagaacacgtagtacctatgccttataaggtctctgtttgatgtgaggaatttggtcttcttgcaagtcggctcttgcagaggggaggctttgaggatgtctgggctgcagcaggctgtcttcgttgctgtgtacacagccctcatggcagggcatgcaaaggtggttggttctgacttcaatggcgggactccattgcctttattttttaatttaattattattattattattatttttgagatggagtttagttctgtcacccaggctggagtgcagtggcgcaatctgggctcactgcaacccccgcctcccggattcaagcaattctcctgcctcagcttcccgtgtagctgggactacaggcacacaccaccatgcccatctaatttttgtgtttttagtagagacggggtttcgtcttgttggccaggccggtctcgaactcctgacctcaagtgatccacctgcctgggcctcccaaagtgctggtattacagacatgagccaccgcacctggcctccattgcctttatttctttctgctgataagttctgatgccagtgatacccagattgtgccataggaaagagggggctgggctcttccagaaaccctatcttgcagaaatctctcttctgttcctacggacagagaattgggtattgaccagtgaggacttcttactgggactgggcgtggccactacaggacatcttccagactaagagggccagttgggggttactggaccagggaggacagtggcggccacttacttgccatgtgctttgtgtgcagtgactatgtagcgacatttgcagccggactgtgtttctcctgtagagacactggcagccctacagccctacagccgtgacatttactctgtacaaggtggcaggaggtgtgggagggcaccgggaaccgaaggccattttactacccttcccgcagcgctcctgttacagtgcttgtgggagtcccagctgtgcctccaggtacaaacgggtttcttcctgcaacccacaaccctgacaggacatgcctcccgggtgtgctcctaacctgcctcttctctctgcccctccctctttctcctctccccttcccctctctttcttcctcttgccttcctcttctttcctctccctccctctgtttctctcccttccttttccttgtctccgtctctcctctcctttttccccctctccctctctttcatccttctgtctcttccagaggagtctgttcagggatttctttctctctttcttcttcctggaggaatgtgtttagggattggacacctctgactttggaggagggagaaacctcagtgggatgggttccaggacgaccccaccgcatccttggaactaggatgatctagacgttggaaaagacaccatccctgggaaaccccagaaaaggcttaatttgtgaaaagtaatggagggagctgtgccgttggtagaaactgcttttttcttccttaacagtttaaatctgtcgtccattctccgtgaagtgattggacggggcaagactcaggtttcccatctgttctctgtttgcatttgggcgccatttcaaaaaccacacgggaaaagtttataggcaaacattataaaaagtgacagtctgaagtgctgctatcgctggtttggcaacgtaaagtgttacctgaaatagcttaccatttccaaacccttttgctgtttcaactgtctcaagacaaccctcccgctgagatgggtgagaagtccagctggatgtgtgcagtgaagtcacataagtcacagccttttttgacttttacaagatttccccctcctggggctatcttcacacacagcgaggatttttttctctctgtttacttatagagaggtaaattcatgcagcttgtggctagtggcactctgtgtgatgtcaaatggtctgctgaggggctcggagagtcaggcagcccctgcctcagtttctttctctccccagtcagaggtcctatgagctcccaaggaataacaggatggttttcttagggaaggaaggccaggtcaaggcaggaattactcacagctcatgtgcagatgcctgttgttattcatactatttatttatttgtgttttttttttgtttgagacagtttcactcatgtcgcccaggctggagtgcaatggcatggtctcggctcactgcaacctccaccttctgggttaaacgattctcctctgcctcagcctcccaaatagctgggattacaggcacatgccaccacgcccagctaattttttatatttaatagagatgggtttcaccatgttggtgaggctggtctcgaacttctgatctcaggtgatccactcgctttggtctcccaaagtgctgaaattacaggcatgagccactgtgcctgggctacttatttatttttggagacaggttctcgtctcgctgtgtcacccaggcaggaatgcagtggcgcgatcatagctcagtgcagcctctggggctcaagcgatcttcctacctcagccccctgtgtagctgggactacaggtgtttatcatcattcccggctttttttttttttttttttcattttttgtggagagaggatcttactatgttccctaggctggtcttgaactcctgacctcaagtgattctcccacctcgacctcccaaagtgctgggattgtaggcatgacctgctgtgcctggcccatttattttttgattagctgtacaagtacctgtctctctcatttttaaagtatcaaaacagtcaatttttttttttattttttttttgagatggagttttgctcttgttgccccggctggagtgcaatggcgtgagctcagctcaccacaacctccagcttctgggttcaagcgattctcctgcctcagcctcccgagtagctgggactataggcatgcgccaccatgcccagctaattttgcattctcagtagagacggggtttctccatgttggccaggctggtctcgaactcctgacctcaggtgatccgcccgcttcggcctcccaaagtgctgggattacaagcacgagccaccgcgcccggccagtcgtttttgtttgtttgtttgtttgtttgtttgtttttaaagaagctgcttgtggccaggtgcggtggctaccacctgtaatcctagcactttgggaggcggaggcaggtggattgcctgagctgaggagtttgagactgggctgggcaacgtggtaaaaccctgtctctactaaaatacaacaacaacaacaaaattcccaggcgtgatggcatgcacctgtaatcccattactccagaggctgaggcaggagaatcacttgaacccaggaggtggagcttgcagtgagccgagatcgcaccactgcactccagcctgggcgagagcgagactccgtctcaaaaaaaaaaaaaaaaaaaaaaaggccaggcacggtggctcacgcctgtaatcccagcactttgggaggctgaggtgggcgtatcacgaggtgaggagatcaagatcatcctggccaacatggtgaaacccaccccgtctctactaaaaaaaataccaaaaattagccaggtgtggtggcaggctcctgtagtcccagctactcaggaggctgaggcaggtgaatagcgtgaacccgggaggtggagcttgcagtgagccaagatcgcgccactgcactccagcctgggcgacaaagccagactccgtctcaaaaaaaaaaagaaaaaaaaggctgcttgctaacacgctgctggtacttcccaagtatttgaaacttctgggagaaaattcacgtggatgcaactgagctttatgcagcagggctgcagtagtgtggccacggcagtagaaacgagtgttgagctgtgtcccaggaaggagacttggtgccttgtttgtttaccagttttaggaaacagtgacaaagattggccaatactactgtgaagcttgcttgcttcttttcgacttttaattcatattgtgaaaaatacatggaaacatattctctgtctgtggaagcctctgaaagagcatttgtgcatagcaaggcggcttctggaaccttctccccattgcgttttggcaggagatgagggagatgttgggctgtgcacccctggtggattcgcacaggaaaggtgaaaagtatgccacagcaatgggaaaaagtaaatccaggaagtgctcacatgactataaaaggagttatgtacatttcctggggaattctttgctctttcacagagcaggctgtgcagcctggtggagtcagggagaggttgtccatccatggggggtgaccagagttagggaggcccctttgcacatgcaggcacaggggattctctgattgtcctggctccgcgcagcctggggccaggtcagtacaactgtggggatgaacatggagggctcagggagtgcatgtttgcagggagtgggcagcgggtcaggtcacctgcagcattcaaacccagaagagaagctaagccctgtggacggcaaatggacccaaggacacgggcagggacagagctgcttccactgagccagctgttgtgcttgtgttcttggccccctggccggggttgtctttgatatgtgtcgtgtgtgctgggccctgcaggctgggcttggggggccactgggtggcctgggaggctaccagtgtggcatttggcccctccccagcgtatggccccaccccatccctgcctctcttcttacttacatcctcctctttttattctccccaacctctttctctcttgtgtgtttattcatgcattctccctaccatgtgcttgcagagtcttctgggatacccaggggtattactggcatgtttactaaaggcaccgctgatccccaaaatgggccctttgtgaaatgaccactgaaggggtggagggaggagtccttgctttctcagtttaccaagacagcagttactggtttgagactttgaagacaggatggcttgatttttatggataaacatcattatctcattggtgtattttagggggtgatattttactatccttgaagcttggatatctagatgacagttttgatctggttttactgggatcaaaagcagttttagtacgtcaagtcatcttaactgtccattgagatgggactcctgtaaaatcactttgtatctggagatagcaatccaagtgttctggctgggcgcagtggctcacgcctataatcccagcactttgggaggccgaggcgggcagatcacgaggtcaggagttcaagaccagcatggccaatatggtaaacgctgtctctcataaaaatacaaaaaagttagctgggtgtggtggtgcacgcctgtaatcccagctacttgggaggctgaggcaggagaatcacttgaacctgggaggcggaggttgcggtgagccgagatcgtgccactggattccagcctgggtgacagagcaagactctgtctcaaaaaaaaaaaaaagaaaagaaaagaaaagaaaagaaaaagaaacccagatgttctgtgattatcctctgaaaatcgtggtgcttaaaaaatcacggcaagcatcttccgccttgaagagtaacagtaatagtgacagtcattagcccgacatgttgtagttgatgatcaggttcatcttcgttggctcattggaatcttaccaataataaaccagtatttgggtactcttaccctgcaacagatggggaacaccaggccaaaaggttaagcaggaatggagaggcgtgggaactcagggcttcatcctcttctcgtccagggcagcacccttcaccaggcatctcccatgtccagctccaaataagacacaggtcctcgctgtcccctgtacttccttctagaacagcacgtggtagtccagcagctcagatacccccagtttcagcaagattttggggtttactgattttaggtgaaggaaaggattctcaatgaaaacactttcatttaaaaacaggaaatcatacatcataactcctcctttgccgggagagagatttttttctgcatcacaattgcaaatgccttgcttatcttttttttttctttttttccccctaatggagtcttagagcattcctctgcgtgacatagggacatggttgcaccttatctgagggtcaggatggagcagattggtgtgtgggtcccaggtgccttccctgtgagggagggaagctttgctgcttctgctcagcggctgccctggtgatcaattctggctaagaggaaagtacattccataacatttctggtgacttgctgatcatgtgatgttgtcataatagacattgatcattttatgacccagactgatccaatgtaaattcattctaacatggtgggtgctgtttcagcaatgagttgttggagacctgggactcaaaggacatctggtccttgccttagccagctgtcaaaggggttggaccaatagcgtttggggccccttcagctctcatgttgagtgaatctgtgactctaggatgttgggagtgggagatgggccaagatttgggaccagactgaatccctgccgtcttctcctccttctcatatttctcttcctttcttttttctgtttggtctccatagtttaaagtatttctattagtcactcaattcagccgcattttgacttaaccagccttgagagacctgctctaagagccttcaaactaagttcccaacatcttttaaacttcgctttgtccttcacttctcagctcaaatgcctgttctttggagaagtctctctgattgtcttatacaacagggattgaaacactttttgcaaaggcaagactgcaaatattgtagggcttgcaggccacagggtttctgttgcaatgactgaactctgcccttgtaacacacaaaagcagcgccagacaataaggaatgggcatggccgtgttctaataaagctttgtttacaaaaacaagctgcggctggcttggcccgcgggccatcatccgccacctcctgccaagggaccagccctcctctgccactgctgtgtgtgcccgtaccttgccatgtccttcttcctaatgcttaagcaagaacactgtattttttgtagattttgtatctatcgtctgtcacccccaccataatggacgctccacaagtgcagggtctttatcttgtctcctcttcctgcggagcttccagaataggcttgttgtatagtagacatgcagtaaataattactgagtgagaaaacaaatgttagaaacataacctgcccgtcagctgggctttccttgctttggggtgcatttgtccatgttacatttagcttctattttcctccttttgttgtgattctctctttgtgttcacgtgctagttggcatctggggcttggcatgcatgcctttggtgatgcccccttgagaagccccgggcctcctgtgtggctgttgatggtggtggtgagggggatttcttgtccccaatgcatgtggcccttgctcctttcacagtgggactgaaacacagattgacttgatttcagtctcctgtgggagatttgttcttctgaggggtgtctaggcaaaacagttgcctttgatcctgccctgatttggtgctgtctcagtgctgggaagctttgcattttctaggcctggaactctgggtcccattcacacttctcactggagggatgaaagcctccttcttgggccctcgtggccatcccagctggccgctccagctgttgttattaataaatgccagtggtgtcctctcaactccagtggagaggttgtgtgggttggatccttgtgggtccaatcccgtgctgcatatctgggaactgtgaccttgtttgacatggccatgtgtctgccaagcaggatggggtcggtggcgggaagcacagagaaccatgagacccacgccttttctctagggtcttggtgtctccgtggggagatgggatgcattcatgagaatatggtgcatcccatgagctggcaaagtgggcaggtgtatggtggagggggagggagccagtgctcttccgcccagggggactgatgcaaggtgactcccatcacggaggaccctgcttgatttgggtcttggagggtggatgacagggaagagagggaggaaggactgtccctacagaagaagcctgggacatgtgtggtgggtgttggtgagcagggtgggactcagctttgtcgtgtggagtcgggggcacacagcacccagcggcttcatttcaggacccctgtaagtgcaacggagactgccttgcagctgtctgggcattttgctctttttgtttttggtgttaaggcctctaggcttttatcattttgggaaaacagcaggtctcagctcacccagcacagaattaggtctctaaaccggcaaagtactgatctgaacatgagagctcatgaaaactctgggtggcaaaaaatcttgtagagggatcccttagttttccttgagtttgagacatttcattttaagaagcttggccttggggcaacagaccaagtctagcacaaataataaagagtgtatgtgtgtgtggcgcacagtcacgtttcacgtacaaatgtgtaaaactcggcattcttacaaataaaacataccacaataacagatttttgcaggtattacagtgcaagcacgctttggcaatcaatttaaacattttcttgtggaatattcttccatgctatggtttggtttgtttctaaagccccataggatgtggaaactaagtcaggacagattttctgggggtatcctctggttgctcttccagatacttcctgacttcctggggcttggggagaggtggatgcctgctggggccatttgcagagcaagaacagcttctcctgggaataagcaggcctccactgacctttgttggacgttctctcctctccctccttcccatctgtctccgtcttctctctcccacctttctgcagagccaccaaccaaataccaaatctctcaaccagaagtgtacgtggctgcgccaggggagtcgctagaggtgcgctgcctgttgaaagatgccgccgtgatcagttggactaaggatggggtgcacttggggcccaacaataggacagtgcttattggggagtacttgcagataaagggcgccacgcctagagactccggcctctatgcttgtactgccagtaggactgtagacagtgaaacttggtacttcatggtgaatgtcacaggtgagttggcccgccagcactatgctctctcttctctgtagccattacatttttttggccaagtgaaaaggtagtgagatctctaattgtaattggatgccaggcatacagcttcatagtttttgaaattcttctttgggacctggtgcaccagaaaggccgatcattaagaatgatagaattcttgtgcacaaagtaacatttttcttaagatagtacgcttttatttaagtaaatacatgcttttttttttttttttttgtaccactgacatctctggcatttagaatatagggttgaaatttggatactcaagatttctgattcatttattagagtttgagtttctctccatgatttccttctatgcagtgagcgggacagaacaggccccctttgtggccgagtttaaagttctgctttcagaatgttagttgacgatgagaagggccacacagggactgagttttgttagggatcaatttctttcttcaaggagaccccgcatactgaaaggttaatgttggaaaaagagtctttgggtgctacacaattggtaaatttgtcaggggcttgaatactgtttgaagcttgaaatccagttctcatatatccaattttatagcctgtttaaatagcgtgaaagcagaaaacattgagaatcataacatagaccaactgtcatcatggagggaaaatttaagccattaaaactatcttaactgaaaacaatcccaggctctttgcgagggttcctgggttgttgactttgctatggagaaggtctcagttgtagataattgcaacctttttgctttgcaaaaaacacatccatggaatatgttcttttgcatacagatgccatctcatccggagatgatgaggatgacaccgatggtgcggaagattttgtcagtgagaacagtaacaacaagagtaagtaactgcccggctccgatggtccccgagagaggagcatggagggaagttctgcctgtcacctgtcttcttgtcgactcttctgcgccatgctgtgtcccgcggcccttgcctttccccgctgtgtctactttcctgactttcaaacctgagaataaaccagtgttgctgcacagccttctctatcgtttgtcctttcttctcgtgtcactggtcattcgtttttcaaagcagttactacttttctttccttgattttcccttttccctttgacttctccctattcagagacataagaatagtagaaccatgtaacatcttggttttccttgtaatcagtgattgtgcttggtttaatccagtggtgtgtgactggggcaattgcctattcttgctctcccggcacattgggcaatatttggttgtcacaacagagggagggggtgctggtggcctttagctggggaggggccagggatgcagagcacagccccataacaaagaattatctggtccaagatgtcaatcatccctagggtgagaaacccggcctcctacaacacacacctcatgctgagtgaaaatgaaggacgtgtgccttactttgtagaccacgattgaaaagggagccaagggtggcttgcttaatgagggccatgaacactgagcgctaacatgggagaggccatttacttgcgaggaagaacatggcgtagcctcttggagctgggcaacctgggtttgaatcttgctccacaacttctgagttgctcatttcacttctgtgccttagtttctttataaaatgggagtaataataataatactattttctggggttgttatgaggattacatgagttcctagttgtatagtgctcagaagagtggttgcttgcaaatgtttattcaatacacaaaatacaatatagcattacttgcattttccaatgacttggctagaatgttcctaaagtgtttgtacatagggtattgggattctctgcttacatggtatattctacatttttcttaaaaggattttagtcaatttggtacatttaaacaaggcctaagtaatataccacacccggctaatttatgtatatatatatattttttcccgagatgcagtcttgttctgtcacccaggctggagtgcagtggcgccatcttggctcactgcaacctgcacctcccaggttcaagcaattctcctgcctcagcctcccgagtaactaggactacaggggcctgccactacacctggctaatttttgtatttttagtagagatggggtttcaccatgttggctaggctggtctcgaactcttgaccttgtgattcacctgcctcggcctcccaaagtgctgagactacaggcgtcagccaccgtgcccagcctaatttatgtatttttagtagagacagggttttaccatgttggccaggctggtcttgaactcctgacctcaagtgatccacccgcctcagcctcctgaagtgctgggattacaggtgtgagccactgcgcctggcaatactttattttttcgagcagtttcaggtccacagcaaaataaagaggaaggaacaaagatttcccatataatcttccccaacacatgcatagcctgtcctgttatcaacatccccaccagaatggtacatctgttccagttgatgaacctgcactgccatcattatcacccaaagtgtgtggttgactttagggtatgtaatcatacagtgtgtagcctttacagattggcttctttgacttagtaagatgcatgtaagtttctctcatgtcttttcatggcttgatgggtcatttgtttgtagcactgagtattccattgtttgtatgtatcaaagtttatttacccgtttacctactaaaagatatctcggctgggcaccgttgctcacgcctgtaatcctagcactttgtgaggccgaggcgggtggatcacttgggaacaaaagttcgagaccagcttggccaacatggcaaaatccctgtctctgctaaaaatacataggttagccaagtgtagtggtgcatgcctgtaatcccagctactcgggaggctgaggcatgagaatcacttgaacccaggatgcggaggttgcagtgagtcgagatcacaccactgcactccctcctgcctgggtgacagagtgagactccatctcaaaaaaaaaaaaaacaaactctgttgcttccaagttttgacagttgcaaataaagctgctacagacatctttgtgcgggtttttgtggggacatagttttcaattactttgggtaaatgttaaggagtgtgattgctggattatgtgagaagagtatgtttagatttgtaggaaaccacctagctgccttgcaaagtggctgcaccattttgtattcccaccagcaatgaatgagagttcctgttgctccacatcattcgatgtgcttggtgttctggattttggccattctgataggtgtgtaatggtattttgttgttttaatttaaatttctctgatgacagatgatgtgaagcatcttttcatatgattaattgccatccatgtatcttctttggtgagatgtctgttaaggccgttggcccattttttaattaggttgtttgttttcttactgtcgagttataagagttctttgtatattttggataacagtcctttattacatctcttttgcaaatagtttctcccctcacctgtggcttgccttttcattctcttgacagtgtctcttgcagagcagaaatttttaagtttcatgtagtctggtttttcttttatggatggtgcctttggtgttatacctaaaatgtcatcacccaacccaaggtcatctagattttctcctatgttacctcctaggagtattattgttttgtattttgtatttatgtgtgtaatctattttaagttaatttttgtaaaggatgtaaggtgtgtgtgtggattcactttttagcctgtggatgtccagtggttctgggactatttgttgaaaagactgtcctttaggtttttttttttttttttttgagatgggagtttcgctcttgttgcccaggctggagcgcaatggtgcgatctcagctcaccgcagcccctgcctcccgggttcaagcaattctcctgcctcagcctcctgagtagctgggattacaggtacatgctaccacaccccgctaattttgtatttttagtagagacggggtttctccatgttggtcaggctggtctggaactcccgacctcaggtgatctgcctgcctcggcctcccaaagtgctgggattacaggtgtgagccactgcgcccggcctgtcttcttaaaggaaaaagataaaatagatattggtaggtgcctcggataaatgagttacttaagtgaagacttagatttgtccctgagtctcctagcagctggggcaaaagagaaatattttggttggtgcagtttttactttttgtcaagaggaagcttagggcagtggttctcaaagtaaagttcctggaccagcagcatcagcatcacctgagaactccctcgaaatgcagattctcaggttcctcctcagacccactgcctcagaaactctggggctgattctgattcacactgaaatgcgagaaccactggcttagaatttgcacgtggaggtctgccctgaatgggagcttactgttagtggtcttgttcgtaaaacagtggataataaggtgagtggaagtatcttctgtgatttgtaccagccttctaaagaggttatcattattgttatttaataaaaagcactgataagtggagcatgtcactcgcctctttttttttttttttttttttttttttggggacggagtcttgctctgttgcccaggctggagtgcagtggtgctatctcggctcactgcaagctccgcctcccgggttcacgccattctcctgcctcagcctcccgagtagctgggactacaggtgcccaccaccacacccggctaattttttgtattttttagtagagatggggttccaccatgttagccagaatggtctcgatctcctgacctcgtgatctgctcgcctcggcctcccaaagtgctgggattacaggcgtgagccacggcacctggcccactcacttcttttggccagtggctctggcatgaagctggaggcaaagatgctgagggcctgcactagacaggctctgtgctggctgctggttccgtccatgccaccaataacccgatcaggtggagagagtatttattcttgctttattgaatggaaaattgtggcttagcaagcaaaagaagggctgcgtttcagttgtaggcctgttgcctgagagcatcctagggtcacgatgggggtggagtgagaatgcttgtacaggtgtttacagctctccagttttactgtatgtgggtgccctcgctatggattgagacatcagattctgtcagcttggtttttggatgcctggggaactgcgttgtcctggttgtcggctacctgcctaatagcaggttaccgtgaaaccatgtgaagcaatagaatgcaacagcaaggtatggattacatgacaggcaggctgagtggttcagaaggattatatgctgtggaccttatgctttgcattgtgaacagtgttcctaactgcccagcgcccatgcagaagggccagggggtagagcacccatgtgatgaatgccaaccaacagtgtacttgccatgccttcaccttgcaagcagggttcttttgtaattagctctcgaatgacagcaactctgcccctgaaatgggtgctctgcagtgattaagggctagtgttagctgtaccagggagatactgctgtgaggaggtgcctctgtttggtgtctgtgaaacattagatgctatttaaagtgatagcggttcttagctggctacttggcctctgccatctgttagtgtgattaggctggtctgattcacaggtgcagcctggggcggctgagattaagcagctgtggcctgtgtggacagaggaatgccacggccggggtaattggcaaggcaggaaaggggacgttgccattaaaacaattttttgccacctcaagtgtcaaatgcctgacccgattaatagggaaaattgcagaagcaccaaattctttgtattttcagccacctggaaaacactcatgtgtccagattgatttctttggtgccttctgattgtctgaaaatgccactggggtgtgtttgtatgttcttctttaggaactttgacaaatgatgctccagtgaccctgtgttgatggtgacgtttttgggcttttttgagttttttttttttttttttttttctccttttggattgagacattgaaaatttagttctgtatcttccagttggaaaaatatattgcaggttattccctctgctgatttgctagattattgatctaattttgttggttaacataagaaggcaagctcagctgcctgctagagtgttttttagattctgtacagagtacgaaaagcttgggtgccaaatacaatggcaaaaataacaatgaagaattaaagatcgggcgcggtggctcatggatgtaatcccagtactttgggaggccgaggcaggcggatcacaaggtcaggagttcgagaccagcctggccaatatggtgaaactccatctctactaaaatataaaaattagccgggcttggtggcgggcgcctgaggctgaggcaggagaatcacttgaacccgggaagtggaggttgcagtgagccgaaattgtgccactgcaccccagcctgggcgacagagtgagactccgtctcaaaaaaaaaaaaaaacaaaaaactgtatctattaacatcatgttgtacatgcattgaaaaacccagccatgggctgatttgattgatctttttaagttggtttcttcatcacagatgtgcagggcattctctggtcatattttagcagctgactagctgatgacctcacatggtaccagcactagatgtttccaagtggaacagtcctgtgatgtcattacaagcctggttgccaggaaataatgctgttacatatgcccctcggtgcaacacattttctccagaaagaaagttgcagtttcatatgctaatttttgaaatgcatccaggttgagggttttgaagggttgagaatttatcctttcgcatagaaaagtataagttaactagttcttgccttccctaggtgctaggtatgttaatgggttatctggcagcaactaggtagatgcatatacccatttgttcgagggatttttattgtttccagcttgtttcggtgattaatgtttctgaagagcttgagacttagtttttgagaagatcatgatggacgaaaagttcaggtccattgcttaactcgagggaagtgatggagagacagttgcatcaagactcttgctgctaaagtggttctttctctcgagtgatgagagaaaaagtaattttctattttggtttcattcctgttgagacctgcagatgcccacactccatgtcagggagaaaggctattttttttggaagtacctagggaaaatgaaggtagttagcctgagattccaaactcatttcattgattaacctgccgataacagttcaaagtcacctttgttctaattgggatttttacttggtagagatcctaagttggtaacagcaggcttcttagttgtgttgaagtttctaggaattgaaaagaacaatatcagtaataaaaacaacaaaaaacccacacaggctttgcaaatttttagaaattccctttgtaatgaaaacatcatcaataagttggtttgggccagcatagcagctcgcacctgtaattccagctagttgggaggccgaagcaggaggatcgtgtatacccaggagtttgagactagcctcgggagcatagcaagaccgcatctctacaaaaaataaaagattagccaggtgtggtagctcatgcctgcagtcccagttacttgggaggctcaggtgggaggatcacctgagcccaggaggtcaaggctgcagtgagctgtggttgtaccactgcagtgcagcctgggcaacggagcaagaccctgtctcttaaaaagaagaaaaagctgcttttggtattttatcacaaatactgttgatggtgttccatccaatggttggactgaatatctttctcagtctcctccttggtcaaacagcatagccaatgattggagaagtttcctttgaaggcagatcttgggaattcccatgggctaactggtctgctagtgggctcagttctttcacttgtggttaacttgcttggttttgaaaacatatatttctgattgaatgcctggctggttagcaagtttttaatgagatttctcaaagccacagacataccccctcataatcatatcctcactcacatctccgtattttgttagatttgttttctcttagtttataccaaactgaaagcagaactgcagggtagtggggagctctgagacatttttcccctgtcaggagtcaaagcattcaaatgtcctgattagtgatatttttaaaagccctaattatagactcgagacagaggctttagtggggctttagagagtttgtgagacttaatctaggagctggaacaggctgtgtttttaaaattttttgcatccataaaaatacagttggcagtcattggtggccgcggctcacataaatcttgaacttttgacttaattaccatgggagagttcaaagggcaggctggagtggttgaaggaacactgctcagggagctggagatgggcctggcctcagcccggcctctggctgtgtgaccttgatcaaatcacttaacctttctggatgacattgatatcatcagtcgttgggccagatggtcaccgaggtctcttttggtacagcctggtaatatgattccatgtttctcctttaaatcattgggccgtgttctctgttttttggttccagagagagagagagagagagagagagagagagagagtagattataaaccttaggtgtcagcattgagatgtgcaagggttttggtgggggcaggcccagcagcctatggtttctcactaagtttaaattgcagggtcaaaagaaatcacataatcctaccatttgttgacagaatcaatacctgtctagcacatagatacctggaaagtatgttcgaactggcggggaccttaatcagtgcaactacttcattttatagctaaagcttttaatagtcatccatccgtccatccatccgtccgtccatccatccatccatccatccatccaataacgcttgagtgcctactccataggctaaagacaactccagctgtaccctccaggtgccctactgttgttggtcagcatcagaaggagtatttttcagtacagagacactaatgttggaagcacacatctatcacaaagaaggggccctgagaaagaataacttggctctagggtgggaataataaaggctgtgttggagtcctttgaaggaagtttctgtgggtttataaatctctctttaactcattgcatcttaaaagacttctgttgtcttaaagtaaaattctacttaatattattactaatgtgcaatgactgttacagtgtagaaaatgataatgagtaggtatgctatatgctggtgatgggatttaattgatgggatgggattgattgattgtggctaggtctgactgttctttaaccagctcattcttagtatttgatgattaggagaacatcattcttgtggtacctattacatcagaaggtctaagaatgtcagagccaaaggaaccatacctctcatcgaggttaatttgtttcctttacaggtggattagtgtcattcattttgaatgccattggaagtttataccacacgtctctattagctgactttaagcccgctcttcatacacctctaaggtatataaagttcagggaaactcatgtgtccttagcttgcagattcatttgattgattgattgattgattgattgattgagacagagttttgctcttgtcgcccaggctggagtgcaatggcatgatctcggctcactgcaacctctgcctcctgggttcaagcaattctcctgcctcaccctccctagtagctgggactacagccatgcgtcaccatgtccagctaatttttgcatttttagtggagacggggtttcaccatgttggtcaggctggtctcggactcctgacctcaggtgatccgcccacctcggcctcccaaaggctgggattacaggcgtgagccaccgcgcctggcctgcagattcattttagataagattgttgagtaaacatccctgttaagcatctactatggacaaggctgatctctgcttcagtagatctttaatttggtacatgagttccttctccaaatgagagttgttaaagctgttcacgagccttggtataaaaggggcttccttaggtagaggagcccgttctaagtgcctggatggtgtttgtctccagctgttttgcagttcttgggaggccctggcatttccatgtgtgtcctttccaactgcaaaaacatacagaggacacaaggctgctgatgaaggaaacacagtagggctatcttatagtattattatttttctagatcttacagattcaaggttcacataaagctagtgtattttaggaagagctattgtaaaattataaaagagttccagccgggcgcggtagctcacgcctgtaatcccagcactttgggaggctgaggcaggtggatcatgaggtcaggagatccagaccatcctggctaaaacggtgaaaccctggctaaaacggtgaaaccctgtctctactaaaaatacaaaaaaaaaaaaaaaaaattagccgggcatggtggcgggcacctgtagtcccagctactcgggaggctgaggcaggagaatggcgtgaacccgggaggcagagcttgcagtgagccaagatcgcgccactgcactccagcctgggcaacagagcaagacgctgtctcaaaaaaaggaaaaaaaaaaaaaagacttcctcccctcccgtatcaagttcattaaacatatttgtgagcttgatatttaaagagaggctgtgtgctggtgtgatgttagcagtcaccagggtggggctggtcacacatgggagcctgggtggagggttgtgcctggattttttatggtggcccccaaccttggatctctgagacctagatgagcagcactgcacccgtaccctgctgtatggctgtgtctgtgttttgcagaagcagattttataggtgtagctttgatgattgaaatatcacccgagggaagtggctacctgccagaaattccagcaacattatttcaccttagtccttaaatcactcccgaggcaccaagacaaaggtgcgggttgcccatgggctgttgccacaggtcaggcctgcataggtgcgcgtggtctgggccggtccctgggctgttacagactcacccatggcttggcccagtgagggcagaaaagaacaacattcctagttccttcagctaaatcccactttttttttagggaacataaaaatcatgcctaatggtatgtaagcacatatctgttgatttcttttatgtaaaaaagaaaagacattccacaggatcagctcagcagtaattgatgttatctgaaagagttactgcattaatatttagctaattcatatgaataggctattgtgtttacttaaacaaatgacatgagtgcagacacctgacagcatgaggtatgcttttcatttaggttagatttgtaaacgtctttgtgtagtgacaaagctcattatttgttttgtgctctcaatggtttctttttagtggctgtggctgtggatggatttttctaagtagaagcttttaaaatgaaagtttattgaaattgtttcagtatatgccaggccctgagagtcttgggatgaatgggaatcaagtactccctggtgaaccctcaaaagaataggtgcgtttatgggcattcaacacccagagccaaatgtctacccaggttgcaaatgcaactggattcaaaggaaggaattcagcccctgttccttctttctcctccttcctcttcttctctcctggcttcgatagttttgcccctcttcccactgtttcagcatcatatgggtgcacctaaatcccatcactttgacacttagataagcacagggataaagatacagcatggccttgtaaagaaatctcagctctacctttgacaacaggtttcaagagcaagcgtgaaggctaattggggtaggtgtttggatgcagcgatttcaattcctgattgtaccctgagtctggctgctaagtgaaggggatccttatcccccagggacgtgctctacacccgtagaatagaggagacttctaaatatgcatcagagacaaagcccctgcctagggccattttgccttgggtttgtgaactgtgtgtgctgttgttcagtctagccttcatcagaaataagcatagttatgaattagccttctacaatgttcaagtccctgttggtggctgtttcagaggaatacagggattttggttactactttgctaagacagaaacatatatgtgaatagttaaattgctgtacagtagaggttctggacaggaaaaaaggaggacgtgtgccttgacccaggctggctttcccggacttcagccttaaacatcagattggtggaaggtacggattccaacctcgtggagaagctgcatcttcttagcagtggagagtagggttgaagatagtgggctctggcatcagactgatgtggttcaaatcttggctgcacctcttccaagctttgtggcttttggcaggttacttaactgctctgtgcctcagtttcctcacttggaagccaagattatgatagtgcctttcttgttgaagcattgtgaagattaatgtgttgacatgtaaaaactctttgagcagtgcttggcaaagtagaagctttcagtcggtagtagtcattcgccattattagcagacatgaagaatttacagtggtattctggcttgatgttgtggcttttatttagaaaaaatatactttactttgtgatttaaaacttttttcttgactttaaaaaatcacttgtatttatgactttcggggacatttggagggcataactttaacatatcatttaattggtagcctcctcttaagttatcattaggtggggtggtagggttatggcattcataaccaccattggaaagaaattttttttttaattaaaaaagttagtatgtatttagtgatacagttttttttttgtttgtttgtttgtatataagttctgagaaatgtacgaatgactctctgggttattttattatattagaatgacaatttatactattgattgcccttaaagtaaggctccaatggataagttgatagggcttttgagaacaacttgcttttactagtgtgtatatgtgatcatttaataggtgtggcaatccaaaatgatctatttttggaggactgagctgtcgcagttgtatatgttgttcatatgtttataaaatagcattttaaaacatgatttggcatgaaattattttctggcatcaagaacaagagagagaaggggcctcaaacacttttttttttttcttcctgttggtagacatgaaccatccctctctgggaccttctgctcagccagctggattagacttctgaaaatattttccaaatgtaaatattacccaaagatttaaaaaatagcctagcatttacatgcaaagcgaaatgatcttacctgtttggagtttactcatggaggggaagctgtccatcagtatacattctaatactgttttccaaaacaggagcaccatactggaccaacacagaaaagatggaaaagcggctccatgctgtgcctgcggccaacactgtcaagtttcgctgcccagccggggggaacccaatgccaaccatgcggtggctgaaaaacgggaaggagtttaagcaggagcatcgcattggaggctacaaggtagaattaagctttcagaacatcacatttcttacatttttgtttatttatttatttacattttttttttgcgatggagtctcgctctgtcgcccaggctggagtgccgtggtgcgatctcggttcactgcaacctccatctcccaggttcaagcgattctcctgcctcagcctcccgagtagctgggactacaggtgtgtgccaccatgcctcgctaattttttgtatctgtagcagagacggggtttcaccgtgttgtccaggatggtcttgatctcctgacctcgtgatccgcctgcctcggcctcccaaagtgttgggattacaggtgtgagccacgatgcccagccctacatttttgtttattttttgaagtgctcaaaagttagcaggaattagaaggaatactttaacaagaatcaataattgtcacaattgcccatgtcagggtttgatattaaaaaaaaatattaccccggacttgcgtgtaattttaaagtacaattcccgtttgtgttgttcttcatatgaggagagtttaataacagaagggtcgaaagttgagagtctgttttctatatgctttatagtgtataaaactaaaacgggtgtggagtttgagaagcgtcagtatagtttccctgtcagagcaggattgcatgaatagtgaggggacttggattagagactggagtatgaaatatgatgcattaagggagagtgcgtggagatgacagtggcaatctgctgtcctccttgaaggattcttgagagcacgtcacacaatgccatgaaattttagtctcatcactccctagggagtttgaaattggcagctgtctccctgcagatgcccgcgcatgctcctctagcctttgttcatccacttagcagacattgattgagcaccctgtgtgccaggcacactcctgggctctggggagatgagagggtgaggcatggccccagctccaaggggctcttagtccagtccagcaggagaggcagaggagaactctggcaatgggagggacacaggtttggttgaagttgcaggaacatgttgcatcccatggatgtacatggaaaggtgatattggattggcgtttggaagaataaggagaaaggaggtcaggaaaggattcaggtctgagttggaaggaaagatgtctcagaaagagagagatggaatttccaaattatttagtatggaaggagagaactgtaataattgagcatatgaaaaggactgaaggaaaccttatgatgaaattctctgatgcatttggaacataagtgggcatattagttacctgttgctgcataataaattgccccaaggtatggtagctttaagcaacatttattacctcattgttgcctggatcaggaatgaaggtgtggcttagctgggtcttccatctccagctgtctcacaggactgtaagcaaggaagggttgaggctgaggtctcattggaagggttaattggggaaggaactgctcatgtggttgctgttaggattcacttccttgcagagggcctcagttcctcactgactgttggctgggggctgcccactgttccatgccacacgggcctcttcatagggcagctgctgtcatcaggttgagcaaaggaggagccagagagagagagagcaggatcgcagaagtcagagccttttgtaacctagtgttggaagggacagccaccacttttgcttttttccattattaagcaagacactagggaggaggttgcccaaggacctgaatgccaggagacaaggggatcaccggaacccatctgggaaaactgcatggtgggaggaatagaagacgctctttagctcagacctcaggtcctttacagccaggtagggaggattcctcagtagcagcagtggggtgtccaggactgtgtctcacgtgtctttaacacaccagcatcactttagctccatcattgctgtaggtaaatgagcctcctttccacctaaaaatgccctgcaacccttttctgaaatttcttagacagttattcatctttaaaggattattttcttctgcaaaagtttttgcctttttgttttaacacttagaaattaacatctagaggccaaaattcagaggaaaatggggacagcctatgagtaagtttctaagaacgcatggtgggcagtgaacatgtgaaacagttatgaggcagatctgctagcaggtgggtactgttgaagcttgaaagtagaaatactttggttgtttcccacaactcctacttggtggtggaagcaggaggcagggggtgatttgtccttctgttcttagttcagtccttagaccagatacgatgagattcaaaggttggcccttttaaaagaaatctttttgaaaaaaaaaagttaaggatttcatggggggatgctggttagaaaggaagagttaagccactaaaatcacggcccctgggattgtttttaaccaccaaatgctttctgaaactcacataattgatgcagttccaatgatttatttaaatacaatctgagtgtgagaatggtggtcaaaatcctggtggttaactaattttgtcaattaagacagccttgtaaataagtacaaagaggagctgatgaggctccagagacccctgggctcaaaataaatggaaccgacatcattattatggggaaggagctttttgcaaatctgaattagtgattacaaatatgctaagagactaagagggcctaatgagaaaatgctgcctgatttttaacaggtgcagttcagtgttaattattgattccaacatttcgctagatgaagagcacctatgttctaaaagcaaaatgaggactcccagcagaaagcctttagcctgcccctgtggagtgcagatgaccaaagtgattttgttgtatcacgctgagccgtttctggagggaaaaggaaatggaatttcagtgtgtgggacaaaaacctaaaatatattttgctttaccaaaaaaaaaaaaaaaaaaaaaaaaaaaaggccaaaagcggcagagggccacacatttggatgcagtgtgctggcgtggtcctctcctttctggttctctggtggagaaaggctatggctgtagggtggggcggcctgggaggttggcccgctagttgcagaggtggtcagcctaggttgatcaagggcttttcacaacagcagtggcattgaacgttcattttggagatgccagaaactcttagaaattccactgagtcccaagggcttccgggacttgaaaaggaaagacacatttctcatctcctgggaaggttccttcagttacctaaggcatcatcttcgctaatgatgtgttaagccaaccccaggtcctggagtcactggagctcaaagaggctcattcccacctgtgggcctcccccatggggagctccttggctggctatggcctgcgtttgcctcagagagtccttgttggggcctgaccaaggcagactttggggagaatggtccctggtgttgggttttctctctgatattttcttcgttacctacgtagacttaaagaaatgtgcctctgggttgggcacagtggcactgtaatcccactgctttgggaggctgaggcaggaggatcatatgaggccaggagcacaagaccaacttaggcaacatagtgagacccccatttctgcaaaaaatttaaaccattagctgggcgtagtagtgctcacctgtagtcccagctactcaagcagctgaggtgggaggatcgcttgagcccaggagtttggggctgcagggagctgtgattatgcctctgcagtccagcctggatgatagaggaagactctgtcaaaaaaaaaaaaaagaaaaaaaaggtacctttgcacatttgacttcagggaactatattgttattttcattcctcggcacttcctcaaaagcaaagagacctaattgaaactcagagggcctgacatctaactgattcattcctgactcctgtccatttgccactttgctttattttatttttattttttgagactgagttttgctcttgttgcccaggctggagtgcaatggcatgatctcagcacactgtaacctctgcctcccgggttcaagcgattttcctgtctcagcctcacaagtagctgggattacaggtgcccgccaccacacccagctaactttgtatttttagtggagatggggtttcaccatgttggtcatgctggtctcgaactcctgacctcaagtggtccaccctccttggcctctgcgagtgctgggattacaggcatgagctactgcacccgtcccatttgccagtttatttaatgaagaagcaaaatgtcaagttttccaagatacatttttccagaaagcaaatacctgaaaaacttcttcaaacaaatgtgtgttatttctgcaatttttctttttcctttataattctgttcattccataaactatgattgtgctttggtggcctgtccatctcattctttctacccgtttatggattgggcacctcggcagccatcccctgcattacagcttgttttgaaatggcatgcatgtgcggcctataaagggaggagggaagacaaaaaaagcaaaacaaagtcaaagagaattatgaaatgtgacagaaagctcattttcattcaaatgaccaatagaactatttggaattcggcagttcagtcttgtttatcaaagaacccatgctgagccatccttaggtgattaagaatcaaattattatttttaaagtgcatgagcaaagtcttgctggatgttattaatatgtgattgatataatagtaaaggacttgaatcataactctatctccctaatcatacttattcctgggcttttgcgtcagtcttgaccatgggcaagttttttcagctctctgtgccccagaatcccttgccttaaaatgggaagattggctgaataatcctgatcccttcaggctctgagaaccataatttaatagtatcaccatcgtgtagcatcagccatttctcttcttaaacaacagcacagatttttttttttttttttttaataaagaggttaccttcatggctagatatttcacagggctcaggacagttattgcaatttaatgcagaaaagcaagaagctggctgagataattaatagaccacctcaattctcacctccttcgtaggtaattatttaggcatagggggttcttaaaaaccatcttttatgccacttcgaagtgcctgcatagaccaagagagatcgcaggacagagggctcattcaacgtgactgtgaaattggcacagaagccctcagcgttgggtattacaggggttcaggttcccctggagcccctcagcagagagtaaagcattattgagcatgaaccaagtatatttcagatctaagaaaagatgatttttaaaacttttgttataatcactactaaactggttgttttgaagcataggttaattagatttacattttctaggttagttacttagatgtcattttaaagactttttgatgaaatgttatgcttaatccacaagtatgtttagggggagaaatcatgactaatgtacttatcagcatgtttatactttatggagattttttttcagtgaagacatttcagctttaatcccacatcaagcagtctttgatgaggacacaggtatatgtttgtattagccaacgtttatggactgctcccctgcgtcgtgacttaccaggtgcctcccatggagcaagttgctcagtccttccacagcccaaagaggcagacactgttattttgcccttttacatttgagggcttgccctacccctacctcataggtggcacagctgccatttggacctacgtggttttgcaccagaatttatgctcttgctaaactgcttgcttcaaatgtagttccgtgttttgtaaaaacactgttgctgttgaatgagaaacataatgaaagtaatggctccccaaaagcatgcaaagatctagcccatggtatacagttgagagcaaagttggggatatgatgctgttctttcaacttccaagacctctgtgggttatttatttgtttgtttttgagacagagtccctctatattgcgcaggctggagtgcagtggtacgaacatggctcagtgcagtcttgacctcctgggttcaagtgatcctcctgcctcagcctcctgtgtagctaggaccacaggtgcatggcaccacatttggctaatttttaaattttttgtagagacggggtctcacttggttgcccagactggcttcgaacacgtaagctcaagtgatcctcccacctcaacctcccaaagtattggaattacaggcttgagacactgtgcccagctggttatgaggtttttacatttattgtggtaatatatgcataacataaaatctaccatttaagtcattatcaagtttagtaggcattaattacattcatggtgttgtgcaaccatcaccactattttcaaaactttttcatctctccaaacagaaactttgtacccattaagtagtaagtactcatttcccctcccccactgcacctggtaacctctaacctactttttgtgtctatgaatttgcctattctgtgtaccttatataagtgaaatcaggatatttttccttttgtgtctggcttatttcacttaacaaaagtccatccatattgtagcatgaatcaaaactttattcctttttatggctgaattatattccattgtatggatataccacttttttttttttttttttttaagacggagtttcactctgttgcccaggctggagtgcagtggtgcaaccttggctcactgcaacctccgcctcccaggttcgagcgattctcctgcctcagcctcctgagtatgggattacaggtgctcaccaccatgcccggctaatttttgtatttttagtagagacagggtttcaccatgttggtcaggctggtctcgatctcctgaacttgccatccacccacctcagcctcccaaagtgctgggattacaggcatgagccactgtgcccggccccacattttgtttatccattcatctgatgatgatcacttgggttgcttctaccttttggctattgtgaatagccattgtagcaattggtgtacaagtatctgtcccagtccttgctataagtttctctggtatatacctaggagtggaattgcaggaccatatggcatttgtctgttttgcaaaagcaaaaatggggaagatcgtgacatttttaaagagctaagttcaacaggcggtggatgtcctgccgcagccacctttgtgagcaccgacaagcaacgggcctctaagaaaacatggcttgttgtaattcacttcccacctcctctggagagatccagtggttgtttaccgagcagagggaagagtttctgccactggtcccgaggatcagattgcccggccctgttctctggacacctcctgaaaagcaaacttcttgtatcaatgttggagtttaagcattaacaggtgtttgcctccacatctgcatggtggtgagcaacagcaggtacctctgtccttgacatgcaaggttagttggcacaaatgctttcagaaaggatggcttcaagtcccccaggcacctgctgaaagtgggggactgggatgggagaataagattttatgcattttttgttttttgttttgttttgagacagagtctcactctgtcacccaggctggagtacagtggcatgatctcagctcactgcagtctctgtctcccgggttcaagcgattctcttgcctcagcctcctgagtagctgggattacaggcacctgctaccatgcctgactaatttttatatttttagtagagacagagtttcaccatgttggccaggctggcctcgaactcctgtcctcaaatgatctgcccgcctcggcctcccaaagtgctgggattacaggcgtgagccactgcacctggcagattttttgcattttaatggcaactcacctgttgaatgaactgatctgttcatggggtgggtgcctctgtgaaggccaggattacaagagattgctgtcttcctgggaaaattgggtgctgatactggcgggagaaaggcttgggaatatctttctgatatcacatggacacagcgttctacctggcacagaataaaactttgtatcaccttctgcatgtttattctgcttgttatcgaacacctgagtatttggaaatgtctggatttttttgcaatgtggaaggtaaatatccaggtgacagcctgggtctttaacctttcacccttcacctttcactgcggtgttttggtgtcaacaaactaaatctacattcccagttgtcacctgagggtagcctgggatttaataggcattttgggggaatgaaggtaacagaagaattccgaaaaacctgtctgggccaccttgtgtctttgtgtggatagggtgtggaatgttcatggaatccgcttcttgtattatacttgggagtttaggccattttgcttcagtctgctttgtttcaatattgaaatgttattttaaaaaagtctttagtgaacatagttttgaagtccatgctctcctgttctgttacttggcagatgaaaaataatgatgaattccacaaagatttggccatgagcaggaaagaaaaagagtcgtgcttgtgttggttggtgcagaatttcttctctcactggcttttgtgtttgttttgccagatccattggttctgcagggggtagctactattgaatgattatctaaggatctgttttattatacttttttgttgtgtgtgttgagatttctgtttgtttgaaaggtagaaataagaaaaaagtaggcaatacccataatcccactgcttaattatataaagtacattgctaacaatttggtatattttctttctgattttagctgtgtttatagtcaggcttatactttcagttttatatgcatctttagggtggtaaatgtgtctgcttttttcttttttttaaataaattggaatcatgaattaactgtttttcatttatcaataactgtttaatgataccttaccaggtctgaacataatacttcattctttttatgactatagactacgctgtttgaatgaactttccatcagttcatacaggatgaactatgcattcttaatgtctctctccttgacagttttttgctcttacaagcagtgcttgaagcagcagttttgttcatgtgccttgaagtaattgtgctattttctgtgggctagctttctagaagtagaattaactagatcaaaaaaaatgtgtgctgctaattttaataggtaccagcaagttattttacacaaaggtttttctcaatttatgttcccattctcaattggaatcttttatttccctacacattcaccaagtactgaataacattgatccttctaatttttgttaatcagctggtgaataacagtgtctcattattgttttaatttgcatttcccggatcgttaatgaggttaagcatcttttcatatgtttattgggtatttacattccctcttctctgaaagcaaagacggtgtatgtgcatttggcctaactggcaaaagaattgtagcactgaaaatctgaggaatttagaaacacgcgttgtatatattacgtcggaagagtggtttctttaggtttattctgaatctccatatggaaatagagtaatgaaaaaaaacccccaaactttgtgcttttgtttgccatctttataaagttaactattgtagtttcttagcttgctattaagcaaccactaatcaatggtaggatatcccctacaaaagtgtccagcagtcccactgttggtggatttaagagcatccatttggaaaatgctacagctcataaaatttgggtcaataaatcaaatactggagcaatggtgtaagaaaataaatattaacagcactgcatggggcaatattgatctagtaccaagatttctggatggacagaaacaccctgtttggtaattgtgcttctcattgtaaaaacatttttataaacgttaacttattaatatttgtagtgcatctccaggaagtaaatattcagagagcacgtgctcttgaagagggatcttgtatggaatgccatggccccagtgagagacttgagctgaccatatcccctggggttaaaaaaagggagcagtgagccaagctgcatatgccaagatttaatgtgtcagccgagtcaggcgatgtcccctccctgtgcagttcaggttcagctccatttggaatactccatgtgccaaatctggatccaggcacaagaaagacattgacagtttgaatggggtccagagacaggcactagccgtgattaagggcttatgggcatgacatttgagcgggggctcaaagaactgaatatttacagcagggataaatgctggattacatggcttggtgacgtggggacccgtggctacatccctaagttacctgccacatgactggttccccgtaggcaaagagagaatcatttctgttacccttgagagcttgaggtgaagggagggtctccttttgggtctgtggacctcaagtaaaatcaaggagcttatacctatgtgtcccatgctcttagcataacgatgccgttgtagcacccagggatccaggatttaggtagggaattctcattgcgctggaagatttagcatccatatctcctcctccttcagaagacacattctgcatggaaggtgcttatctctcttaaggggagacgcgctagcatgttgtctgggtcctgttacaagtctacggctcaaccaagagcagaaagcgagtctttgtcatacagtaaagactctccactgtcgatcagatgcccgtagattcatttttctgccagacattttacctgcgacagtgaggatcagtttcccatcaccagctccaggctgttagactctgaaactaccttcgtagttgtcgatgactgcagcagcccagcaaagtggctgaccagaactatcttaactcactgcttgtactctgttaaggaggaaggaggccaaccttcatccagtgatcctttctaagactgtcagtgatgagcagcgacctcgttttagaactcagcagcagtacctccaccctgcagtcatggcttgcatagaactgagtggctgacatgaaaaccgtggcactccagtgtgctcttcgcatctcttaactctgttggcaggctaatcactggcgctgctttgcaaagtggacagctgctctgccctcctgtttttatagtggagtggttacgagatgattttctttattctctagtttcttatatcactcatgtgcttgcagatgctctgcctgtatttgttttttatgtgattaacccaaaaacacttgcaatgcccagggcatggctcagaaggtcagttgaaattcctgaaatgatagctaaggttagtaggccttgactgtttattttttcatttcgtttcactggagtgccttgtccaaaacacctgtagagaatgacttggattcagatagaaatactaaagcctcaaaccctgaagatacaagatgttgcattttgtggtaaggaaaactctcgcaagtttgaaaatttgagtctatggaaatatttgaaaagcagggggagaacataagaatggcgtctctttgtgtattgatggtaccttgggtaggagtcacaacagctgattttcacatgtgctgcttatctttgaaaagtctcaagaagtttgtgaacggacggatatacaacttgagttttgtaaggattcattgccgccatatttggaattctgggtatttctctgaggaacatgtatatctattcagccacaaccagagatgggaagggcagactgatgttcccagctgaaacttcttgagacatccagacaacatctgagaactatgagccccttaggagaaatgaattagctacggcagcacagagggcttggagcagtgcctggcatatagtaaatgctcactataaatgttagttctacatggttctgtgatgccatagaggctgaggcttcctagtggatgggcaaactggtagctcgcctgcccgtggccattggtaccaggctggctggtgttcaggctccctggccagttggcctctcctagaggagccctcaaatccattatggtaacagacccacgctgtacactgccgaatactcctgcagatctgaatatgtcaatatttgcttcacaggtgttcaccatgatgatgatgatggttttcatttctcacgattcttaatgacagttatcaatttagaatttaggtgattcttccatacctttcttgcctccttcagcttctttttaaatcaagaaagcacagtacttggtattctgtgctaggattgttaaataaccgcctttgctttgatcttttcaggtacgaaaccagcactggagcctcattatggaaagtgtggtcccatctgacaagggaaattatacctgtgtggtggagaatgaatacgggtccatcaatcacacgtaccacctggatgttgtgggtgagtttgcctctcctcgtgtggcggctgcataccagcccattcttgcttgactcgtttgaaagcatgaacgttaagtcctgtttctcccataagtttcaggagaattggttcattcttattctttctactatcattttacaaggctgcttctgtcatctgacaatattctgttttccaggcagccagggtttatgagctttgcatgatcctcatggttcccaagcgtcatctgtgtaaagtggacgtggtatgaaatgtctgacattttggaagctgagattactctgaaaatgttaattgggcaggtgaaaagggtacagatgtgctgtagcagacctttggttttaaaagagaagcatcatttccccaacagggcaactgtagaaggccagctgaagagtaaaggaaaaggtctgaggactgagcctgtggctggctggaaaaaggtgaatgttgagggcccttcacttccatcacaagaaagtcattagacggtaccaattcagtgtctgttcctggcatctatttcctctgtgcaaagggaaccatgtatatgagcttataaatacatttttgtcagagtgcacagataagtaggccattttaattaaacattgaagaccacctcgcctgttgtcttggaaattcaagtttcttcccaggttttgcctgtgatgatggggctttgttgtaactaatgaagaaaggaggtttctgtgtcttggaggattgctaacatatggaactctacccaagacatacttcattgttgcaggatggcaggttaagatcccttccatgtaggggccatcttttctctttcctgtcatgtgccttgactttcaacctgccaccttgagccctttcttttggtttgtcctcccctaaatacaggttgctatcttctgctgtagactcaactcagttcacactcacgttttgccgtaatgtgactgttggtaattccacaagcccacaccacccactgtgcctctgtaaacgaagtgtctcctacatcatagcctgtgcgtgtgtgcctagtatcatctcatgtgtgggtctccttcaataaaacatctttgaagagggagaccccgttacatattggaattgcccaaaaagccactaaaaaaataatccaaaagcttgattaaccaaattgcaaagatttggttaattaaaattttaggttaactgaaaagtaaacaaaactattttgattttctgtcaagttaaatggaattggatctacgagacactctgccttagaaagcatgatataaccattacttccatttgcatataagcattcagggaaaatagtgtttattcgaagatttgagttttgttcttcagaagccttcatgtgaaatttgataggtccttgaataatgttgatcctatagatattcataaaagagtgagttttagagctctttccccatagagaaaacatgtggcatgtttcttagtgagaattaccatgttcagatattttacaaaacaaacaaaaagagaagtaacactcaaatttgagaagaaaatgattaacatttgtgttggcattgatacactgtaaatccattgatcaaagagcatatgacttggcctttacctgggttcctgtgtgtaccgaatgtgacgtaaaactatttctatttagggaaagagagattttgggctaaatgttctaaatacctaattttgaaattaagtaatttattgtgggaaaaaataattgagctatagcagtcttttgggattatagctttgcataggtctacaaatcattcattaggctgggctggggccattctaggcatcgtggagtcagatggcggccactccggtctgggctcttgcttaaagcaagttttaggttgagttgttatgtaaaacattcaaaagcccctcaccccacctcccctttgagctttctggcggctcatccctgtgaagccctgaaatctctcttagagtttagggttgggatttgaattgggctgctgaataatggaattgtgctgtctaatgttaatcccctggcaatcagtcttgttgaaaagagcgtatgattcagtggtgtaatgtagagagagcgtggagtgtatggagtaatgcagagagaggcctgattatgtcacaaatttgggagatcgcccagctaaacacgggccaataatgacacaatgctggttgggaatatccattaaagctcaactccaataattttccaagccttgaaccttctttataaatagaagccaaaagtcagtggagtaaaaggcattttcagtaaagatggaagtgtgaaatactctcatctctgctcaaaaccctagtaattgctttgcgaagcactaataaaataagaattgagtcagctaaagaggctcatatagacgtacagggttggcagtcattctgaacatctcagcaagtggaaacaaaaaggattcaagcttaagcagtgaatttctggtagcccacaggcccaaatgtgatacactgctgtgtgataacagcttttcagccacctctctgtttcacagaaaatcagaaaccctttcccagtgaaagcgaagtcccattcttgcccacattctttggggttttatttttgtttctatgatacatagattgtggttcagatattatgaagcatcaagatgggtgagatctttttattgaaattcttccttggaaaggcattcccataagcactttaatgtaaaagccgtgtaatttaagtgacattcttgtgttctagaattaaacggcaagccattgttgtgtgtaagggaaatgctttcatttatgggagcccttttaggagcctggcttgatcctcattaaaattgacaccattacttttcagctatttactgcaagggaaaattagtgtgatgctccacgttttggtaattgtggcgataataaaatgggctcccctaaagtagctgtggctccgggaggtggcgagccttcaccatcgttcatcattgagtggtaccagagccctggattctgactgaggtcctgtcactgtgaagctacaatgctgggatgactcattgcactttccttgtgtccaaaaatgaaggaactggaactcatgaatgttagaacaaaaaaagcggcttatgccgtggaatgaacagcaggtttgtccgtggccatacctggggcccctagtgaattgggacaaattatttagcttttctgaggctctgttttatcatcagtaaaatcggaatgatgatacttacctcattcctatgatggttgtattaggtttcctagggtacccctaacaaattactataaactaattggcttaaaacaaaagaaatctattctcttacagttctggagcctaaaaattcaaaattaaggtgttggcaagttccacgcccctctcccagcttctggtagctgtccttggcttgtagaggcaccgctccaatctctgcctccatcttcatgtagtcatgttctcactgtgtgtctcaaaatctccttctgtcttcctcttgtgaggacacctgtcactggatttagggcccaccgtaaatccaggatgagctaaccttgatatttttaacttaagtacttttgcaaagacctttttcttcaaataaggtcacattcctagtttccaaggcttaggacgtggacgtaccttctcaaaggtcacccttcagctcactacattagttacgaggcatcagttgggttagcagatgaaaacatcaggctggcaggtaggtggccagcaacaaatgctggtttcctcccttccaaaccaggattcttttgagggttagaatggatctttaatagcttttattagtctcaatcagaagtcttattaaacaaacagaatgccattttggggctgggcatggtggctcacacctgtaacctagcacttggggaggccgaggcgggcagatcacctaaggtcagcagttagagaccagcctggtcaacatggtgaaacctcgtttctactaaaaatacaaaaattagccgggtgtggtggtgggcgcctgcaatcccagctactcgggaagctgaggtaggagaattgctttaacctgggaggtggaggtggtagtgagccaagatcatgccattgcactccagcctgggcagcaagagtgaaactccttctcaaaaaagaaaaaagaaagccgggcgcggtggctcacacctgtaatcccagcagtttgggaggccgaggcaggcagatcatgaggtcaggagttcaagaccagcctgaccaacatggtgaaaccccgtctctaccaaaaatacaaaaattacccgggggtggtggcaggtacctgtaatcccagctactcaggaggctgaggcaggagaatcgcttgaacgcaggaggcagaggttgcagtgagctgagattgtgccattgcactccagcctgggcgacaaagtgagactccgtctcaaaaaaaaaaaaaaaaaaaaaaaaagccattttgggacctacagacgtggccagaggctgacattgacatttcctgctgaggtttccacctttgattaatgctgtcatcaaggccatcctgagactgatttggctgttggacttgcaggagaggggtgtggagtttgaggacttgaagttcatggagttggcttctttacgcccacccctcccctcccccactttgcagtggaggaagttcaggttcagctggggtaagtgatttgctaagtaagggcttggagcaggcattctggagctggggcctccatctgggtgttctccacgcctatctgtatgaatgctccttgctctccaagcggacttcttcatttgatgttcactgtggtgtgtttcagtagtgactgccacagcccgactctaaggaggtgctgctgtcaccccaccctgctttcagttctttgctgcagaagacagaatgtgcgggagaaagatgggaccttaaaagactagttgctcttcctcactcatgtagacgatttggctttgaatcgtgaattattgcttcttttgggcattccagttctgcatttccagagaccctcaggtatgtcaagctttttgcctggcatttgatattttgggggcaaagtacagtggaagtggaaatggtgcctctggttttgtcaaggccagatatgtcttctctccactccttgtgttttttgagacagagtcttgctttgttgcccaggctggagtacagtggcatgatcttggctcattgaaacctctgcctcccaggttcaagtgattctcctgcctctgtctcctgaatagttgggattataggcatgtgccaccatgcccagctagtttttgtagtttttagtagagatggggtttcaccatgttggccaggctggtctcgaacacctggcctggagtgatccgcccgcctcggcctcccaaagtgccaagattacaggcatgagccaccgtgcccggtcttttatcagtttaactttccagaaatttgttccccctgcctgtccgcatcccttcaaatgaaagctgtaagcagcaggcagttgttgtttgggggcccatcagaggccgcatgtcacttctggatgggtcaggcatcactaccagccctgacttgatggcggcagatcagcatggcactgtcaactagcccttgacataaatctgttgtaactcagccccagacatgataggacacagcctgaaagcgcacaggaatccgtaccagagcgaagtcccccctcaggtgtgtgttcaagaatgaagcgtcttttattccaagcactgactgataagctcgaatgtggagttgacacctggaagggagttttgggagcttttggcagcccatccccagtggaagaaggaggaatggctgaaattgttgactgcttggggcagcctctgtcccaggaagacaaaggctccagtgtgatagctgagctggggccaggggacggaggcacggcggagtccctcaaaccacagctggagtgtgaagtttggactgtctcctgggttgggaacaaagtagtggttaagtaaatgaagaagcggtggcctagttaattaattaacctgttaattcattactgaagctgtcaagattcagtcattcctgctcacttgctcgtgatggaaggctgcatctcagtctcggcttccatcacactgtggcttctggatggaatttttgtttctgtgtgtgataaggagtggctgtggtggcatcatttaaatgacatgattctgcacgtccagagacgttaggatattgaaagcctgaccattaccttttaggttgtcatgcttgtacctgttcctggcacaaggtctcggctccgtagagccctgtggggttctgaacttgaagcctcttgacttagaggcttcctggccagggctcatttgattttccatactcctgactttgctgccagtgaattcttttccatttcttgctctgagtgtaagacttggtgtcctaccctgacacgggctctgcatgccagctctagagttgcgaaatctcaccggaggggggcagaaagcccctctgttgagaagggattggggtggcgtgccaggtaatgggtcacagcgacagcctttctaagtgggcttatttagttgacagatcacggaaccggagcggagttgaggaggaagcaccttccttttgccgctttcgtgtccccagcagccatctcatcctgttcttataaaccatcgctgtcacagacaacccctaagggtctctactctgtgccagatgccctctctggaggttcaggtggaaattacgtggagaggggtgtcaagttctgtttccacccttgctaactctatggccttagaaaaggcatggaacctctgagcctcagtttccttgcctgtaaaatggggtgatgactgtttccttgtagcactatggggaggaggaggtggtaggagaggcagcgcttttaaataatagtaccatgcaactgttagtcgttattgtgcgttggtcccatacttcctcttgcatctccagacagagccgtgcaccctgagcccatcctgatgaaaggaggggtcagtcctgtcctttcctccaggatagagatttcaaaacttcctttggtagctactgtttaatgagcttttgattgctacaaagcagcttttcattcctgtttcacaacagggatcccggggggcaaaggctggttagtggcagctagatcactccaaacgtactgactggcaaatacagactctcccgcagaactgaccccagcaagaagcctttgggagcaggtggtattctgcgggtgccagctccctggggtgggagcaggcacacgccagcctggatggggcatggtagaactctgcgatgtcagcttttttgtcacattctctgcaggctacccgttgtcctttgccccaccattgaggaaggaagccttattgattgctttcgattcttgcagggggcctgggtgaggtggctggagagagggctaatatttggtctggcatttaatcttggcatttcatttatggtgtgggcaaagaggatgtagaagtgttaaaatcaagttaatatcttacagttttatgtaagaagaggttacctggagattcaggtgaggatggggcagagagaaagctgcttctgtcagagcttgggcaaataaacttgccatgaaatgtcaatttagtgatggcagtaagagtgtgcagtaatgtgctggaacttagcgaggtttctatcagcgtgtgctgaattgaaataatcaaaaaacagtttaataagttgcttatatttggagttttgtggttcttaacattgcaaattctgaagcaagaaattagagtttctctctaaactcatttactcatgtggctttatcaacggctgcctttgtaaaccgaaagacctcagttgggaagttttatgagacggagtcttgttctgttgcacaggctggagggcagtggcatgatcttggcccactgcaacctccgtctcctgggttcaagtgattctcctgcctcagcctcctggtagctgggattataggcggacatcatcatgcctggctaatttttgtatttttagtagagatggagtttcactatgttgcccaggctagccttgaactcctgacctcagatgatctgcccgcgcaggcctcccgaagtgctgggattacaggcatgagccaccgcacctggcctgccaactcttgttaagatgtgagtgtggaatgctgtgtgttcttccccttttaaaagatgtgtctgttggtttgctttcacggattccctctcccttaggagacccggctgttgtattcatggtcttcatgcttggtttgttttcacagtcagagaaggtaggatgctgtagggttctacctacaggtaggatgtgctccttacttagagatttggaagggtggcatcagagaaccactgtgcgtctttcatgatagctggtcaaatgtgggtgtctgtgggaaatagatggccaagggtgtcggtgttgctgtggggaggttgttctgtttcctcttctgagaagagacagatgaggcgatgaggcaatgggagcctcattgctttggcttggagggagaaaatagagcagagctctctagctgggattttgtgtatttgctgagttgcagtggttaattctctatccttgaagcacgtggcacgctcacgcagcctttatgtggtcgagagggtgacagtcacttgaatgaggtataaggctttgccctcatggagttcctcaggtcacattttgaggtcgaagaccataaattgggatggaaatttctagatcttgatggaactccaactttttctctctttctcaaagcctctggattacaggattctctcaaacaaggctggcaggaattctgtccatcccaaataagtatgcaaatctacaggtcaaatggtgccccagacatattccccactggatcagggagattgtggtcttttgagagacaaacattgaatattattctagtaggatcttttggaaattatgctctattagaaaaaggaacttttcattttactggttcagtgtacactctggactgaaactgaaaggtaaaggacttagccctttaaattttacattttggccgggtgtgctggctcacgcctgaaatcccagtactttgagaggctgaggcaggtggatcatttgagatcaggagtttgagaccagcctggccaacatggtaaaaacccatctctactaaaaaatacaaaaattagccaggcgtggtgttgtgtgcctgtaatcccagctactcgggaggctgaggcaggagaatcacttgaacgtgggaggcggaggttgcagtgagctgagattgtgccactgcactccagactgggtgacagagtgagactccttctcaaaaacaaacaaaaaaaattaaaatattaaaaattagccaggcgtcatggtgcacacctgtagtcccagttattctagaggctgaggcaggagaattgcttgtacccgggaggcagaggttccagtgagctgagattgtgccattgcactccagcctgggcaacagagcgagactccatctcaaaataaataaataaattttacattttggactgaaaaaacaaaaccattctgtatgtgagactctcaccgagtgttcatagggagggactggggctggggcctgacttgaggcttcccatctggcttggacagtgagaagagcagtggcgtttggattgaaggcttttgtgatctgggtgactattttgaagtttctctttaggtcatgctgtacttagaagtatctagaaccgtgattattttcagtttctgagtttcatctccaagaaaacaaatgggatttattgttcagcctctcatgttattcctatcaaagggaggcatttcttgtttgctcagatgggctgaaagcttttacttctgctcgaaccgccctaggagcaaaacaaggcatgtgagagagatgagcatgatagattttctagacttctctagaagaaaggctttttagatggtgaaggttgatgaaacctgccagcatttttacaatggacatccctctatgtctgcacatctcaatctccttcattcttactagtggccaatatgctcttctttcacggatgtagtacaattcgtttaatcatattaaacaatatgattgttgtgcagatcttttgttttccagtaaaaaaaaccctacagcgacaagctttgtccacacttatttattgggcatctgtgtgaatatttttctaggacagatttgtaaaggttggttaactggatcgtttttgatagatttcagtcaaacgttttaaagctaaggggccttacttacttggagtggttgctgtctttgacggagggctcccctgtggtttggtttttagcttctttgcaaatcatttgagagaagatactctaattgggagttcacccattgtaataagagggtatacctaattcctggacattaaaaaagaacaaacttttccagctcgaaggaaacattttcttcccctgaaggaaacccagctatgcagacaccagctgataatcttgcattcctgaaagatgttgcacccctatggcaagtggcggctgctgaggctctgacgtgactcccaggcatgaacgctctcagctgtgtttacctcagctcctcgggagggagcctgggagactgacgcctgagttttacatcagtgtcaaaacccaagcacaacctagggagggacctcctgcctagtgtgtgtgggtcaggagatagaaaagctctcactgagtaaactggacaaggtcaatatacatcgctgattgagaaggtaggttttccatgaccctagaaattgatcttgttcactctgagatattgtcacctttgttatgtctcctttttaaaaaaaaatgtggtaaaatatacataacataaaatatacctctgtaaccatttttgaatgtgtaattcatttacattaagtacattcaatttgttttgcaattatcattattgttcatctccaggacttttccatcatccccaaaccatgactccttttagcaaaagagaccaatttcgaacgtaaatttggcataataactctctggttaccaaagaatcttcagttctggtgaaactttttgaaggcagagagctcagagtgtcttaaacacttggggtgtaaataacacacagccctactcctgtaattcgcccaagaagacccaaattgatacccagctggtagaagccactcaaccccaagccaaataatacagcctgtaacattaattagggaaggtactaataatacagcctgtaacattaattagggaaggtactttgcctccacctgctttggtcttcccaggccctgagcccagccagcactttactctcttcttcacttcatcgagcaagcacaaaggcattagtggtgttttgcttctagcatttcacagggtgcagcctccataagtcactttgtgactttagtgctggagggaggacacttcatttttacccaaacaagtttgttccgcagacttcactctctctgcaaagagacgtgtgtgttttagaggaagtgggagccccagccgattctgcaagacttccgagagtcagatatccagacggaagatgcggacacctgggtgaccagacagcgaagaggaaagaacaaaacgagcatgtgccaagcctgtgagggagaaagggcaacaaaccagtgaccttccacagaaatgtgtttaaacaaaacaaaacaggtgattctgggtgcccagcatcccagcccactcatctattctaggaggtgacaagccaagatactggctgtgggcacctgggctctttctgaaggtggtcttcctggccgtcatagcgttccctttttctgctaatcatttttagttctgaccttcctttgtgctgatcttcagaagctggagaaagcttcgtatttctgggaaaacaaaacaaaactcagaacccaacgagatttagcctgtcaggcttgagtgcgttaggtggagtcttgacaaggcaatgaactcattctactaattgtaattagcgtggggcctttagcaagttctgggctcctcagacttcagagagctttgatcggcctcctcctcctcctaataaccatgcctcatgctaactggtttagtgcgtttttatgcaacaaaagcaaccaccgcctactctttagaaaaaagctaggcaggctttagaaaaagaattctcagttgttttcacttgtcctccaaatcgcagaatgttctttcccttttcagctctttggcgttgctaagagactgccattttggaggaaaggtaattaaattttgattttaatttaaagacagagcaagcgaggttatccacgctccttacatgaatgggggcctgagagcaggagactggctgtttccagatcaatactgggaactccgtgtgattcgagtctcttggtgtgtgactgccggagagaggtggctttgaaatggctctttgtggcaagtactgcctaacttttggggagaaatgctcaggagaccagtgtgagccgggaaaccagccactctgtgcttgattaatttataggtgtaatttaagagcctggttctccttctgatccccgggatgcatgtttactgagcctgtagacatgaggcctctcggctcggtggacattttttatggcctttgctatgtcagagcaaaagttgtagatctcttatgagcaaacatattactatgtccagaggaggactggcatgttataaaatttcaatggtcaattaacaaagatttattctttgtcactcaggtatttttttcctctctctctctctctctccctcaataatgacctcttggaaggaagcaggctgtgctttcctgctgcagtctttaggtgggttatggctcccagctacagagcagggcttgacagagcccatcctgatatttcaattcttagcagctgggctttctgctttagtagagtggacacttgaagaaagggggcgagaccgagagtgagagagagagaacgctgggagagaatgtattttttaaagcacttcagcctgtgtttactacgcgtttatttggtggaacctcattccagcagtgcagccaactgtcccggcagcagtggccgcaccctttggactgctttccattccgtcttaatttggaattcacacagccaccttccaatcactcttttgaaggttctcatcttgttccaggtccatgcactgtgcatttgcaacctgctgaacctcagaacgtctattcttatatgtgtatatatgtaattaaaattacagtaaacagaggagctactcatcagcctattttccatgtgtttatctcactccctttgtaaaaaggaaaatctgttttatataatatctgagagttaaacatgctagaagagaatcttgcctaaaactgtaaatccttcctgtccttcctggtggagaagatgtgatttttgttatcacatagaagaagagatgaactagcactgggctttagtctctcgcccagagataatacatcaggggattctttttatatcagtttgttgcaaaaaagttgcaaacttgaggggtttggtttgcccagggaccggggaggttcctggtggggagaacacatgagctctttgggtcatcgtcccctttgtctctgccgtagtgcccgctgggccaggccacgaagggggcccccactctgcccagcctgcatcctcgtccaccatctgcaccctgccatcacctcggtttttcagaagttaggaaaggagtccaggcgctgtcatccacttactgttcactgtttctgaggttcttagggattccgaggggtggtggatcgctgaagggttcgagaggaggagcgcagcgttcggcagatgctggcatcctgggcccttttccaagacgtccaggcctcctcctccgacttgtttaagggcagagaataaggttgcaaaggaaatcaaagcctgatgtggagaaatgaaacatgagacctactgactttttaaaaacattttaaataacattctctaaggtttcattttatactgaaggcagctgtaataagtttggaagacagtgtaaggtttctattacagaacaatcctgcttgcagtttttctaccagaagtgagaaagggcggagggggagtggaggtggttaagaggttattttgtataaggtgagaaaatttgaaaagatgaattcaagactgcaagcgtgtaacatttggtatgctttaatttgcaaatgcaataacattaaaccattgcaaacttggggggtgtgtgtgtgtgtgtgtgtgtgtgtgtgtgtgtgtgtgtgtgtgtgtacatagccgggatagcattggaataacttaataactggagctcagcagcactttgaccacaaggaaaacaagactgcagctctgtagtgggccctgccagtgttgcctcagtgactaaattccctgccgaagcctggcgcaggccagagatgtcaggcgggatgaaagcactcattgttcacggggcatcatggtttggtactgcatgcacaatgtttacttgtgaaacgatttattagaaacaaatatgtttaagaaagaggacttggtttgaaactcagttgatctggcttatgacatttaagattttatgacctttgtttctaagaatagatgtgtaggcccactgtaaatatttatcttaaaacgcacccacactacacacacacatgcatgtacaagtgcaaaactggaaaacggagccagggcatgaattgatactaaagttcacatttctgtgtgaaggaataaaccttcttactatttgctaggtgcataggagcatagtttgtgaccttgtctggcaggatctagcccagaggacagcttcccctcgtgctgtgaagtctcttggtaggaggcctggggaggagaggagcgtgtgtctgttcgtgcgcggacttaactctgcccttcccacatggatgaggccagctgggattaaatcagacctcggtcactgcccgctgtggacaggtccctggggtgtccagccagctgctaggcctgaccaggaggcttgctggggcccatccctgggtcattgtatgagccagagagcaagggtttcacctgacgtctgaaggggcccagctttgagattttctgcccaccaacaccagaagtcttaacttcaggttctttgctcagcctacatgggcaatataggggcagatgaatgatttctttgcggctccagtatccttatctttataatgtgaaaacatagatgtctgtaaagtgatgggagattctggaatgaaatgtgctaagagtaaccactagcactttttctttctttttaaagaccagcaacaggcttatgcagtaaaatcaatttgcacatggtctggctcttgtccaacaaattccactagatgatgttttaatctgaaaggtccaatgatgtagatatctattgttctaatttgctgtttccagcccagtgcatggggattctcaggtacagtgcagagacatccttggtgtgctgagctggctgagttctcctcatttccctcagttgttttttaacactggaggttagggtagtggtacccacacctaggggaggaagagagggaggaggctggtaagtgcaggcctgttgggatggagttgtattcatgaatggacacatgattgtgttttgtgtggcttttgacagatctgtgtaggaaggttccagtaagtttgtacgacaagatcaggtagcagtctggtggtctggtggttatttaattctttttattttatttcattttattgttgcaagaatgctaagcatgagaactaccatctcacctaagttttttttcttttctaagacggggtctcactctgttgcccaggctggagtgcaatggcatgattgtggctcactgcagcctcaacttcctgggctcaagccattctctcacctcagtcccaagtacctgggactacaggcatgcaccaccatgtctggctaacttttgtattatttgtagagatagggatcttgctatgttgcccaggctggtctcacactcctggcctcaagcaatcctcctgcgtcagccttcaaagttctgggattatgctcaaaggcatgaaccactgcgcctggtcttcaactaagttttcagtgtacaatacgttgttgttgactataggcacgatgctgtgcagcaggtctctagagtttgctcatcttgctttactgaaactttatgcctcttgattgcaactcaccatttccttccctgtcccagcccctggcaaccaccgttccgctctttgattttatgaatgcgatgaatttagatacctcatatcagtggagtcagtcagtgtctgtctttctgtgactatcctgtttcacttagcatcatggcttccacgttgtcacatattgcaccatgtcctccttcttcatggctgaatagtattccgttgtgtatatagccacattgtaaaaattaatcctttggcagacacttagattgattccatttcttggctattgttaatggtgctgcaattaatataggagtgcagatcctgattgcagttcttttagataaatagagaagtgggattgcaggatcttagggtagttctgtttttaattttttgaggaacctccatattgttttccatggtggctgcatcattttatattcccaccaacagtgtgcaggggttccagtgtctccacatccttgccgacacttgtcttttttttttttcctcccatcctgacaggtgtcatgtgatagctccttgtggttttgatttgcatttctctaatgattagtgacattgagaaacttttcatacacctagtggccatttgtgtcttggagaaatgcatagttaagtccttagcccatttttccatgggtattacttaacacttgaggagtctcatgtgtggttgctagcacaccttggcttgattgtctccacagaagttttgcagagaccgcctcttagctggagagaagcctttccaggcataagatgagagggtgtattctttgttgagaacgtgttctcgaaggagagagaggcaagacaagtgaagctaggaagtaattttgggataccatctctgcccttttatagggcagtctaaaacatagccaggagttggaaaccagcatctccttatgtttcattcagtgccatattggaataagctaagaaacatctacttgtgcatttagtaactggcatagagtaacacctgatattcatcaaagagctaaatgggtgaataaagaatgaatgaatggagtgaattccacaataaagaggtgaatcccattattaatcaaatctgttcataactttgggctttaggctttagtttaatttttaaaacaaaggttggaagtcttctcagagcatcttagaaatgtactggagccgagcgtggtggctcacgtctgtaatcccagcaatttgggaggccaaggcaggtggatcgcttgagcgtaggagtttgagaccagcccgggcaacatgatgaaatcctctttctataaaacatttgaaagtcagctgggcgtggtggcggttgcctgtagtcccagctactcaggaggctgaggttggagaatcacctgagcctgggaggctgaggctgcagtgagccgtgatcatgccactgcactccagcctgggcaatgaagtgagaccccgtctgagaaaagaaaaaaaaatgtattgggagacatgtgcctattgaaaccatttttggtattcagagtgtctttaaagttagtcttgtcatttgcctgtgatgttaagcttgtggttgaggtgagtttttgagattatctcaaataggataagtgaagaagcttccctcccctaccatttgtcacttagattgtcagagtagaatttcttcccgtattcatcaggtggcagtggacagccaataacctgggatgtaataagttcttttctcaattttctaagtaagtgttctttttacaagggtcgcgctccagcagtctcctttgaagtcgtttctgttattcatggggccacagtgttatttcaaaggtgtcagccagcaggcttgaggcttttctggcatgaggtcactgacagccctctggacaacacaacttatttattggtctctcattctcccatccccactcctcctttcttccctctctccaccagagcgatcgcctcaccggcccatcctccaagccggactgccggcaaatgcctccacagtggtcggaggagacgtagagtttgtctgcaaggtttacagtgatgcccagccccacatccagtggatcaagcacgtggaaaagaacggcagtaaatacgggcccgacgggctgccctacctcaaggttctcaaggtgaggactttctgaatctaaaggtacccacaactggggtctccttcatgggtttggccacaggttctttgatttcctgttggagttgagagaggatgattctcttttttgactagccagcagagagtgttctaaggaattaacagatcattacacttgctagtagaatttcagaagggaactatggagtaggggaagaactactaaacttggggaagaactactaaacttggagagagaatagttcagctatttatcagccctgagatcgcagacatttaggcttagctgcgcctctataaaagtagagatcatgatactctgtcccccatagggcggttgtgcagaataaatgggatggagtggatggaaagagctttgtaggctcaaggcattgtgccagtgttgattgttactctgatgttgttttctattaataggacattaggatccaattttagtagccacgttttagaaacaatttggattttttttttaacaaaaacaaaacaaaacaaaaccctgacctttgaaatccattcagaggtgatttagacaataaactctaggtcatatttatgcaccagtgaaatgttgaacaaggaaaatatctttccctccttatttcttatttgcaagcccccattttcatagcatctgcctcttttttagatctaggtttgctcttcaggagactgaggacaggggcagctaagtctgtacagctggctcttaactccttgcctaccacgcctcccatgtctagttgctcatggagaatgaatgtccttaagaagaacattcttccagtagaaccataggtgacccagctaagaactttcagccaatgaagtgttctcaccagctaataattccaaggatcaaaggcattgggaaaagatgaccaacctggggacccacccgacctatccagttagctatcgctcacaccctcctgcccttctctccaccaggtctttccgttgtccaccactggactgattttgttctttaaaatccgcagccctttaatgccgctgtttagacgtaatggagtttgttttcttgcggtgtgttggtggtgggaccatagacaatgctaagaccttcctggttggccgttatattgttctcctgtgtctgttctagcactcggggataaatagttccaatgcagaagtgctggctctgttcaatgtgaccgaggcggatgctggggaatatatatgtaaggtctccaattatatagggcaggccaaccagtctgcctggctcactgtcctgccaaaacagcaaggtaacaatgctttcatttttgtctttttttaaaaagaaagctggatatagaagctgaaaagacttggtgctttgggagactgcaggcagcttataggataactcttgtggccttggtatatttataataatctttcttcggtgatgcagctggtatgatgccagtagccatggaaaaatgcccacaacgttcaaagtgcttgctccaatttcttctagagattagcctccacccccacccagtttttaagttgttccttctggttgatcttgtttaggctgcacatttcccatcattactgcacattaacaccatttaaaacacacgcttccatgcctgtttaatacggggcatttgagtatcagcagagtttgtctccttctacttcaagtttttagggaaatattggcaagatgcaatttgttcaacaaagcatcatttctttggttgcatagttgatccttatgagttgctgttcttgaccttgttgcaccaaatttgaggggagctcatcttaatgaatgtactactggacgctactaaaggcaaaaggttgactttttaggtttgtcatgactcacatccaaatgtttattaatgaaaagagaaaaagcccagtttttttggttaccaagatgatgcttgcttccatttctttttgtcaatgctatgtagggcaagatggtatcgcagaagtaaaaataaccagagcctggtaaccaagacaaccttccaccccaattggttcccacagggccaggaggatgggtgaggtgtccatctgggcttatgtgcagtgtgttgtcttaaaacacagcaatttagatagaactaccctttcctcttggtgggagtctgcagccaacaggaccagaaccagcttggccttctgggcaccatacttttggaaaaccacccctaaatgcaaaccaaagcacaggccaagagaacggacctctgtgggttgattttttccatgcgtttgattgcgtgcatgtgtaggaggtgaagccggtgtggtgacgggcctgtggaggtgagctggtcagtgttgctccgtgtctctcggttgtgggctttgtggatgggctgcagtcggaatctcccagtggccagcaccccctgaagcccccggtgcgacgccttgtggttccacagccccctccacaatcattcctgtgtcgtctagccttttcttttgcttcccttgttttctaggccgccggtgttaacaccacggacaaagagattgaggttctctatattcggaatgtaacttttgaggacgctggggaatatacgtgcttggcgggtaattctattgggatatcctttcactctgcatggttgacagttctgccaggtatatactgttctttctctctgggtttttttcccttttcttggttgactgctataaaattaacacagcttctgttatcagaaatggccccttttatccttgcataaagatataaaaaatgttaaaaatgatccctcagggataagaaaactgccttggaaattcacacacagtgagatcccacactcacatttatgatcaagggaaatttcacccttaaaacctgaagggatctcatatttttagtgagtcattgagccaatgtataaattagcccatccccctttctcttaaggaacaagttgccattactttggtaaaattcaaagtaatttattctcatttcaaattccattttgctaaaatcctgtatgtgtttttattgctttcatcccactttgtatttttaacgagatgtaaatagagggatgtgtatggaggagcctggggagcggcacctctgaatgtcagatgcacagaagcagtgtgttgcctaccttggggatcggtggcttgctgcatgttgcgatagaatggactttcggtttgctttcattgcaaagcatgctcctgccatcttgggcttgatgttatttctgcctcacagagaaataaacatcattgcagccctgttgcctaaacattgctgctgtctgaatctttaaccgacatctctattctagtgaaactttcttgaaattaaacactgtcctctctgatgcatctgcctctttgtcatttcctttgtgaaactgcagagactgtggtttgctagcttatgatgttccactccagttattaattccttgtttttagagtacagtgcttacctgcatgcttattttacatctagtaaaaataaaatagatcgtttcatttttgtgctgttgctgctgagagttttgactatcttgcaagtatttttctgattaaaatgtataagctttcaataataccattgcatccgtttttccttttgttgcgaatctgctctgtgaatatttgctttgaaacaaagagatgtctcttatgttgaagcttgcttttatttgcagtactgcattctgtggtgcctaactggcacttcttaaccagtttgcctgacagtgctagcacttaactaagaatgcagtttgagaaaaacactatttggaaatacactgcttgtaggtggatcatcgaggactaagaagaagtcagacattggaagttgatataaaaatgtgctaaattaagtaattatatgtatactcacacataatacctttatgttttttctttaagagaaaagctgtagtgacataacaatataaccggatatgtataaacttaaaaggttattaaagaatattataatctttatgtattatggatctaatggttctatattataagcaattcaatctgtgtatttaatgcattggtttgtttatggactagatggtattaaggaattcaccaaaactttttcagaccagcctactagatgaacatcagtttcatatggaattgtgttcatccgggttaaattatcctgtggagtcttcctttggaagagcctacccatgtaagactgaagcattgtcactgtctccttagaaacaaaagtgggcatcgttgatatttcagaattttttatttggtttgcattcacagacgatcatgaaagataatcctttcattgtgggtacagttggtcgtcctccactgaaatgtctaacaaaatgtggcctcatagcctgccctgtgcaactgggtgtcaaccactcactggattgcaggtgcccactgaggctagtgacagtgactacctgggtcctggtggtcaaatgatggacccctggttattcattttcatttgggagtttttgggaagcccaccttgccttgagaatggtcgtcgccttttggttcctttggttgtgctatgatgcgtcagtctggtgtgctaactctatggcctgcttatctgttcctcctcctgtgatctgcaatctagcgcctggaagagaaaaggagattacagcttccccagactacctggagatagccatttactgcataggggtcttcttaatcgcctgtatggtggtaacagtcatcctgtgccgaatgaagaacacgaccaagaagccagacttcagcagccagccggctgtgcacaagctgaccaaacgtatccccctgcggagacaggtaacagaaagtagataaagagtttaaagaaatttactcctcccccatgacccagccagcttgtggatcttgtcctctgctttgatgccatcgacttctgtgagcttccatgtgcgagtgattctggtgtgatgcttggcggtcacccagttagtgtttggagcttggagagtctagtcatggtgcgttgcttggatcaatggggtccagttccaagggcaagaaaggacaatactgtcagaatcagaaaactaatcagcaggactggaaataactggaggcaaatccccctgtgtgtgtttgatcagactcaagtacagcggtctcttcgaagctttagccacattcgtgtcctgtgatctaataccttttttaagataagcatgaacattcgcttgggacttatgccactagtacgaaagagactctaagttctctgacttattttttaaagtcaagatcagtatcttatgccctgggggtgcatctgaactgtttgatttaaactggtgcacaataactttctacacagaattttggcttaacctctttgcaatttacaatagaattgtatgcatctattatgtctcattgttagtagttcacaggtgtggctgtggatttattagtagaatatttgtatggaaccagcaacagattgtttttaaccaccaacttggtctttggtggttgctttttgcttgtgtgtgcctcctgattggtttaattttgctttgggggagatggggcaagatggagcctctggtgtaaaccaaagccctgcataggtaggtgggacaggaaatgcctcagctcttttctgcttattcacagagatggaagcggaaggcagatgtagatgcagaacgtttacaaaagcatttgaaacttggttctgataaaggtttcttttgaaatagcaagtaaaacagcaaactcattggctctatttcagtgtgtattttagtaaaatgtacggggtgcttgttaaaatttcagattcctttgtctcagccccagagattcttgttcagtcatcttggatagggccaggaatctgcattttacacaagccctatggtgattttagaatgcactttgagaaactccaggttaattccaggcatgcctctcccgggacttcaggtaggaatgacattttctggacaaggcattaggaaggattaggaaccagttggtcagcagtggttttggaatgggtctggttgttcacaacccagcttcaaactcctggctgaatgggtccttgttaacttctctaaagccatgtttcaagcaggtctttctttgtggagacggaggatagaatttaaagtgtgtgtcaagcgtaggcgaatgaccaaattgtgttaacagcatggaaaagaggggcctgttgggtcacgtctgccaccaagaatgctgttgtcattttgagtgacatgattatctttcttggggccaggaaagcaaagatgaggccagttggccaaccagtttctagaagagtccagtcctgagataactcttacatggtttctattattttttttctaacagggaaaaatggtaacttctggaggcaacttgtaatttggcatagctaggccactgccccttaattatctcatcatctttttttctgcaactgttaaaatgcttttctttttacttaatatagaagggtaagatgcccttaaaatccccctgactcagccacagtcatcgtgttttctttccccagtgccagctggcttttcttcactgtccatctaagaatacagtttgagaaaaatagtatttggaaatatactgcttgtggatggatccttgaggactaagaagagggcagacattggaagttgacataagaatgttctaaattaagtaattatatgtatactcacatgcaataccatttatattttttctttaagagaattcagcctggccgggcgtggtggctcacgcctgtaatcccagcactttgggaggctgaggcgcgtggatcacccgaggtcaggagttcgagaccatccagcctgactaacatgttgaaacctcgtctctactaaaagtacaaaaattagctgggtgtggtggtgcatgcctgtagtcccagctgcttgggaggctgaggcaggagaatcacttgaacctgggaggtggaggttgcaatgagccaagatcacaccattgcgctccagcctgggcaacaagagtaaaactccgtctttaaaaaaaaagagagagaattcagcctaagttggtcctttttcctctcttccctgtgttaccagagggaacatcagagttccttcctctttttcttccctcctttctttatttattcatcataatttactaagtgcggggtataaatcaggttacatgtaagacacagcctgtcacattcaccagtggttccaaggttatttgatggtaaatgcctgtaatcctagctccacaggaggctgaagcgggaggatcctttgaacccaggagttcaagaccagcctgaccaacacagcgagactccaactcaaaaaacaaaacaaaacaaaacaaaacaaaaacccaaagtgggaaaaaaaagaaaatgtaattggcttgtgttcagtagggccaaggagtataacagaagcagaggaaagggggcaaataccagttccctggaaaagtacatctctgcgagattaatttatttggggggaatgttgacacacctcagctccttctacatgtccaagtggggtacattattggatcttcacaaagaatgtttcatcagtacgcatggcccctttggtagagaaagagatgcttatcgggtatctggataaaagagggttattggactggagctggaatgaaaagccccagaaaggcctgcagatacgttgatgacagagcaaataccacagggatgccaagcatgcctttacctgagcctctaatcagatgtgtcaaggatgggttgtttctaggcatttatgaggccactttttattctgtgttggccagtctcctctaggacacagggatcactcagtgtctccatggccctgactctttccctctccaacacccatacacacacagcgtctcactcaggtccctcagtccatccttgttctcttttcaggacaagaaaagttgggttttcgttcctcctgtgagtttttccttcttggcatttattaatttgcactagacttactggtgtaacacagacgtttcagtttatgttatttttttgagcaaaaatatttttttccagtaccaaagaagaaattccttgcaatcatttcctagtaagcgtgaattttttgagactttgtatgcacatggttgaagaaggagaagcaacttttgggtggtgggaggcagatggcaggtggcatctccctgtgtcctttgatggaggctcatgtcacattcagtgtcagggcttgggcaccgtgccagacactgctcacccactcccactcctttggcgcccagcgagttaaatgagaccaacaacagccagcccagagaggggcatctttgtgagcgtgttggttctggtacaggtctgctggacagccagtgaccagtgtgaagcagcctttgtgagttaaagggggcagcattactttctgtgttttccacacatcaattgggtggtgggggaaggtgtaggggtgggtggaggatggagtgcagaggaaactgaggatgcctgtttaggagacgtgcggtgttgctgggtttgctgaatcagttttacatcgagcacatcagtttctttctctggggcttgaagcttccatagggtaggatggagatttaactgtcttatggttggctccgtccagataaattcatctcctgtgcagcttacaccctctctcactgccgtcagcatggtacaagaggctgcagggtggttttttttttgtttttttcagactttagtttcaccttctcagctgctgatataggtaggctgaaaaccagagaaaaatcaagagcagactgggtgccgtggctcatgcctgtaatcccagcactttgggagaccaagacaggcagatcacctgcagtcaggagttctagaccagcctggccaacatatagtgaaaccccatctccactaaaaaatacaaaaattagctgggtgtggtgatgcatgcctgtagtctcagctacttgggaaactaaggcaggagaatcactagaacccaggaggtagaggttgcagtgagctgagatcgcgccactgcactccagccttggtgacagagtgatactccgtctcacacaaataaaataaaataaaataaaataaaataaaataaatcaagggcagtgaaggctaccttttgtagcaatacttttgaggcaaatggcatattcctggggacgttaggaataggaccaagatgaagggggaggagcggagcgggtgcctcgggggaggaatgtgtgactcagtagccagttctcaggtccagtgttagtgatcctcaaacatatgccaaattccgggaagggggatggatgttctactcccagaagctcgtttactgcctggcagctgaacatcatgatctgggaatattctctgtattttggtcaatcaggtggtctaaaccttaccggctccagaaaacatttgggtaattagagtggtcacggatgacttaactggaatctgccctttcatgtgggcacctcaccctccctgcccctatttcgctgctcccttttctcctctctcagcctccaaaggacatgacagtttgcccaagatctgacctggaccttggctgatgcgatctctcgagcagagccagcgcatctggggctggtgcgtcatggctctgataggtttactcacagagtcccagggaaaggcctgcgggaggcagagactcgctgtgggagaaaagtgagtgtctgatgaactgccttgcctaattacctaaattttgttatggaggaattaaaaatgcaacttcagaagcctttgaaggtttatctcaggcacccagcttgcggtggtgaaagcattttgtttggccataggggagtggtgggcaaggcttatattagagcagaagtatgttaatgccagcctcgtgttcttgtgggggaaggtggtttgcagcctaagagtcacagggcctgtttggcaggctgtggtccaagtgtgtttgtcagtcctggggagtaaacacacaaatattaattcgtctcttctccctggaacatctttgcttctgcttgctctgttctctgagaaatcccctctagatggtaaatttaattcagtataaagagataacactgttagaccgggcgcagtggcccacacctgtaatcccagcactttgggaggccgacgtaggtggatcacctgaggtcaggagttcgagaccagcctgaccagcgtgatgaaaccatgtgtctactaaaaatacaaaattagctgggcgtggtggtacatgcctgtaatcccagctacttgggaggctgaggcaggagaatcacttgaacccggtaggcgggggttgcagtgagccaagatcgtgcctggataatgagagtgaaactctgtctcaaaccaaaaaaaaaaaaaaaaaaaaaaaaaagaaaagaaacagataacactgtttcttggtggccctttaaaaagaaaggaaaaaaaaaaaacacttcctcacttaatctcccatatgtactatggaaatgtacgaaaagcacatttacttaaaagcttgacttatggcacatgctggagagattccggaaagtgaggaaatggaattggagtctgtgaaaatacatgcttaaaaaaaaatgcctgccaagattcgggagtgggaaaacagtttactagagtgttcgtgttgattgtttataagtaactcacttatcactaacaagagaatatgttaaaattggttaggaatgaaactctggaattgaagtttctaggtaggaattgaagaataaggaagattatgattttgtgcaaaagaaaagagaatttaatagtgctaaagaagtagaaggatttcagagatgagcagtgggagttatttgaggttcctgattcagaggaaagatgcccagtaaaacatggagtcccacaggggaatggcctgcccaggaccgggccaagcccccaacacaggctcgctcttggagtggaagggaatgaagagaaagccagccgtattttatagccccagaggggattttaaaagcatagtaaaaatgcatggaggtaaaattaagatatacctcagtagacagagcaatcaaattctatagtttcttagactttgcacgttttcttacccttttcccccgtttcgtgttcttataaaagtattttccaggtttgtacatttaatctgaatctccgtacttcatctgaacaaaattcccgtaagtcatccttcttgtagacctcatttttaaaattctaataataatgacaataaagttgataaaggctttcttatttatttatttttaggctttccatttgaaaagctgtcacatgaaaatcttctcgagacagtctgtttgggggatggtgtagatacatgtgaacttttgccaggggtttgtggatgcagattcctttggggtcatgggtgagccatagaggggtgaacttcagactgaatgttaaatttttctcttctgaggtaacccctaagccatatttgtcattaggaccctcttactgtccagttttcctcctgccctgagatgattccctgactcctggattcttcatctcctgcttactagaaccccagcccatccttggcagtgagcagagggcctcatctagcaaatcagacatgcccactaaggcatatcttctgcagtcagcctttaatgtcactgggttatcttcctggttgcacacagtttgacagtacaatcgtcgcttggtatgcgttggggattggttctaacaaccccgaatataccaaaatctgtggatgcccaagacctttatttaaaatggtgtagtatttgcatatgaactgtgtacatcctctcatatacttagtcatttctagtgatacctgtaataactaacgcgttgtaaatgctatgtaaatagttgttatactgtattgttttttatttgtattttaaaattgttgtattgttattttttattaattagctttcaaatatttttgatctgtgattggttgaaaccatgaatgcggaacccacagatatggaggactgactgtatcttacacacagaaccaccctaggctccaaacgctccaagttacccagagagaagtgtctttgtctgttctctcagatctgggcagcaaatgattctaaagggactaagagaaaatattgcagtgttggtagcagacattaactgagctcttagtgccaggcctagcactaagcacttcatcagtttttttttccctcattttatcatcacattaatgctgtgcagttggacctgttcctgtctcctcttttcttttttgagatggagtcttgctctgtcgcccagactgcagtgcagtggcaccatctcggctcaccgcaacctctgcctcccaggttcaagcaattctcctgtctcagcctccccagtagctggggttacaggcactcaccaccatgcccggctaacttttctatctttagtagagacagggtttcaccatgttggtcaggctggtctcgaactcctgacctcagaagatctgcccaccttggcttcccaaagtgctaggattacaggtgtgagccactctgcctggcccctgtcttgtttttaacagatgaggaaacccaggtctagaaaggttaagtgatttcccaaagctcacacagtgagtgagtgctcaaactgggacagggaccctgacaatctgaccgcacagtcccatgttattgcagttggtcaggatgcagcctgcctaatgcggggcctcatgttgtgaatgatgagcacaggaagggcagcaacgggattggctgttgcccacatcgaaggatgcagagatgccacaaaacctagcctggtagcagaaggaagggccgaaagcagtgatcttgtaagttttcactcattttagaagtcagcatatttcaagcatatgcccttcgttttcttttccgttgttcatgcctcagctcagatccttattattctaaaaaatatttttgttaaataaagtacttcttctagaacataaaagaattacatacacatggtcataaaatccaaatggtctagaaagttctgaaataaaatgtattttctaccccctctctcaactcctaatctctctgcccacaggtgatcactgctaagtctcttatatatccttccagaaacttttaagtgcccttgttctcacacctcgctgtgggacagctgccttccccacatcctattctgtgagcctcgctgatgagagcggtgattttcagggaggaggcacagaagcccagccatgcctctgcctctgctgggtgttaacgtcatccaggactgcggtcccaagcaattgcttaatcggttcccactcctctattgattgcagcttcctatgcaccccatagtggaatcctggaaactggtatccagtgatgaggggctacgctgcaggccatgcagagagtgttctggctgtacaacctgccagaccctggccatttgcggaagtcgtcccattgctaggcctccttttttttttttttttttttgagacggagtcttgctctgttgcccaggctggagtgctgtggtgcaatctcagctcactgcaacctctgcctcctgggtttaagcgattctcctgcctcagcctcccaagtagctgggattacaggcgcctaccaccacaaccgactcattttttttatttttagtagagatagggtttcaccatgttggccaggctggtctcaaactcctgacctcaagtgatctgcccacttcctcctcccaaagtgctgagattacggcgtgagccaccgcgcctggccggccggttcttactagtttggctggagcttcttgcccatgatatcctcaagcataaggtccccctgcaatgagtggtgatttttgcctgttcatggggaagaactttcagaagaccttcttagtcttgaaaacacctgcgtacttaagcatccacagcacacggccctgatgcagaatgaattaggaggacagaaagatttggggaagcatcattggccgttaaacccgctcctgaatctttctgagctctgtaggtggagcttgagatgttcctgtggaccaatgcaaactggaagtcttgatgttctctgaaagttcctggcttctgatgtgtcccgcagacgaggttagctcactacagtgaggttggataccacatggcggggactttaaagttgtctgtttcatccagggtggggcttatgcctagtctgtgacctcagtggggagcaggacggattccccaggagcacccacatttaccttctcgtcttttcccgcttgcttctgccatttgcttgtgcaacccagacacttgggtgtgaggatctcagctccacaattaatgattctttagttcccgcttttaaaacattttgaccatacaatgaataaatgttgctcatactatctgcataatgaagtttaggaataactgccccctgccaaaagattgaatggaaggctcaggaagtgctcatgtacgttttaaaagataataggaattctatgtgaaaaatggcccacttctttattttaatactgaaaacaacttcctaatcctaaaatgattttcttcccctaatctattcttgggcatcttcttgaatttccagcctgctttgagggaagtctgggtttacaaaggcgagattcaaagcttttcaaacaggacaggtcctctggttccctgtgagaagagcccaggacccaccctgtgaaagttcatcccacctaaatttgttcatctggactcagtctttgccagtgtgattgaaggcgtttgtaagcacatccaggagtactatccacctgggcagtcacgcaggagacagagcccagggtgggctagttgcctgcttggagatggatcgtggttaacttcacattcttgttctcttgggccaaagtcttgttcatggtttagaataagacagtgttcaagcagcctgtggtcagactaagattgcgtagtcatcctcaaaagtggccttccagtgtgctctgcgtgagtcttttttttccatagaaaccagccaaaggacagtgatatatttaagaaataatcattttatcagacacactgaaatggatcaggataaacaagaaagtaactcggtggagccctgtgtactgccaggtgggagaggagttctcttgtgtggttatgggaaaaggtgtattttctttccattgatgcttcatcccacgtgtttagtgcactggtttctgaaaccgaagacaagaggcagcccatttccactgaatagcctggccatcaataagtttccagaaggactggggagaaacaaagaatggcccccaatgctggggtctggggttattttgagttaaagggactcggagctactgaatgtcttccacattcaagtcctagaactctttccttgagatattccactttacatttccaaagacagaggaaatatggtagagccaatttcctaaaagttttcgtagaatttcataagcacagcattgatccatgatccgggtagtctgagaggggatccattatccagggctccagtacaggtgcaggtacaaccataaaggcactaatgaagccagagaggactgtctgcatgtcctcaagtgactctctggaggaattaggacagaaagaaaatttacattgtgatcagatggtatagaaaaatttcatagaaaaacctgaacataggaacataaaatttggatgaaatctggtactgcatggactggagggcagaggagttagattccagtggttttctaatttggtttctgacttctgccagcccccaacccattcctttctaagattcgatactctggctgggctctggctgacttccagccttctcagatggagccaggattacatctgtgtctttgcattttgtatccaggtttcggctgagtccagctcctccatgaactccaacaccccgctggtgaggataacaacacgcctctcttcaacggcagacacccccatgctggcaggggtctccgagtatgaacttccagaggacccaaaatgggagtttccaagagataagtgagtacttctcttggccatgtcccaggatggagactcagctataaatggggatattggattaacattttctttttatgacccttagccacaaaggtcttggtgtgatgatgtcagcaggagtaagattgtatttctaaataaccaactcctggaaaagaaaaaaatggatttaaaaaaaaaaataactccttgaaagcagagctacttgcccctggctggtccccaaagaagatggcatctggttatcattttttaagtgtctgggcaattcagactccgtcaaatggaataaaagtagaattatccaatttataaaacagatctgacattccagcttttggttactagaacaagactgttctctgttcacttctgtggagaaattagatgcagaatataaatggccttaaggaccgctacccagtgttgctgttctcattggttattaatgtcatattgggctgaaaagcttcaaatatggtacctgacatctaatttctgtgatccataatattttccttgttggatgatacagaggtgtgccaatcagatgtttagtcaaaatatggccacctgggtggtgttggggctatgtatctcttggtctcgcttgaactccacgtactggagctccgttgggctgcatttgaatcctggctttgccagacagtggctgggcaacctcgggtgaggcacctgattctctgaaattcattctcataaaatgagggtggtggttcagacctcccaggactgagcagagttcttggcttgtgcgagttttcctttcatttcccttcacgtggtggtaacctgggagctctgaactgcaaacctcagcaggatcatcgtgtggggcatggagtcagtgggcagaatttgagctcctagccctcgtcctctaggcagggaccgacccctagatcctccttctgaaaggaagtgcagtggtcattgtagggctgtccactcacttctggggtactttttgtcgtcacagcttgagagtacgggaaggtggaaatgctgactacttctgcatcacatacactggaataagctcttgacttgcttataagcagctaccctgtttgccttgacattttcagtagctcctcagattatatacacttctcatgtgtacctatacacatttggaaatgcaaagataagctcttccagagactgatctgatgagctctatttggaagggagaggtagcttatgtggctggcacttctgattttgattcacgtgatgtcacatcagttttgtttcccaagtgccaatttagagatgtgtaccgttagctaggactgaataattgtatggatattatttggttagagtgttaatggaagtaatttccagttgatttgtatactgtagtgaaaagaccactcactcattcacttattcattcactcaaggcatgttaattggacatttactggtggggcaccagagaaaacacaaagaatggtttctttacctgtaggatgtggagaaatggatgtttcttgtgaactccgccagccctagtttgtgtgtgattatatacacagataggttcatgtgcacattcctatatatataactgaactggagagttgtgatcatattttaagaaattgcagctttcgggtttagtccatagtttttgccacctgtgacaccacagtcaacagtggaagtctgtatgtgcccaactgttacctcccacccggggtaccctgagtgtggaaaatctgagtgctaaacatttcaaaacagtgtttagcgcaaacgtaggtggaacagatttccaatgaatgaaggctatttagaagcagtttattagatcggaggcagaagttatacaaagaaaggattgttatgcttgtagtagcaaggcggtgggacataaattagccatttttccaatgcaaatatttattttctgccaagatgttaaatttaattttcgttctgggtagaaacaaaatgacctctgcatagcacatgctgcccttagtctttatgctgcacttttgcaaactattgtgtacttaccttaaatactgtttactaatggcagctccatgctttgctgtgttatgcttaagttagaaagagccgtattcataagtattccaaagacttttgcgttttgttggtttctggaatgcacaaggacaatatatggctattcgtccgatgtgcatagaccttgtaatcttagaaatttaatttgtggtgttcactttggattttcttcattgttaattttatgtagtcataaggacttttaaacttatgtcaaaaaaaaagtccccaattttttagaattttctttttagtaaaaaattagagattccttgaaatgcttttaagaggcatatcctgtaacttggcaaggaatgtgaccataaaatccattggtatttgaataataattttaaagccaccattttacagggacaaaaaaataagaacagtcttaacgttttttctttgagccattctaaattacaaatatttaattggctcaagatcaaaagctcttctctggcacttaggaaagctgaccaccgcactagcaaggataccttccctaaagaaaataaaccgagaataccaatgtgaaatttaatagccgttccaccagtaattgacattctctaaaacgtcactaggaaaatactcaggcgcgtgtgtaccctaagtctcattagttccatatgataagcactccatgctttagtaagccgctgaaagatttttatatttagttctggaatttccctcactacaccccatcaccagatgctatgtgctaatcccctatttacacatttaggctgacactgggcaagcccctgggagaaggttgctttgggcaagtggtcatggcggaagcagtgggaattgacaaagacaagcccaaggaggcggtcaccgtggccgtgaagatgttgaaaggtgagcggggaggcgggaggctcggggaggggctgggtggagagtcttatcaagaaagttccttttgtggcatgtgaactctatcatggcacggggtcagagagcacatagttgacctaggggttgagaagttttcggtataaatcagcatctcggacagactatttatcttgagctgtgtgtacttataaagaaaagccagttttgttagaaagcggtagcctcctacatagagttattctttgactccttcttcgtgaccacaattcttcattctctctgtatttttatgtgcttagaaattatcaactcacatataattgaatttattagctaggagttggtgtgttagatttgggacttaaaccttaactttacaagtacaagaaaatttgtgtttttggagggaacgaagagacgtaagggagcagaaagccttctcttttgcgtgaggaacaaagcagaaatgacactggtctgggagagtcacttagaagctgagaaggagtgaacaggatcagggctggtgcagagcctcctgggacacataaacaattaccctgagatgtaaatgtcgtgttgtgtttgtgggactgtgaacacttctacgttaaccttccaaccctgcttcatgcccatgtccaaagaacttaaagaacttttaaccattaacttattcgtcctgcagtattcttttatgagaagagttatagggaactgtcacattataaatcctcttgtagggatctcggaaagaagatcccatgccgagtgtttcccacgtttccaggcagagaggcccatccttgggatatggtgctgggcatgtcgcaggcgctctggagttaggctttgtctttcttttgtgggttctcatgggatagtcatcacatccctcccaaggggaagtagcaggctggactttgtcaacaagatgtgcattttgttttttgggttttttaaaaggctgtttatctgagtgactcccaaggaaaactagagtgctttgagatgttccccaccttggagcctgatgccggggaggaacactgtgctgtcttgccccaggtgtcatggcaccactgactgaggcagcccctggctgcgtaccagggccaggtgtggggaggacccaggcttctcatctcttttggcggaacttctggttttgctaatggagctcagagttacatgggatattgcaaaaagggaggtctgggagttctctttctcttgtgatgcccaggctggcagccttccctgtaaggacacagaaggatattagtccccaagccattgtggcgtgtcctttcttacagcccacggctgtgtctccctccctcctcatggcccgtggctccctccttcacatacatcagtgtaaattttgcacacacagtcacttgtattgatcttccttttgtgaagctaaaaaactgtttgcaacatggttcttatccatgcccatatttcattttttttttaaaggaaacccagatttttccatactgaattagcttgaggtggagggcacatgggaaagtcttgccacttaggagaatctaagagaagctaactgcgagcccgcgtatgtggaacctgtgccattcttgcttgaaattacagagcggaagtttatgtaacttttcttaggatgggaactgcagtgccctctgagaagccactagaagtcgcagccctttacctgctcagaatgcacatgcacacacgtttatggccctgtttatggggaaccgtctgaacccacctcggaacgctctaagggcctcgaggggctgggttaagaatgcttggtcgggagcaagtctgtagtgatttgaaatggccctaccctcggtctcctcgctggtttcaggcaccatgaagtttggtgtggttttctgagacgccttagatatggcagaggatgagattatctcatggtctaggaaagaattggcattagtgtcagaagcccctgctctcgtcctgactcttggccccattggccccccagtgagctctttgacacagagtgaggcagttccctgtgtaggcctttgtcccttcctcgataaaatgagggagatgatttggaaaatcttttctgattctgaaattcaatttcatgctgtttcaactaagtctttggcaactaacagtagctgcccatgagttagaggaaatgaactgatttgtgaatatgcctactgttcatagatgatgccacagagaaagacctttctgatctggtgtcagagatggagatgatgaagatgattgggaaacacaagaatatcataaatcttcttggagcctgcacacaggatggtgagtaggaggaaaaactgcattcgcccaaatactctgcagtttgattgaatcattttagaaatggctgggcttccagatcctgctcccagagcaccctgtgtgcatgtttaaagttctttttaaaatccccattggaagatgttcctagccatgaacacaaagaagggtctgtgcccgtacctgggggccagtggaaaggagggtgcaggtgactttggatttgagggcctagagggcgctgctgtttctaggtcataacctggagggggttttggaaaaggcagcctccttatgtttttgttttgtaagtgctaagagagatttgtcagaataagatcctatgttttggttgagaagttcttcccttaaaacagggattgaagaatccacatcttgctgtgggtcacagatggctgagctcccaagaatagcttaaaagaggagaaagcggtatgaaggaatacgttattttccctgggggagagagaccctggcttcttccattgaatgtttactggcactttgaaatcaatttgctaagtaattagtaaacttgaaaacgcctatctttgacttagcaatttctcttgtaggtctatatagtaattggtgaactttttctgtaaagggaggtcgtagatattttagacttttgtgggccgtatggtctttgtcgcaacttctcgtgtctgccatagtagtgagaaagcagtgctagaagtacagaaatgaatggacctggctgcatgccaataaaatttaattacccaaacaggcggtaggcaggatttggcttgcaggctgtagtctgccaaccccgagcctataccatggagaaattattgcacacgtgtgtaagggaacatgtacagagatgttcattgcctactgtttgttatggctgaaacctggaagcaaatgcctatgcatataagggaatggataaataaagtgtggtgtgtttatacgatacagtatatgcagctgtgaaaaggaatgatctggttttgtttttataagcccaacaggttccaaaaggataatgtatgggtaaaaaatgttgcaaagatctaagagctttattattcatttatgtgattaaaaataatatattacttattgaatagttaaaatgaaccaaaaggatagagtggagggatccattgctttccaagagggcgcaggtgacagcatgagagtgacagggaagagcacgtcaactgtgtctctgtgccttttgaggctatcatgaccaagggcttatttatcattttggagagattataatcatatttttatgtgtgcttttctgtatgttaaaactttttcttttttcttcttcttttttttttttttttttgagacaaagtctcgctctgttgcctaggctgcagtgcagtggtgtgatctcggctcactacagcctccacctcctgggttcaagcgattctcctgtctcagcctctcaagtagctgggactataggtgtgtgtcaccatgcccagctaatttttgtatttttagtagagacgaggtttcgctatgctggccaggctggtcttgaactcctggcctcatgtgatccacctgcctcggcctctgtaagggctgggattacagatatgaggcaccacgcccagccgctgtatgttaaactttaaaaaaaaaaaaaaaagcatgggttgtaataactaaaaatgttttgctgaattgcccaaggggagaccctggattctctctttagggagcttctcttcttcctcaacagggcctctctatgtcatagttgagtatgcctctaaaggcaacctccgagaatacctccgagcccggaggccacccgggatggagtactcctatgacattaaccgtgttcctgaggagcagatgaccttcaaggacttggtgtcatgcacctaccagctggccagaggcatggagtacttggcttcccaaaaagtgagtctttcacattctacttggctgggtggaatccaactaaaaatgtctttaaagaaaacaggcaatttggacatgctcatttgctagatcaagccctcgcatgtcttgtacaacctggaaaatatttattgcgttattcccatttgagtttaatgaactgtttaaaaccaaagcagcctcataaacctatagcatcgctgcagagatgagcagaaaagatacctcttctttgagacaggaccatgtgtgatttccctcggaattcagctctccaggtgggaaatggatggttttaaaggccccctttaattcggatgattttctttctttcttttttttttttcttaagcttcatttattttgtggttactgagtttttgaacatagactttaggtgtttagtgttttgggtttgatatggcattaaatattctaagagtaaaggtcaaacaaaggggtattttagtaaccttgcgtcctggagctctgcgtttattttgcctcgtttggcgggtgaccctctgtggttagaagttggccaggtcccctgaggtggactgcctgcattccaggcgtgccacttaccgtggaacttgaaacatttcagttattctgagagtagttagacaggtgcccagatgtcctcggaggcattttggatgacccaaaactcccttgtcagccccacacatagggaagcggaggggcggagctgcctcctgtgcagaggtgggccttgctcctacctgcattgcagtttattgcagtgccaggaattccttgggtccccaaagaggtgagatcctctggtcggcgtgcaccctctgtcactgggggtctgggttgcctgaagagtcacaaactcaagtctccatggggccatgccagtcacaccaccaaggcctgcggatcactcagagtgcagagattcgagggatggctgcacctcagctctactctctggccacataggaacatggcccagagctaccccatgttctggatggttttttctttctttcaaacaggctggagtgccgtggcataatcacagctcactgcagccttgacctcctgggttcaggtgagcctcccacctcaacctcctgagtagctgggagtacgaggatgtgccaccatgcctggctaagttttgtgttttttgttttttgttttggtagagacggggttttgccttttttctttttaatttaagaaaaactttaaaaacattttttcaggagagtttagagtttaagactttttcagatctttttcgtataaaaatctcccaatatataggttttgggaaactaattaaacacagttttgacttctgtgattgtgtttacgtacacgtgcgtgtgtgtgcgtgtatgtagggtagtttgccaatctatttggcatccagagacaaccagacagatccagaacatgggacatttgacaagatatcgcttccaaatgtcagtgtctcgaaagacaaaaactgctggggagacggttccagataaaagggggccgatgagacaattcctaagtgtaaaagtgggatcctggactggatcctgtgggtcggggagggtggccagttcttagaaaggacatttgtgagtgtcctttgaatatggactgtataatattactggttatatttctgtatcagtgttgaatttgccgggggtggtgacagtggtatctgttgtaggagaaatacgctgaagaattgagatttgtgaagtatcagtgatgcctgcagctcagttttaagtggtccagccataaaatataatcaatccattcactatcccaagtgtgtatgtgtgtgggggcaggtggggcaggacatggagacagcaagtgattgagtaggtgtaacaagcaaacccagcagtggtggatactcactgtgccatccctccttttctgcagctgtgaactcttcctaaataagcctggggagggtagcccatctgtaggctgcctattttgatattctggtcttgatcactccctgccctacctgtgtgggagataggggaagcagttttgcacccagcagggtggtgctactaggggaaatgtggtaggagggctggctcagtcattttattaaatccttcaacatctactcctagagcacccccgatgtctcatgcccttggtcaggctctccagcgaagtggccagaagagacatagtccttgacctcctggggcaagaaccatgggtgacagtaagagaaattgactgtaaatgtgggaatgaaaataaggttgtaaaaaaatattgaaaaaggtgccatggaggaaacagggggataaggccttactcatgccaggacgctgcactttgctgtcactgccatggaagcctctgagggggaggaagaggatcagttagtgcttcaaaaatgcctctcactgctgcttgtgtggtgaatgggaaggctgagcccctgtcaaaggtgatgatggtttgggctagggtctgttgggtccaaagacaccgagaaaagctggtgggctgatgttggacatattttgctcttgggataatgaatggattgattagataggagggagagaaagagagatcaagggtgacttctggatttccagcttgaaaaactggatggtggtgcagcttccaagtctgggaggacttgggaatcagggctggggcagggggcatagatttgggtggaaaatccgagctcgtcttgagcgtatctgagtcatccaaggggagataatgaagaagctgcaggcagcagctcagctctgagggtgggctaacagctgggaggcagcaaagggagctgtgagttcaagccatgggcgtggacaaactcatctgcggagaagcttggaagaggagaatagaagcctgaagtcaggtcctgagaaaattctcaaatctagagattgactgaaagcaccagaaacagcagcggaggccgagcaggcacagcctgagcagtaggaaaatcaggacacggagcacagaggccccacatgggagcttcaggaaggagggggcaggtagtagagcctcggcgctcagactggtgagaagcacgggtgttgagtcctggtcctagaggcagtggtggtacccctgcccaccctagccctgaggacccagagctccttcctgttttggagctggcagagagaaaactaagagacgaactttgctaagcagggcaaatgcatccatttaatcgtggaagaacggaagtacccatattaaagtgttgtgataatagtaactatcgttattattaattactgacccctccgggagaagctaaccatcttccaggcaccgtggcagagcatttgacataaagcatcttacgtagccctcagaacaacccggaaataggtgggatttggatccccattgtatgggggaggacgatgaggaagcagcatgaatggtttgagaccagatgtgtcaggaggactcagatgtcctcacttctgagaagcggacttgtaggtccgaagagtggagtggcaggtcccagacctaggtctcctggtcccccactcagctgtctcctgctctcatgaggcccctaactctctctaaactgaggcaagaccaatgagattccacgtggggggcgggtgaggggttgtttagtgccccagtgtggcctcattgtctctacattgaataacagcccaaggtaaaagggatattgtatgggcctttaagacatggcatggttccaaagccacttactggaggccacctgcagttaaggacccagaataggtttgaaaatggaggtagatgaagatgttaagcatggtccccttgcgagggctctgcttccaaaaatggagggcttattcttgaaagtggagaatgaagaaccaggcaaagggtccggccctggctttcccacacccatcccctcacaatggggagccatgggcttgtgagagacctgcttgcctgaaggaaggggcaaaagagaactgttgattacatcgttactgatgtactgggttcatctgtgctcagcgctgggccgattgagatgaacacacagtgcctggcctccagcagctttcagttgtgtgtgtacatgtgtgtgtgtgcgtgagtgtgtgagtgttggggtaggggttggggactggagacagagaagtgaaaaaacaccatggtgtatatagcaatgcaattaggtaatagggtatttgagccttacacaatttataaaatccttactatttttagctcaaatcacactaattttacttttttaaccaaatcccaaacccagttaaccctcaaagtgttaaacctgagcagtttgtttttcgtttttgtttttgagacagggtctcactctgtcacctggctggagtgcagtggcgtgatcttggctcactgcagccttggcctcctgggttcaagtgattctcccacctcagcctcctgagttgctgggactacaggcatgtaccaccacacctggctattttttggtagagacggggttttaccataccatgttggccaggctggtcttgaactcctgacctcaagtgatctgcccacctcagcctcccaaagtgctgggattacaggcatgagccactgcgcctggccctgagcagtttttttttttttttggttgagacagagtctagctcttttgccgaggctggagttcagtggcgctatctcggctcactgcagcctctgcctcccaggttctagcgattctcctgcctcagcctcccaagtagctgggactacaggcgcttgccaccacgcccggctaattttttgtgtttttagtagagatggggtttcgctgtgttagccagggtggtctccatctcctgacctcgggatccgcctgccttggcctcccaaagtgctgggataacaggtgtgagccaccacgctcagcctgagcagtttttttagtgaagccccagcttccccacctgtaaaatgggtataacactatccatgtcataggttgccgcaggaattcgatgtcatcagccatactgggcacagggcatactgtctacatcatagggatgttggtcttccttcccttagtgacccactgaccttcacctatggaacaccaaactgtcccagggccctaattgtataaaatggtcagctccctgtgctggagaacagctcacattcctgtggatgacggggatttggcttgcctttgattactttctttttctcgggtgtgggttccaagtctcctcttattcaacccagaggctggggtttgatgtttcctagcccctgggatgagggatggccacgctagactctggctttcgctgagaagatggtggagggagccgtcagcagtgtctctgtgcaagctgagccctaatgcatagttggagcccagtgcgtgggaagcacattcttctgaccacacagcttgccagacacacagagcgcgtgtcggcaggagcacaccaccgggagagtttggcccggggcttggaagttcaatttgaacaggcctccaaaactgggaacagggctgcagccccagacgaatctccaggcagcttctgtgagctctcatgtttcctgcttccaacctggccagggattgcaagcttgcgtggctttcttgctttcccgcttctgggcttaggctacccgggaggcccagaagtgtgtgaacacaaggaatagctaggggtcggggtggaatcaaataattccttatttatatttcagggatcacgtagcttgccccttttttaattgtccatttcgtggagtgcctaagatcgcccccatttcagccttgttgaatggactgataagactttctgcttcgtatgatagttaacctttgccaataaccagtgtaaaaggcttcggtggtgatatttgcttctttgtgtcttatctcttcccaaaatagaaggtgatgattggagaccctaattaccttgtatcttgtggaaatcttgctatatgaaagtgtaacaaaaatgcagcagctcacagtagcgtatcatttgtagaaaggaaaaatcataggccgggcgtggtggctcacgcctataatcccagtactttgggaggccgaggcgggtggatcacttgaggtcaggagtttgagaccagcctgaccaacatggtgaaaccctatctctaccaaaaatacaaaattagcctgatgtggtggtgggcacctgcaatcccagctacttgggaggctgagggcaggagaatcacttgaacctgggaggcagaggttgcattgagccaagatcgtgccactgcactctagcctgggaaacaagagtgaaactccgtctcaaaaaaaaaaaaaaaaaaaaaaagaaggaaaagtcgtaatagctagatctttctgagacccaagagttagtgtcaagacaataaattagctgttctgcagcaagtatttaatatttcagtgtttagaatcagtgtatgtggcacattcaggctgaggccaggtgttaggagaaactggactgagaacgtggatagacgggcattggccatggtagagaccaagaaaggacatgactagtcatttcaggaaccttagtcatgggacatggaggaggtacaacagggctaagtttggaagcgtagagacccgctagacgggcagtgtggaagtctcagggggaggggcagacagtgaagatggcctggactaaggcattagcagtgggaaaggcatggtgtggacacatgggaaggcattttggagttgaaatcaacaggacttgggaggaatgtgtaaagaataccggtgtatagctctccgattaagagagacaaagcattggaggagttgaaaccttgaatttgagacgtcaagggaatgtcagtggggaagtgtcccatagacagttgaaaatgagaacatgggtctcaggagggaggtcatgatggagatacgaacttgcgcatattttgtatgtgtttagaattaatgccttgaggatatatggaaatacataaacttaatggaacaattcctctatttgaagggacagaaaaagagaagagccagccagagattctaagagggcagggagagacagagaggcagctgagggaaggggacgggataaaactaaacagaggggctgggtgtggtggcttacacctgtaatcctagcactttgggaggccgaggcgggtggctcacctgaggtcaggagttcgagaccagcctgaccgacatggtgaaaccccgtctctactaaaaatacaaaatattagccgggtgtggtggcaggcacctgtaatctcagctactcgggaggctgaggcaggagaatcgcttgaacccaggaggcggaggttgcagtgagccaagatcgcaccattgcactccagcctgggcgacaaggacaagactccatgttaaaacaaaaaaaacaaaaacaagaaaacctaaacagagggaccattttaaaaaacaagcaagaaatcaatagcatctgaagccacagaggaggaacaactgaggagttggaggacgtcatttgcgtctaacaattcagaggttcttcataagcttcaggagaggcaagagtggaacacagattagaatgtttgagaagtgaccaggaatgaagaagacacaatgttggattttaaccaacgcttctgaaaattcaggtttaaagggcaggagagcaagtgttgagagaaaagattttaggatgatcagatacagatctataagcagctgaaagaaagacactggtgtggctggacaactggaggtagaagagaatatggttatttagtctaccttcgctcttcaaaatgatcattctatttatttataattccaaaacaaatacatgtcgtgttccaggctctccgatgatcccagttgacctgtcttcttaatcttagagccacactgcgttttcttttcttttctttcttttttttttttttttttgagacagagtctcactctgtcacccaggctggagtgcaatggcgtgatctcagctcactgcaacctctgtctcccaggttcaagtgattcttgtgcctcagcctcctgagtagctgggactacaggtgcacaccaccacgctcggctaatttttgtagttttagcagagatgggattttgccgtgttggccaggctggtctcgaactactgacctcaagtgatccgcccaccttgacctcccaaagtgctggtattacaggcatgagccaccgcacccggccacactgtatttcttatagtataccgcaactggtttttaacatcagctatattttctatctgcattttaagaaatgaacatatttcctttttgttctggcggtgttttgaaattagttatttctcttgcttctttcttgatttcagtgtattcatcgagatttagcagccagaaatgttttggtaacagaaaacaatgtgatgaaaatagcagactttggactcgccagagatatcaacaatatagactattacaaaaagaccaccaatgtaagtcgatggcagtaacacagtgggcaggggcgggggtgaggctcagaatgttccaggaagaaaggccgtcaatgttgagagctgggtgggatggctggggacccattcccctgccccgattcccgttcttttgacttactattcacaaactctcaatatgcaaatttagcctctattatgtcaattttagtaaatgtgaaacacttatatacagaataatcagcaaccgctaggattttcttatggttctcatcaagaactttcatagcaaaaactacagcttggaagttactggtttaatttttgcctaataactggtcaaggagcatctgtgtgctagggagataaaggatagaatccaaggagatggcattttattaacggcccagacctgtgcatctcacacattgttcatggtcctcattgggactgatttctgctctattgactgactagtgaaaaccaagaatatcagctcttaaacagggcatagccctattgagcctgctaagataaattcttttaaatatatttagtttttgcattttcctctacatttgcaggggcggcttccagtcaagtggatggctccagaagccctgtttgatagagtatacactcatcagagtgatgtgtgagtaactctcttttctctggctttttcctgggcttgagctgcaaaaatactgtacgtacttcacctttcttccttctttagtggctgctgcatttcacacattcgtagaaggtgcaggagctggccttagaaaggacagattttatggtaggctgataaccaatgctctgttactaatctgcctggcttcaaagagcacagaaggtggaactgctgacctccccctgccagagcggaagtccttcccttgaacatattcatggatgtgcaactacaaagcggttatctaattcgccaagctcttggcatgttcttcactccattaaaggagtaatcctggagcttttcccacttacgagtagtttgtcatatttccctctaacccagatttgtccttaaagagtggagctgagtgagatgtggtccaggctggggacctccacagggtctactctctatgtttatccctcaacaaaaaggtctgatcttgctttggcatccttgatagcattctagaaacacagtagaatatttctattatgatatactgacaaaaccagtggggtcaggctccaactgatattttagatttgaaaattcagttgaaggctgtgtgcagtgactcatacctgtaatcaatcccagcactttgggagggcaaggcgggtggatcacgaggtcaggagatcaaggccatcctggccaacatggtgaaaccccgtctctactaaaactacaaaaattagctgggcgtagttatgcgtgtctgtaatctccactacttgggaggctgaggcaggagaatcgcttgaacctgggagtcagaggttgcagtgagctgagattgtgccactgcactccagcctggcaacagagcgagactctgtctggggaaaaaaaaatcacttgaactattttttatttgtatgagcaggaggagttctgggtaggcattaattctgtgctaccatagttggtcctctcaacaatcctaaaaaaaagacatgactatcccatttttgctgtgagcaactgaggcacagaggctgttctgcctgtcctgtgctgctgcttttgctctgtagaaaactgcggagtgaaacaccaccatcgagtacagaaggttgagtttccagaacgaccatgatgtagctaaacctggctctctcagcttgctcctcccagagattgagcctcctgaacttggcacaggaagtccaaatctctgaagagtcaagtgtaaataaattatggcctgtgagatgtgttcagttttgttgtgtgcaactcatctggggcatgtgattcctcatcctaaccccagcccagtgctgattgcctttgcgatcttagtaagttccagagcctctgtgcagcagatgttccgccagccacacagggcagctgtgatcctgcggagttggcttgctggccttattctgtcaactgcccatcctggtagatcacaacccttgggtcaggcacataaggagttggaaaggagcgtaaaggctttgaaactgagaaactgagatccttgcattgctaacaccacatttaagacaagcagctctattccagagtgatggcagtttgcctttttgtctattgatggaaaattccatcagcacatccccgtgtcatcatcattcggggatgctcttgcagggcaggaaagagcacataggaggaactgcaggagggcccatttgtctttgaacttcagaagtgaggaggtgtttatgtctcagctgggcgtgtttaggttttggcaacgtggatgggttagtaatgccgtgctttctccttttgttgcagctggtccttcggggtgttaatgtgggagatcttcactttagggggctcgccctacccagggattcccgtggaggaactttttaagctgctgaaggaaggacacagaatggataagccagccaactgcaccaacgaactgtaagggctgttgtctttcctgccggtgccccagtggacttgccacaccagtaatacctctcctgatgtatctcgtttttgaaggcccctggtttcctaaacatgctctaagaagaatggctgaagctctctgggctcaatccagagctgggatacatagcgacaccgacaaccattacttgtctgagagaaagaacattattctgagtatggagagggctttggatcagagggtgtctggctgcctggctgagggctcctgactttgcagagccagcaggagtggtcttcctgggccactgtgctgcaccttctgcggtctcccgtggagtgacaggaagacccacgggtcaggaaacaagctagaaagccgcggggccgccctgcagggtgtaggattaaggaaccaacacagcctttccctggtggttgtgcctggcccccgcctggccccatcgtggccagtagagaatcggtgtttccagaacttctcgaaccattgaaaattgccattacagattgacgccaaccacatttcctcagagcgaaggaactcgtgtttggttacctaggtctcacttgtgttttagtgcagagaattaaacatgtgtccaggcgccctccttactgtaccagatctgcctgtaaaaccatgaactggtttgtagcaaaacctgcctcacactttaagtggagttatgttgtgtttgtgacgtgtgcctggtgcaatagaatcagtgctttgaaaggagtctctctgcctcctgcctcaacccctccaggattaactaagaagagtgattgtcccagaaactgcggtctattgtgtatcatttcatggggattttatatcagtaatcccgtgagtgcttttcggtgtaccgtggatgtctgatgaatggccacattttatagcatattatataaaggcatttattgtgctctttgtcattcctattgttttttttcttttgtaacgtagaggatctgtcgaaacccaaaatcaagataagacctgggaagctaagcctatctaagagttaatcaggaagttagtgtgcagcccagtggtggcagattaattcatcaaaaacttgaagttgtagttttcaaattttatttaatttttttttaactcaggaagctgtgtcaactagaatcattaagacccaaagcactgggcagataaatagtggagctgctttggtgctgggcagggtgtcaggggagggaagactggagaccagcccatggaaatacgcattttccttcagcctccaaagcatctttagggtgtgacgccattgtgagatgtcactgtggcccagggttaccagggaaaacacatagctgtgtctttcttgatggcttcgatgcctttctaacatgtttttgtaagtcaaagtgcctttcggaggaactggcagggaagcttttgggaaagtgattcatgaccccctaatctagttgcttggaaggttctgatgcattttcctaatttacaccacgtccccatattgcctattaaaactgactataaccacgtacccagtgcatatgaaattaattcaaggaaatccatttttcccaggtacatgatgatgagggactgttggcatgcagtgccctcccagagaccaacgttcaagcagttggtagaagacttggatcgaattctcactctcacaaccaatgaggtaagaacttccttctagaagccccttgtccttggttgtcttgtgagacatgcgtagtgttttacacacacactcccctgttggctgttggttggagtctgtggtcttgtttattctttttccatagggtcagatagttcaactatgggttcctctcaaatcatgatttttctcagaacttcattttgtgagttctgactcatgaaaccaaagacagagggacatccccgaggctgccttcagtgtagctgctggtggagcagtccggggtatgtgggagagtgggaaaggggaagcagtattcacttgcattttggtgtgcatgggaaaaagcttggattcctgtgcaagtttgattctgtgctttggtcattagtgggtaaactgataatgttcgtcatcatttgcttgatggaatacaatgaagttttgtaacaccagcttctgttaccacagtactatcctatgtgatcctgttggtaatgctgtatgccttgcagcctctttctaggtgtatataaacatacactgttttctacaatgagcaacttacatgatttttacataaaaacatgtaccttttgttaaaatatttattttccctaaaatatttatgctctcgcctgtaatcccagcattttgggaagccgaggagggcagatcacctgaggccaggagttcgagagcagcctggccaacatggcgaaaccctgtctctactaaaaatacaaaaattagttggatgtggtggtatgtgcctgtaatcccagctacttaggaggcgaggtaggggaatcgcttgaacccaggaggtgaagtttgcagtgactgagattgcgccactgcactccagtctgggagacagagcaagacttcatctcaaaaagaaaataataataatttatgatccttgccaacaaaataaacactcgtctgtcactcactgtgcaaatttagccatgtcagtggctccttcaatatgcagatagagtgccttttataattatggaaagcatatgctctgagcaggaaagatgataaacccatcaagtctagtcaaatcttaagatagagaaattgttaatgaatgtattttgagatatttaatgaggatgcacaatagtgttcttttacacaggaaactaactccaaaccatgcaattgtctcaacaagaaaaaagttaaggtcccccaagtattttagaaggaaaataatacacttaatttctgatttaggaaatagttttagagtgattttttaaaaagtaataatcaaatgtagtgatatgaagtcttagctcagcagctttatcttatgcgtctgactgtggcctgtgctggataaaggaagagattgcacttaaatgaatacagctgaccttcagaagttgaaaggaaaggaacggttcaagggggggaagaaaccaactttcttcttctgccaaaattgttgtttctagtataagttcctttaactgtagacttggaatctactgatatccctgtttttttcctatcagatctgaaagtttatggcttcattgagaaactgggaaaagttggtcaggcgcagtggctcatgcctgtaatcccagcactttgggaggccgaggcaggcggatcatgaggtcaggagttccagaccagcctggccaacatggtgaaaccctgtctctactaaagatacaaaaaattagccgggcgtgttggtgtgcgcctgtaatcccagctactccgggaggctgaggcaggagagtcacttgaaccggggaggcggaggttgcagtgagccgagatcatgccattgcattccagccttggcgacagagcgagactccgtctcaaaaaaaaaaaaaataaaaataaaaaagaaagaaactgggaaaagcactaaagttctattttaatgatctcatgtctatgctcaaagtgatttatttatatatttacatgtagagtgggtccgttgatactgaaatttgtatctagtaccctaaaataaaaaagcagaatgccatattgtctggtggatataaaaatcgaagtttctttccttctgaaaatcattaccatatgctcaagaaaaacggttccatttaggacaaaatttcgtttttatcattgtaagcaaaaagttctcttttgatgtggtgggcgtgtttgtttccagttgtgtggttaatgctgatgttgttggaactgatacattccccttctgggatgctgggatggggactctttctcttgccaaccctggtgatgaattagagggtttgtgtgtgtgtgtgtgtgtgtgtgtgtgtctttaaaaatgtctagttgccaacattccatgggctcttttctgataacactgaggctgtttgtgctgtggtctgcactttttgccccctctcagcaaaaccacatgtcatagaatagttgttggcttctggatgtgtgagcagaactgccccactgtgccagcccagtggaggcagagagacccacaagttcccaatttagaaagcttttcatagcttcagaacaggggtcggcaactgctttctgtaaagggccagggagtaaatattttcagctttgccggccctgtggtctctgttgcaacttcgccactgtagcctcaaagtagccacagacaatatgtaaatagatgtgttctagtctgtcttctagtaaaattttatggatcctgaaattggaattttatataattgtatataaattttattcattttaatcctataagatattcttcttcttttgattttttttttcaaccgcttaccaatgttaaagaccatctttagccctcaggccatacaaagtcgtctgtgggcacccaagtcggaggaagtgtcaccctggggtgatccagagggctttttgcagcaccagcactggatgccttggggagcagaggacactttctgaatctcgaaccttcaaaactttgaaacttaaccgatattttcctgaagtttcctttaacagtgcattatggatttaacatacatgagtatgtctaagccttttttgaacctgtttacattttcaactcggagagcttctgagagtaatcagttacatctgttaaattacccactgaatgaagaagtattccccttcaattatccccgaaactacaatagtaaaatgtaattcagaaaataaatattcatagtctcaactacttaaagggggtctggggacccacaacatgttaccggttttcattttgctggggctcgcatttgaagcaagggctctagtgaggaggtggtgtagactcagcgggttatttaggtccgtgtgaagccgagttgcctgcccagcacctatagctcaactaggttttattgttctctacctgtcaatagttgatttatgatggattccaagagaaaagctaaggacagcctggggtacatcagacgtggtctcagggaggtcttcgtggaagtcaggtgggctgggtctctgttcaccttctaggggtctcctgtcctgtcccacgtccaatacccacatctcaagagtttgtgtttgaaataaaactcttctcttcccttctttcaggaatacttggacctcagtcagcctctcgaaccgtattcaccttgttatcctgacccaagatgaaataaaacgtctctcttcccttctttcaggaatacttggacctcagccaacctctcgaacagtattcacctagttaccctgacacaagaagttcttgttcttcaggagatgattctgttttttctccagaccccatgccttacgaaccatgccttcctcagtatccacacataaacggcagtgttaaaacatgaatgactgtgtctgcctgtccccaaacaggacagcactgggaacctagctacactgagcagggagaccatgcctcccagagcttgttgtctccacttgtatatatggatcagaggagtaaataattggaaaagtaatcagcatatgtgtaaagatttatacagttgaaaacttgtaatcttccccaggaggagaagaaggtttctggagcagtggactgccacaagccaccatgtaacccctctcacctgccgtgcgtactggctgtggaccagtaggactcaaggtggacgtgcgttctgccttccttgttaattttgtaataattggagaagatttatgtcagcacacacttacagagcacaaatgcagtatataggtgctggatgtatgtaaatatattcaaattatgtataaatatatattatatatttacaaggagttattttttgtattgattttaaatggatgtcccaatgcacctagaaaattggtctctctttttttaatagctatttgctaaatgctgttcttacacataatttcttaattttcaccgagcagaggtggaaaaatacttttgctttcagggaaaatggtataacgttaatttattaataaattggtaatatacaaaacaattaatcatttatagttttttttgtaatttaagtggcatttctatgcaggcagcacagcagactagttaatctattgcttggacttaactagttatcagatcctttgaaaagagaatatttacaatatatgactaatttggggaaaatgaagttttgatttatttgtgtttaaatgctgctgtcagacgattgttcttagacctcctaaatgccccatattaaaagaactcattcataggaaggtgtttcattttggtgtgcaaccctgtcattacgtcaacgcaacgtctaactggacttcccaagataaatggtaccagcgtcctcttaaaagatgccttaatccattccttgaggacagaccttagttgaaatgatagcagaatgtgcttctctctggcagctggccttctgcttctgagttgcacattaatcagattagcctgtattctcttcagtgaattttgataatggcttccagactctttggcgttggagacgcctgttaggatcttcaagtcccatcatagaaaattgaaacacagagttgttctgctgatagttttggggatacgtccatctttttaagggattgctttcatctaattctggcaggacctcaccaaaagatccagcctcatacctacatcagacaaaatatcgccgttgttccttctgtactaaagtattgtgttttgctttggaaacacccactcactttgcaatagccgtgcaagatgaatgcagattacactgatcttatgtgttacaaaattggagaaagtatttaataaaacctgttaatttttatactgacaataaaaatgtttctacagatattaatgttaacaagacaaaataaatgtcacgcaacttatttttttaatactcgtgtcttaccaaatggtttcctgtgcttggaggtgctgactgagtgctgttgtgaatgcaggaagggcagggctgccaagggtcttatgtgctacacacgggggtgacttgccagaggggttgactgagaccagcagtacctgtgacaggttgaggttgatccagtggaaaatctgaatcagttggttggagccctggctcggttgcttactggcacctcaatggaatcatcgttcctttctgagccctaccagttccccagaggagcaaacaaagagccacatggtagagagctttgcaaactggaaggtgacctaaggatgacaggtattgagtagggaagacgttcagaacatctgaatcctggggacttaaaaaccttttaggctgttttcttcatgatgtatggagagaaggatttgcttcaaattttccaaaagaaaacttggacaaatgttcgaataattatttattttcataccaccaacgatctgaagagggaaatggagttttgcctgtcagttaacaaatgtgaatctgtgactcttaagggtctgttgtatctacttgccagcctcatcagcagcaggaaagggaattgaacataggccaacttctcctgcacttcagccaggctcttagaaccttacagggccattggtaaagagtgctgtctttggggtcttctttctgtttgaggccattcatggtggagcaaggtgtcaccagccatcaggggagtggcctagggtcctggttctgtatttcccaaacctctgtccttctgtttcttacaggataacagggctcttgggaatgtgattttaaaaataaggtgcatgaaagccacctaagaaaattgtcacctgttagacacaagtgtacagggtgatgttctgtacccctggggacatttctaccgtgagatgtccttggcaagggtgaggatggacttgctggggtctacgctggttcctccgtgcagctctctggtgcatatgctgtactttagacactgaagggcagtttatagccttgacagtgtagattataatggcagtaagaactgctgtatttctggcccatttcatggagatgggtgggcaagaatcctaaatggtcttttggccattttgattttagaattattttgaaagagacacttgtcatgaagggcaagaaggcagtgtggtccatgagaatgataggtaatacagtacctttttttttttgagacctgtcccaaatgagcatacacaggtaggattcgataagaatcctggagcttatggctctcctcccccaagaacctaaggagagcgttggaaattagttgcaactacatgtgatggtcacctaaccatcatgagatgagttcatttgtgaagaaccaaaagattgcaggcatcttggatgtgtagtgcccggcctgctgttcctaactgggaaaggcatatccaagaggctgcctcaaaacgtctagctgatggtagcctctggcaggatggggagccagagaaagcgggtggaaaagtagcatcttcacgggggttctgtgcattcccaggggacagggtaccctgcatccaccacacagcctctccatccctcctcagggagcttctctgcatctgatcttgtggggagttccttaaccccacacataggaacataggaaattaaaacatgcatttatagtaaaacgtctgaacaacttgagctgctatgaactgaggactccacctccagttttgaaaacaagaaatggggctgctaccttatactgcatcactgaagattgcttgcagggctgggtccagagggctcagctaggacagaagaggaagctgaggctccgcttgaggtccctgagggtcacatggctgggatgtggtctaaggaacaagactgcagccttgttcagtgcaggagaaagacagtggacttgtgggcttggacagaattgattggtttgtttcttacagctgggtgatggtgcgcaaatcccagcttctgtctggatgtttgtctctaggtgaacctggtcctcaccagcctctcgacttgccatgaggatttgctgtagggcttagctgtggcagacaggactcaataagtgttcgttttctacttcctgagaatttttttctacatttcagtgattttagtatatccacgttgtgtaaccatcaccactatctaattccaaaacgttttcatcactccataaagccaacaaattcccattgttagccacttgcatttccccctcccccagtccttggcaacccccaatctgctctctgtctatggatttgcctactctagacatttcatgtaaatggaatcatatgctatgtgaccttttttgtccaacttcttcacttaatgttttcaagatttgttcatacggtagcctgtaacagcacttcatttttattgccaaatcctattccatgatataaatttactacattttgtttatccatttgtccattgatggacatttagattgtactttccagttatgaatagtgctgttatgaacattcatgtactgggtttttgtgtggtcaggttttcatttctcttgggcatatatgtaggagtggaattgcgggatcatatggtaactgctagactgttttccaaggtggctgcactattttacattcccaccagcagtgcatgagcattccagtttttccacatccttgccaacacttgttattatccatattttttattatagccatcctagtggatatgaagtatcttcctaagaatttcgtagctgaggagataggatgcagatcattgaataaagatacataatgctttcctggtttttccagaaaaagatacttcaattaatcagcttggtttctacactgatgaaatggccaaggtagctaagatgcctcagtggatcttcatgaaatggagaagctgagaaaccaatcaattccctgtcttccctcttggctgagagaggaaggaagcactgctaagtggtgcaaggatgcaggatctttctggctggaatgcttgagtgtatctgtcctcacatccccagttttataccaagtaaagtcacgcaagcttgagcagtccatgcggactaatgaatgcaccattacttatgtatgtgggtccattaggttcctccttaccaagcctgcattttgatgttatttattttttcatggttttaaagatgaaagcaaagtttatcttctctcacatttcatccccaggagccttgaaatgacttggctgtcgaccctgggcagggacagcagaagccgtccatgtctcaagtgacattctggagtagggcccttcttgtgccctttttttatgccgggtgtctgggatttttgaatgggctcctccaaattgccttgaagtcctgtttcagaaggtcacatgaggtgctgtagaagtcagtggatgggagggcattcaatgtccggcactggggaaccatccgctccggacctttgaaatacaatttacaaagggatacctcagcacatgaagctgttcagtgactgaattcagcttaccgtgcacatatgggtaggtgattttttccttctgcagctcagaacactgcctccttttgggctgcactccttttaggtttcttttcctcttctaattcttttttaggctggagtgcaatggcatgatctaggctcactgcaacttccgcctcctgggttcaagccattccactgctcccagcctctaattctcttttgaggacacttaactgatgcttgctggtgtctcttactagttaaaatccatagcatgaggtgctttgaaagggacagaggacacttaactgacgcttgctggtgtctcttactagttaaaatccatagcatgaggttctttgaaagggacagaggacacttacagatttataaattaagaatcaagcagctgggcgcggtggctcatgcctataatcccagcactttaggaggccgctgtaggcagatcacctgaggtcaggagttcgagaccagcctgactaacatggtgaaatcctgtctctactaaaaatacaaaaattagccaggtgtggtggctaatgcctgtaatcccggctactcaggaggctgaggcaggagaattgcttgaacccgggaagtggaggttgcagttagccaagatcacgccgttgcactccagcctgggtgagaagagctaaactccgtctcaaaaaaaaaaaaaaaaaaaaaagaagcaaagaacgctttcttggtctgtaagtgggatgacaaatgattctatgtcaaaggattgttgagttaaatgagattgtacctgggaagcatgaaacagtgcctgctgcatattagccactatcaacactcaggtattagctgctatttccatctgtctatctacagctatttgacatagatgtacttactgaaacaaatatgaagataaaatatgtgtatgtgtatagatataaaattgtcattgcggaagaaatttgtttgtgaaattgctaatctattacaaacacaagtgtccattgtacacacaatttttaacaaaaaacatttaataagtttttggttttttttttttttaattttttgagacagggtcttgctctgttgcccaggctagagagcagtggcacaatcatgacccactgcagacttgtccttctgggctcaagccatcctcccacctcagcttcccgagtagctgggactacaggcatgcaccaccatgcctagctaatttctgtatgttttttgtagacctggggttatgccatgttgcccaggctggtcttgaactcccgagctcaagcgatccacctgcctgggcctcccaaagtgctgcaattacaggcgtgagccactgcgcccaggttaataagttttaaatcaatgaaaataatgatcaaaattttcaaaaacttatgaagttgtattgataacattcaacctgttatggttccctttttaaacaagcattcactttacgaatactaaataggcaatgaatgcctaatatgatttttaagggacaattaaacacttttagaagtgcacagaccaggccaggcacggtggtacacacctctaatcccagcactttgggaggccgaagcgggtgtatcacctgaggtcaggagtttgagaccagcctggccaacgtagtgaaaccccatctctactaaaaatacaaaaattagcctggaatggtggcggcatgcctgtaatcccagctactcgggaggctgaggcaggagaatcgcttgagcctgggaggcggaggttgcagtgagccaagattgcaccactgcactccagcctgggcaacagagcaagagtccatctccaaaaaaaaaaaagacatgcgcagaccaagctggtgaatggtgaagtaccacgatctcaaaggcagaccggaacaggagcagctcaggatggtttctgcacggcaaggtctctccggctccaggtttggtgttgttacaagcaaattgaaatgggtggtgttacaaagggaaatatcacatgggaaaaacggaggaagcctggggctctcgaagtttaggattgtgtatggttcaggggctgcggaatttctgggaattgtaaaattagcgtcgttcacctgacagggttggagagtgaaataaactttccgttgtgtggggaagtccattagatgttcttaatcacttctacagcgtgtactgcagaggtttaagtgggagaagatggctggaacatgaacacgggctcaaggctgccctttcagattgttctgtgacttgacttgctgcctcttctggaaggaggctgtgtatatctttgtacacatgatcacagcaggagaggaaatcggaagcctcctcttcttcctggcctggtcttgactccccatgagactggccctttcgttgcctcttgccggatttaggtttcaccaaaatgcagaaattccttgttgatggctggctctcacccagtagcagccagagctgtgaatgaaaaaggcaaagtccaaacttcaaacctgggctgaggggtgcagggagtgggagggcttgttctgctgttgcttatttcagagcctgacaaatggaggcccacagaccaaacccagctcactacccgcctttgtactgcttatgagctaagaaatatttttaaatggttgaaagtattattttaaatatatattttggctcacgcctgtaatcccagcactttgggaggctgaggtgggtggatcacgaggtcaggagatcgagaccatcctggctaacatggtgaaaccccgtctctactaaaaatacaaaaaattagttgggcatggtggtgggcgcctgtagtcccagctactggggaggctgaggcaggagaatggcatgaacctgggaggcagagcttgcagtgagccgagatcataccactgcactccagcctgggcaacagagtgactccgtctcaaaaaaagaaaaaaaaaaaaaaaatatatatatatatatatatatatatatatgtgcaaattatataaagccccagtttcagtgtccgtaaatatttactgggacacagccacattcattcatgtacataatgtctatggctgctttcccacaacagcagcagagtggaatggtggcgacagggattacccacaaagctgaagacatttactacccatggctctttatgaaaaaatttgatgacccctggcttagatctacaatgtgctagttggttgccagacctaggcaggtggaatccttcccatgccttgtggggaaagacaatagcagataacaagggcctgaaactgggagttgctttcaagaataggggtccaaactgggtgtggtggtccaggcctgtagtcccagctaccgaagaggctgatgagggagtattgcttgagcccaggaatttgaggccaccctgggcaacatagtgaaatctcatctcaaaaaaaaagaaaaaaagaaaaaagaaaaaaaaaaaaaaagaaagaggccgggtgcagtagctcatgcctgtaattctagcactttgggaaactgagacgggtggatcacgaggtcaagagatcgagacaatcctggccaacatggtgaaatcccgtctgtactaaaaatacaaaaattagccaggtgtggtggcacgcacctgtagtctcacctactcgggaggctgaggcgggagaatttcttgaacctgggaggcagaggttgcagtgagctgagatcgtgccactgtactccagcctggtgaaacagcgagactctttctaaaaaaaaaaaaaaaaaaaaaaaagccaggcgcggtggctcacacctgtaatcccagcactttgggaggctgaggtgggcggaacacggggtcaggagatcaagaccatcctggccaacatggtgaaaccccatctctactaaaatacaaaaatttagccgggcatggtggcacgcacctgtagtcccagctacttgggaggctgaggcaggggaatcacttgaacctgggaagcggaggttgcagtgagccgagatggcaccactgcactccagcctggtgacagagcaagactccgtctaaaaaacaaaaacaaaaaacagaattggggtccatttgagagatctccactaagggtggggatgaaagtcatgaaaactgccctttgaccaagtgggatgttctaagattgtctggagacagtaagtggccaacgcgctgtgtctaaaccagccttctgggcaccgttttgcccctgcagcaacatgcccactgctcttcctaacaagcttgccacagagatccacaaaccaaaggctaaataaacaatgcggttcttccggaaggaagggaggtgagaggctgacattcggatttgaacgctgcttgtttggtaggaagtaaacctgggtctcttccagcgagggagcacctctgtaccgtaacactgtattccttgctcaggctggaacaccaagttcagggggcagggtggccctctacacaaccttgttgcccgggttttctttcccatcaccccggtgtccttgcacgcattaagctttccatggatgcaatgacaggcacgcacccttgtcagactctgaacacaaaggcaatcccaggacagactagtgttggaaccgccttcgtttgcctggacacaacgtaactgaaacttctttttcttcccattagctggagtttaaaaagcgtctctacagctgtgatggctgaaggcttgaaatgacagagccacttgccccataaatcagcatgcaacaccccccacgtaaacagatccgggaaaaaaaatctacatacgcaataaatgtgtacaggtactggagactggtaataaaaatgcttggatctgctttcagtttttcccttgtcttctaaatgaagctgaaagcaaatcaagcactaagcccttatttttctgatctgaaagcaggtgaatgtggtcaagagcaggagatatgcagatgaaggggggacccctaatagtggaaacctgggtgttcatagcctctttggggaagcaaagccttgggcagatccccagggtgaaagcgtagactctttttaaagactgggcaggagggagggagcaggcgaggctggagcccgcattgttgggctgctctgacttacatggcacctgtagacccagggagaacctgagaaggggctcctgggccaggggccaggcaggtatttgtggttgtgtgtgtgtgtgcatgcctatgcactgtcgtagaccagggtttcacagcttttaagaacaataaaaacattcagaattcttctagtggccccacgacgtagggccttctggttatttaagatctccaacatgcgtcaaaagcagcttaggaggggagtccagatcatccctacagctgcagaagagcacagcagccagtaagaaagaagggtagtgggggagcggggtgtgggggaacatggatggttccagaatttcttcagagaattagtcaagggtctgaagttggcatgaaacggggtttgaggaactggggagttgactgggagctggttttgcagagcaaacatactgctttaatgtaaatcaagtagttttgttcatttgatttaggaggctggagtatgatacggtttggctctgtatccccacccaaatctcatcacgaattgtgatccccacatgttgagggaggtacctgtaatccctacgtgttgaggggaggaggtgattggatcatgggggtggtttcccccatgctgttcttatgatggtgagtgagttctcctgacatctgatggttttataagtgtttgacagttcctcctacacacattctctctcgcacctgccacggtgtaagatgtgccttcttcaactttggccgtgactgtaagttccctgagacctcccccgccatgtggaactgtgaatcaatgaagcctcttttctttataaattacccagtcacgggtatatctttatagcaatgtgaaaacagactaatgtagagtttaaaaatctccccaagctacctcaccctggcctgccacttccaaaaggtctagttagcccgaatagtttcatttctaagcccttctctcaatcttccagaccaaagttgtagccaccccaggggtgcctgctccccatccttgcaggtaagaagggacatgcgtattttcctgctcccccacactcctttaagcagtcatgcctcgcctgttggctgcttgttgtgcctggctgatggatgcagctccaaagctgaaacaccgtcagagtttgtgtgaagggagttggggtggagtggttaacttatctcccatgaggcaggtgctttgacccaaggggcatggtacattctagaaatgtgtagccaccccccgtttccaggggagaataggctgtttgggtagagctggcatcacgaggggagaaacgaggct

SEQ ID NO: 564 - DNA, 5000 bp, Homo sapiens
tctctgatcctgtttccttatcagaaactgggaatagtactctgcagggtggttgggcagatgaaatagaatcacctatgtagtgtgaccctcccatagtagggcctccattaatattcagttttttcctctcatttctattgtttagaaggacagaaacatgcaatgtcctgcgaacatttccaagtggcttcctctcctccaaaagcttcagctgcctggcaaccctccccgcagtatcaagcaggcgcattttaaagtctctttagcgggagggcagggttagagccttcggtcacttgttttctaacttgacataaaacaacgtaacgcagtcactcagcgagccgttggccagcctcgctcgcccggggaggagggaggaggtggccgggcgggcggcgggtgcggagcgggcgagggagcgcgcgcggccgccacaaagctcgggcgccgcggggctgcatgcggcgtacctggcccggcgcggcgactgctctccgggctggcgggggccggccgcgagccccgggggccccgaggccgcagcttgcctgcgcgctctgagccttcgcaactcgcgagcaaagtttggtggaggcaacgccaagcctgagtcctttcttcctctcgttccccaaatccgagggcagcccgcgggcgtcatgcccgcgctcctccgcagcctggggtacgcgtgaagcccgggaggcttggcgccggcgaagacccaaggaccactcttctgcgtttggagttgctccccacaaccccgggctcgtcgctttctccatcccgacccacgcggggcgcggggacaacacaggtcgcggaggagcgttgccattcaagtgactgcagcagcagcggcagcgcctcggttcctgagcccaccgcaggctgaaggcattgcgcgtagtccatgcccgtagaggaagtgtgcagatgggattaacgtccacatggagatatggaagaggaccggggattggtaccgtaaccatggtcagctggggtcgtttcatctgcctggtcgtggtcaccatggcaaccttgtccctggcccggccctccttcagtttagttgaggataccacattagagccagaagagccaccaaccaaataccaaatctctcaaccagaagtgtacgtggctgcgccaggggagtcgctagaggtgcgctgcctgttgaaagatgccgccgtgatcagttggactaaggatggggtgcacttggggcccaacaataggacagtgcttattggggagtacttgcagataaagggcgccacgcctagagactccggcctctatgcttgtactgccagtaggactgtagacagtgaaacttggtacttcatggtgaatgtcacagatgccatctcatccggagatgatgaggatgacaccgatggtgcggaagattttgtcagtgagaacagtaacaacaagagagcaccatactggaccaacacagaaaagatggaaaagcggctccatgctgtgcctgcggccaacactgtcaagtttcgctgcccagccggggggaacccaatgccaaccatgcggtggctgaaaaacgggaaggagtttaagcaggagcatcgcattggaggctacaaggtacgaaaccagcactggagcctcattatggaaagtgtggtcccatctgacaagggaaattatacctgtgtggtggagaatgaatacgggtccatcaatcacacgtaccacctggatgttgtggagcgatcgcctcaccggcccatcctccaagccggactgccggcaaatgcctccacagtggtcggaggagacgtagagtttgtctgcaaggtttacagtgatgcccagccccacatccagtggatcaagcacgtggaaaagaacggcagtaaatacgggcccgacgggctgccctacctcaaggttctcaaggccgccggtgttaacaccacggacaaagagattgaggttctctatattcggaatgtaacttttgaggacgctggggaatatacgtgcttggcgggtaattctattgggatatcctttcactctgcatggttgacagttctgccagcgcctggaagagaaaaggagattacagcttccccagactacctggagatagccatttactgcataggggtcttcttaatcgcctgtatggtggtaacagtcatcctgtgccgaatgaagaacacgaccaagaagccagacttcagcagccagccggctgtgcacaagctgaccaaacgtatccccctgcggagacaggtaacagaaagtttcggctgagtccagctcctccatgaactccaacaccccgctggtgaggataacaacacgcctctcttcaacggcagacacccccatgctggcaggggtctccgagtatgaacttccagaggacccaaaatgggagtttccaagagataagctgacactgggcaagcccctgggagaaggttgctttgggcaagtggtcatggcggaagcagtgggaattgacaaagacaagcccaaggaggcggtcaccgtggccgtgaagatgttgaaagatgatgccacagagaaagacctttctgatctggtgtcagagatggagatgatgaagatgattgggaaacacaagaatatcataaatcttcttggagcctgcacacaggatgggcctctctatgtcatagttgagtatgcctctaaaggcaacctccgagaatacctccgagcccggaggccacccgggatggagtactcctatgacattaaccgtgttcctgaggagcagatgaccttcaaggacttggtgtcatgcacctaccagctggccagaggcatggagtacttggcttcccaaaaatgtattcatcgagatttagcagccagaaatgttttggtaacagaaaacaatgtgatgaaaatagcagactttggactcgccagagatatcaacaatatagactattacaaaaagaccaccaatgggcggcttccagtcaagtggatggctccagaagccctgtttgatagagtatacactcatcagagtgatgtctggtccttcggggtgttaatgtgggagatcttcactttagggggctcgccctacccagggattcccgtggaggaactttttaagctgctgaaggaaggacacagaatggataagccagccaactgcaccaacgaactgtacatgatgatgagggactgttggcatgcagtgccctcccagagaccaacgttcaagcagttggtagaagacttggatcgaattctcactctcacaaccaatgaggaatacttggacctcagccaacctctcgaacagtattcacctagttaccctgacacaagaagttcttgttcttcaggagatgattctgttttttctccagaccccatgccttacgaaccatgccttcctcagtatccacacataaacggcagtgttaaaacatgaatgactgtgtctgcctgtccccaaacaggacagcactgggaacctagctacactgagcagggagaccatgcctcccagagcttgttgtctccacttgtatatatggatcagaggagtaaataattggaaaagtaatcagcatatgtgtaaagatttatacagttgaaaacttgtaatcttccccaggaggagaagaaggtttctggagcagtggactgccacaagccaccatgtaacccctctcacctgccgtgcgtactggctgtggaccagtaggactcaaggtggacgtgcgttctgccttccttgttaattttgtaataattggagaagatttatgtcagcacacacttacagagcacaaatgcagtatataggtgctggatgtatgtaaatatattcaaattatgtataaatatatattatatatttacaaggagttattttttgtattgattttaaatggatgtcccaatgcacctagaaaattggtctctctttttttaatagctatttgctaaatgctgttcttacacataatttcttaattttcaccgagcagaggtggaaaaatacttttgctttcagggaaaatggtataacgttaatttattaataaattggtaatatacaaaacaattaatcatttatagttttttttgtaatttaagtggcatttctatgcaggcagcacagcagactagttaatctattgcttggacttaactagttatcagatcctttgaaaagagaatatttacaatatatgactaatttggggaaaatgaagttttgatttatttgtgtttaaatgctgctgtcagacgattgttcttagacctcctaaatgccccatattaaaagaactcattcataggaaggtgtttcattttggtgtgcaaccctgtcattacgtcaacgcaacgtctaactggacttcccaagataaatggtaccagcgtcctcttaaaagatgccttaatccattccttgaggacagaccttagttgaaatgatagcagaatgtgcttctctctggcagctggccttctgcttctgagttgcacattaatcagattagcctgtattctcttcagtgaattttgataatggcttccagactctttggcgttggagacgcctgttaggatcttcaagtcccatcatagaaaattgaaacacagagttgttctgctgatagttttggggatacgtccatctttttaagggattgctttcatctaattctggcaggacctcaccaaaagatccagcctcatacctacatcagacaaaatatcgccgttgttccttctgtactaaagtattgtgttttgctttggaaacacccactcactttgcaatagccgtgcaagatgaatgcagattacactgatcttatgtgttacaaaattggagaaagtatttaataaaacctgttaatttttatactgacaataaaaatgtttctacagatattaatgttaacaagacaaaataaatgtcacgcaacttatttttttaatac

SEQ ID NO: 565 - protein, 448 aa, Homo sapiens
MGLTSTWRYGRGPGIGTVTMVSWGRFICLVVVTMATLSLARPSFSLVEDTTLEPEEPPTKYQISQPEVYVAAPGESLEVRCLLKDAAVISWTKDGVHLGPNNRTVLIGEYLQIKGATPRDSGACTASRTVDSETWYFMVNVTDAISSGDDEDDTDGAEDFVSENSNNKRAPYWTNTEKMEKRLHAVPAANTVKFRCPAGGNPMPTMRWLKNGKEFKQEHRIGGYKVRNQHWSLIMESVVPSDKGNYTCVVENEYGSINHTYHLDVVERSPHRPILQAGLPANASTVVGGDVEFVCKVYSDAQPHIQWIKHVEKNGSKYGPDGLPYLKVLKAAGVNTTDKEIEVLYIRNVTFEDAGEYTCLAGNSIGISFHSAWLTVLPAPGREKEITDDYLEIAIYCIGVFLIACMVVTVILCRMKNTTKKPDFSSQPAVHKLTKRIPLRRQVTESFG

SEQ ID NO: 566 - DNA, 4612 bp, Homo sapiens
cgggcgggcggcgggtgcggagcgggcgagggagcgcgcgcggccgccacaaagctcgggcgccgcggggctgcatgcggcgtacctggcccggcgcggcgactgctctccgggctggcgggggccggccgcgagccccgggggccccgaggccgcagcttgcctgcgcgctctgagccttcgcaactcgcgagcaaagtttggtggaggcaacgccaagcctgagtcctttcttcctctcgttccccaaatccgagggcagcccgcgggcgtcatgcccgcgctcctccgcagcctggggtacgcgtgaagcccgggaggcttggcgccggcgaagacccaaggaccactcttctgcgtttggagttgctccccacaaccccgggctcgtcgctttctccatcccgacccacgcggggcgcggggacaacacaggtcgcggaggagcgttgccattcaagtgactgcagcagcagcggcagcgcctcggttcctgagcccaccgcaggctgaaggcattgcgcgtagtccatgcccgtagaggaagtgtgcagatgggattaacgtccacatggagatatggaagaggaccggggattggtaccgtaaccatggtcagctggggtcgtttcatctgcctggtcgtggtcaccatggcaaccttgtccctggcccggccctccttcagtttagttgaggataccacattagagccagaagagccaccaaccaaataccaaatctctcaaccagaagtgtacgtggctgcgccaggggagtcgctagaggtgcgctgcctgttgaaagatgccgccgtgatcagttggactaaggatggggtgcacttggggcccaacaataggacagtgcttattggggagtacttgcagataaagggcgccacgcctagagactccggcctctatgcttgtactgccagtaggactgtagacagtgaaacttggtacttcatggtgaatgtcacagatgccatctcatccggagatgatgaggatgacaccgatggtgcggaagattttgtcagtgagaacagtaacaacaagagagcaccatactggaccaacacagaaaagatggaaaagcggctccatgctgtgcctgcggccaacactgtcaagtttcgctgcccagccggggggaacccaatgccaaccatgcggtggctgaaaaacgggaaggagtttaagcaggagcatcgcattggaggctacaaggtacgaaaccagcactggagcctcattatggaaagtgtggtcccatctgacaagggaaattatacctgtgtggtggagaatgaatacgggtccatcaatcacacgtaccacctggatgttgtggagcgatcgcctcaccggcccatcctccaagccggactgccggcaaatgcctccacagtggtcggaggagacgtagagtttgtctgcaaggtttacagtgatgcccagccccacatccagtggatcaagcacgtggaaaagaacggcagtaaatacgggcccgacgggctgccctacctcaaggttctcaagcactcggggataaatagttccaatgcagaagtgctggctctgttcaatgtgaccgaggcggatgctggggaatatatatgtaaggtctccaattatatagggcaggccaaccagtctgcctggctcactgtcctgccaaaacagcaagcgcctggaagagaaaaggagattacagcttccccagactacctggagatagccatttactgcataggggtcttcttaatcgcctgtatggtggtaacagtcatcctgtgccgaatgaagaacacgaccaagaagccagacttcagcagccagccggctgtgcacaagctgaccaaacgtatccccctgcggagacaggtaacagaaagtttcggctgagtccagctcctccatgaactccaacaccccgctggtgaggataacaacacgcctctcttcaacggcagacacccccatgctggcaggggtctccgagtatgaacttccagaggacccaaaatgggagtttccaagagataagctgacactgggcaagcccctgggagaaggttgctttgggcaagtggtcatggcggaagcagtgggaattgacaaagacaagcccaaggaggcggtcaccgtggccgtgaagatgttgaaagatgatgccacagagaaagacctttctgatctggtgtcagagatggagatgatgaagatgattgggaaacacaagaatatcataaatcttcttggagcctgcacacaggatgggcctctctatgtcatagttgagtatgcctctaaaggcaacctccgagaatacctccgagcccggaggccacccgggatggagtactcctatgacattaaccgtgttcctgaggagcagatgaccttcaaggacttggtgtcatgcacctaccagctggccagaggcatggagtacttggcttcccaaaaatgtattcatcgagatttagcagccagaaatgttttggtaacagaaaacaatgtgatgaaaatagcagactttggactcgccagagatatcaacaatatagactattacaaaaagaccaccaatgggcggcttccagtcaagtggatggctccagaagccctgtttgatagagtatacactcatcagagtgatgtctggtccttcggggtgttaatgtgggagatcttcactttagggggctcgccctacccagggattcccgtggaggaactttttaagctgctgaaggaaggacacagaatggataagccagccaactgcaccaacgaactgtacatgatgatgagggactgttggcatgcagtgccctcccagagaccaacgttcaagcagttggtagaagacttggatcgaattctcactctcacaaccaatgaggaatacttggacctcagccaacctctcgaacagtattcacctagttaccctgacacaagaagttcttgttcttcaggagatgattctgttttttctccagaccccatgccttacgaaccatgccttcctcagtatccacacataaacggcagtgttaaaacatgaatgactgtgtctgcctgtccccaaacaggacagcactgggaacctagctacactgagcagggagaccatgcctcccagagcttgttgtctccacttgtatatatggatcagaggagtaaataattggaaaagtaatcagcatatgtgtaaagatttatacagttgaaaacttgtaatcttccccaggaggagaagaaggtttctggagcagtggactgccacaagccaccatgtaacccctctcacctgccgtgcgtactggctgtggaccagtaggactcaaggtggacgtgcgttctgccttccttgttaattttgtaataattggagaagatttatgtcagcacacacttacagagcacaaatgcagtatataggtgctggatgtatgtaaatatattcaaattatgtataaatatatattatatatttacaaggagttattttttgtattgattttaaatggatgtcccaatgcacctagaaaattggtctctctttttttaatagctatttgctaaatgctgttcttacacataatttcttaattttcaccgagcagaggtggaaaaatacttttgctttcagggaaaatggtataacgttaatttattaataaattggtaatatacaaaacaattaatcatttatagttttttttgtaatttaagtggcatttctatgcaggcagcacagcagactagttaatctattgcttggacttaactagttatcagatcctttgaaaagagaatatttacaatatatgactaatttggggaaaatgaagttttgatttatttgtgtttaaatgctgctgtcagacgattgttcttagacctcctaaatgccccatattaaaagaactcattcataggaaggtgtttcattttggtgtgcaaccctgtcattacgtcaacgcaacgtctaactggacttcccaagataaatggtaccagcgtcctcttaaaagatgccttaatccattccttgaggacagaccttagttgaaatgatagcagaatgtgcttctctctggcagctggccttctgcttctgagttgcacattaatcagattagcctgtattctcttcagtgaattttgataatggcttccagactctttggcgttggagacgcctgttaggatcttcaagtcccatcatagaaaattgaaacacagagttgttctgctgatagttttggggatacgtccatctttttaagggattgctttcatctaattctggcaggacctcaccaaaagatccagcctcatacctacatcagacaaaatatcgccgttgttccttctgtactaaagtattgtgttttgctttggaaacacccactcactttgcaatagccgtgcaagatgaatgcagattacactgatcttatgtgttacaaaattggagaaagtatttaataaaacctgttaatttttatactgacaataaaaatgtttctacagatattaatgttaacaagacaaaataaatgtcacgcaacttatttttttaatac

SEQ ID NO: 567 - protein, 449 aa, Homo sapiens
MGLTSTWRYGRGPGIGTVTMVSWGRFICLVVVTMATLSLARPSFSLVEDTTLEPEEPPTKYQISQPEVYVAAPGESLEVRCLLKDAAVISWTKDGVHLGPNNRTVLIGEYLQIKGATPRDSGACTASRTVDSETWYFMVNVTDAISSGDDEDDTDGAEDFVSENSNNKRAPYWTNTEKMEKRLHAVPAANTVKFRCPAGGNPMPTMRWLKNGKEFKQEHRIGGYKVRNQHWSLIMESVVPSDKGNYTCVVENEYGSINHTYHLDVVERSPHRPILQAGLPANASTVVGGDVEFVCKVYSDAQPHIQWIKHVEKNGSKYGPDGLPYLKVLKHSGINSSNAEVLALFNVTEADAGEYICKVSNYIGQANQSAWLTVLPKQQAPGREKEITDDYLEIAIYCIGVFLIACMVVTVILCRMKNTTKKPDFSSQPAVHKLTKRIPLRRQVTESFG

SEQ ID NO: 568 - DNA, 4130 bp, Homo sapiens
tctctgatcctgtttccttatcagaaactgggaatagtactctgcagggtggttgggcagatgaaatagaatcacctatgtagtgtgaccctcccatagtagggcctccattaatattcagttttttcctctcatttctattgtttagaaggacagaaacatgcaatgtcctgcgaacatttccaagtggcttcctctcctccaaaagcttcagctgcctggcaaccctccccgcagtatcaagcaggcgcattttaaagtctctttagcgggagggcagggttagagccttcggtcacttgttttctaacttgacataaaacaacgtaacgcagtcactcagcgagccgttggccagcctcgctcgcccggggaggagggaggaggtggccgggcgggcggcgggtgcggagcgggcgagggagcgcgcgcggccgccacaaagctcgggcgccgcggggctgcatgcggcgtacctggcccggcgcggcgactgctctccgggctggcgggggccggccgcgagccccgggggccccgaggccgcagcttgcctgcgcgctctgagccttcgcaactcgcgagcaaagtttggtggaggcaacgccaagcctgagtcctttcttcctctcgttccccaaatccgagggcagcccgcgggcgtcatgcccgcgctcctccgcagcctggggtacgcgtgaagcccgggaggcttggcgccggcgaagacccaaggaccactcttctgcgtttggagttgctccccacaaccccgggctcgtcgctttctccatcccgacccacgcggggcgcggggacaacacaggtcgcggaggagcgttgccattcaagtgactgcagcagcagcggcagcgcctcggttcctgagcccaccgcaggctgaaggcattgcgcgtagtccatgcccgtagaggaagtgtgcagatgggattaacgtccacatggagatatggaagaggaccggggattggtaccgtaaccatggtcagctggggtcgtttcatctgcctggtcgtggtcaccatggcaaccttgtccctggcccggccctccttcagtttagttgaggataccacattagagccagaaggagcaccatactggaccaacacagaaaagatggaaaagcggctccatgctgtgcctgcggccaacactgtcaagtttcgctgcccagccggggggaacccaatgccaaccatgcggtggctgaaaaacgggaaggagtttaagcaggagcatcgcattggaggctacaaggtacgaaaccagcactggagcctcattatggaaagtgtggtcccatctgacaagggaaattatacctgtgtggtggagaatgaatacgggtccatcaatcacacgtaccacctggatgttgtggagcgatcgcctcaccggcccatcctccaagccggactgccggcaaatgcctccacagtggtcggaggagacgtagagtttgtctgcaaggtttacagtgatgcccagccccacatccagtggatcaagcacgtggaaaagaacggcagtaaatacgggcccgacgggctgccctacctcaaggttctcaagcactcggggataaatagttccaatgcagaagtgctggctctgttcaatgtgaccgaggcggatgctggggaatatatatgtaaggtctccaattatatagggcaggccaaccagtctgcctggctcactgtcctgccaaaacagcaagcgcctggaagagaaaaggagattacagcttccccagactacctggagatagccatttactgcataggggtcttcttaatcgcctgtatggtggtaacagtcatcctgtgccgaatgaagaacacgaccaagaagccagacttcagcagccagccggctgtgcacaagctgaccaaacgtatccccctgcggagacaggtttcggctgagtccagctcctccatgaactccaacaccccgctggtgaggataacaacacgcctctcttcaacggcagacacccccatgctggcaggggtctccgagtatgaacttccagaggacccaaaatgggagtttccaagagataagctgacactgggcaagcccctgggagaaggttgctttgggcaagtggtcatggcggaagcagtgggaattgacaaagacaagcccaaggaggcggtcaccgtggccgtgaagatgttgaaagatgatgccacagagaaagacctttctgatctggtgtcagagatggagatgatgaagatgattgggaaacacaagaatatcataaatcttcttggagcctgcacacaggatgggcctctctatgtcatagttgagtatgcctctaaaggcaacctccgagaatacctccgagcccggaggccacccgggatggagtactcctatgacattaaccgtgttcctgaggagcagatgaccttcaaggacttggtgtcatgcacctaccagctggccagaggcatggagtacttggcttcccaaaaatgtattcatcgagatttagcagccagaaatgttttggtaacagaaaacaatgtgatgaaaatagcagactttggactcgccagagatatcaacaatatagactattacaaaaagaccaccaatgggcggcttccagtcaagtggatggctccagaagccctgtttgatagagtatacactcatcagagtgatgtctggtccttcggggtgttaatgtgggagatcttcactttagggggctcgccctacccagggattcccgtggaggaactttttaagctgctgaaggaaggacacagaatggataagccagccaactgcaccaacgaactgtacatgatgatgagggactgttggcatgcagtgccctcccagagaccaacgttcaagcagttggtagaagacttggatcgaattctcactctcacaaccaatgaggaatacttggacctcagccaacctctcgaacagtattcacctagttaccctgacacaagaagttcttgttcttcaggagatgattctgttttttctccagaccccatgccttacgaaccatgccttcctcagtatccacacataaacggcagtgttaaaacatgaatgactgtgtctgcctgtccccaaacaggacagcactgggaacctagctacactgagcagggagaccatgcctcccagagcttgttgtctccacttgtatatatggatcagaggagtaaataattggaaaagtaatcagcatatgtgtaaagatttatacatggactgccacaagccaccatgtaacccctctcacctgccgtgcgtactggctgtggaccagtaggactcaaggtggacgtgcgttctgccttccttgttaattttgtaataattggagaagatttatgtcagcacacacttacagagcacaaatgcagtatataggtgctggatgtatgtaaatatattcaaattatgtataaatatatattatatatttacaaggagttattttttgtattgattttaaatggatgtcccaatgcacctagaaaattggtctctctttttttaatagctatttgctaaatgctgttcttacacataatttcttaattttcaccgagcagaggtggaaaaatacttttgctttcagggaaaatggtataacgttaatttattaataaattggtaatatacaaaacaattaatcatttatagttttttttgtaatttaagtggcatttctatgcaggcagcacagcagactagttaatctattgcttggacttaactagttatcagatcctttgaaaagagaatatttacaatatatgactaatttggggaaaatgaagttttgatttatttgtgtttaaatgctgctgtcagacgattgttcttagacctcctaaatgccccatattaaaagaactcattcataggaaggtgtttcattttggtgtgcaaccctgtcattacgtcaacgcaacgtctaactggacttcccaagataaatggtaccagcgtcctcttaaaagatgccttaatccattccttgaggacagaccttagttgaaatgatagcagaatgtgcttctctctggcagctggccttctgcttctga

SEQ ID NO: 569 - protein, 720 aa, Homo sapiens
MGLTSTWRYGRGPGIGTVTMVSWGRFICLVVVTMATLSLARPSFSLVEDTTLEPEGAPYWTNTEKMEKRLHAVPAANTVKFRCPAGGNPMPTMRWLKNGKEFKQEHRIGGYKVRNQHWSLIMESVVPSDKGNYTCVVENEYGSINHTYHLDVVERSPHRPILQAGLPANASTVVGGDVEFVCKVYSDAQPHIQWIKHVEKNGSKYGPDGLPYLKVLKHSGINSSNAEVLALFNVTEADAGEYICKVSNYIGQANQSAWLTVLPKQQAPGREKEITDDYLEIAIYCIGVFLIACMVVTVILCRMKNTTKKPDFSSQPAVHKLTKRIPLRRQVSAESSSSMNSNTPLVRITTRLSSTADTPMLAGVSEYELPEDPKWEFPRDKLTLGKPLGEGCFGQVVMAEAVGIDKDKPKEAVTVAVKMLKDDATEKDLSDLVSEMEMMKMIGKHKNIINLLGACTQDGPLYVIVEYASKGNLREYLRARRPPGMEYSYDINRVPEEQMTFKDLVSCTYQLRMEYLASQKCIHRDLAARNVLVTENNVMKIADFGLARDINNIDYYKKTTNGRLPVKWMAPEALFDRVYTHQSDVWSFGVLMWEIFTLGGSPYPGIPVEELFKLLKEGHRMDKPANCTNELYMMMRDCWHAVPSQRPTFKQLVEDLDRILTLTTNEEYLDLSQPLEQYSPSYPDTRSSCSSGDDSVFSPDPMPYEPCLPQYPHINGSVKT

SEQ ID NO: 570 - DNA, 3238 bp, Homo sapiens
cgggcgggcggcgggtgcggagcgggcgagggagcgcgcgcggccgccacaaagctcgggcgccgcggggctgcatgcggcgtacctggcccggcgcggcgactgctctccgggctggcgggggccggccgcgagccccgggggccccgaggccgcagcttgcctgcgcgctctgagccttcgcaactcgcgagcaaagtttggtggaggcaacgccaagcctgagtcctttcttcctctcgttccccaaatccgagggcagcccgcgggcgtcatgcccgcgctcctccgcagcctggggtacgcgtgaagcccgggaggcttggcgccggcgaagacccaaggaccactcttctgcgtttggagttgctccccacaaccccgggctcgtcgctttctccatcccgacccacgcggggcgcggggacaacacaggtcgcggaggagcgttgccattcaagtgactgcagcagcagcggcagcgcctcggttcctgagcccaccgcaggctgaaggcattgcgcgtagtccatgcccgtagaggaagtgtgcagatgggattaacgtccacatggagatatggaagaggaccggggattggtaccgtaaccatggtcagctggggtcgtttcatctgcctggtcgtggtcaccatggcaaccttgtccctggcccggccctccttcagtttagttgaggataccacattagagccagaagagccaccaaccaaataccaaatctctcaaccagaagtgtacgtggctgcgccaggggagtcgctagaggtgcgctgcctgttgaaagatgccgccgtgatcagttggactaaggatggggtgcacttggggcccaacaataggacagtgcttattggggagtacttgcagataaagggcgccacgcctagagactccggcctctatgcttgtactgccagtaggactgtagacagtgaaacttggtacttcatggtgaatgtcacagatgccatctcatccggagatgatgaggatgacaccgatggtgcggaagattttgtcagtgagaacagtaacaacaagagagcaccatactggaccaacacagaaaagatggaaaagcggctccatgctgtgcctgcggccaacactgtcaagtttcgctgcccagccggggggaacccaatgccaaccatgcggtggctgaaaaacgggaaggagtttaagcaggagcatcgcattggaggctacaaggtacgaaaccagcactggagcctcattatggaaagtgtggtcccatctgacaagggaaattatacctgtgtggtggagaatgaatacgggtccatcaatcacacgtaccacctggatgttgtggagcgatcgcctcaccggcccatcctccaagccggactgccggcaaatgcctccacagtggtcggaggagacgtagagtttgtctgcaaggtttacagtgatgcccagccccacatccagtggatcaagcacgtggaaaagaacggcagtaaatacgggcccgacgggctgccctacctcaaggttctcaaggccgccggtgttaacaccacggacaaagagattgaggttctctatattcggaatgtaacttttgaggacgctggggaatatacgtgcttggcgggtaattctattgggatatcctttcactctgcatggttgacagttctgccagcgcctggaagagaaaaggagattacagcttccccagactacctggagatagccatttactgcataggggtcttcttaatcgcctgtatggtggtaacagtcatcctgtgccgaatgaagaacacgaccaagaagccagacttcagcagccagccggctgtgcacaagctgaccaaacgtatccccctgcggagacaggtaacagaaagtttcggctgagtccagctcctccatgaactccaacaccccgctggtgaggataacaacacgcctctcttcaacggcagacacccccatgctggcaggggtctccgagtatgaacttccagaggacccaaaatgggagtttccaagagataagctgacactgggcaagcccctgggagaaggttgctttgggcaagtggtcatggcggaagcagtgggaattgacaaagacaagcccaaggaggcggtcaccgtggccgtgaagatgttgaaagatgatgccacagagaaagacctttctgatctggtgtcagagatggagatgatgaagatgattgggaaacacaagaatatcataaatcttcttggagcctgcacacaggatgggcctctctatgtcatagttgagtatgcctctaaaggcaacctccgagaatacctccgagcccggaggccacccgggatggagtactcctatgacattaaccgtgttcctgaggagcagatgaccttcaaggacttggtgtcatgcacctaccagctggccagaggcatggagtacttggcttcccaaaaatgtattcatcgagatttagcagccagaaatgttttggtaacagaaaacaatgtgatgaaaatagcagactttggactcgccagagatatcaacaatatagactattacaaaaagaccaccaatgggcggcttccagtcaagtggatggctccagaagccctgtttgatagagtatacactcatcagagtgatgtctggtccttcggggtgttaatgtgggagatcttcactttagggggctcgccctacccagggattcccgtggaggaactttttaagctgctgaaggaaggacacagaatggataagccagccaactgcaccaacgaactgtacatgatgatgagggactgttggcatgcagtgccctcccagagaccaacgttcaagcagttggtagaagacttggatcgaattctcactctcacaaccaatgagatctgaaagtttatggcttcattgagaaactgggaaaagttggtcaggcgcagtggctcatgcctgtaatcccagcactttgggaggccgaggcaggcggatcatgaggtcaggagttccagaccagcctggccaacatggtgaaaccctgtctctactaaagatacaaaaaattagccgggcgtgttggtgtgcgcctgtaatcccagctactccgggaggctgaggcaggagagtcacttgaaccggggaggcggaggttgcagtgagccgagatcatgccattgcattccagccttggcgacagagcgagactccgtct

SEQ ID NO: 571 - protein, 448 aa, Homo sapiens; identical to SEQ ID NO: 565

SEQ ID NO: 572 - DNA, 5003 bp, Homo sapiens
tctctgatcctgtttccttatcagaaactgggaatagtactctgcagggtggttgggcagatgaaatagaatcacctatgtagtgtgaccctcccatagtagggcctccattaatattcagttttttcctctcatttctattgtttagaaggacagaaacatgcaatgtcctgcgaacatttccaagtggcttcctctcctccaaaagcttcagctgcctggcaaccctccccgcagtatcaagcaggcgcattttaaagtctctttagcgggagggcagggttagagccttcggtcacttgttttctaacttgacataaaacaacgtaacgcagtcactcagcgagccgttggccagcctcgctcgcccggggaggagggaggaggtggccgggcgggcggcgggtgcggagcgggcgagggagcgcgcgcggccgccacaaagctcgggcgccgcggggctgcatgcggcgtacctggcccggcgcggcgactgctctccgggctggcgggggccggccgcgagccccgggggccccgaggccgcagcttgcctgcgcgctctgagccttcgcaactcgcgagcaaagtttggtggaggcaacgccaagcctgagtcctttcttcctctcgttccccaaatccgagggcagcccgcgggcgtcatgcccgcgctcctccgcagcctggggtacgcgtgaagcccgggaggcttggcgccggcgaagacccaaggaccactcttctgcgtttggagttgctccccacaaccccgggctcgtcgctttctccatcccgacccacgcggggcgcggggacaacacaggtcgcggaggagcgttgccattcaagtgactgcagcagcagcggcagcgcctcggttcctgagcccaccgcaggctgaaggcattgcgcgtagtccatgcccgtagaggaagtgtgcagatgggattaacgtccacatggagatatggaagaggaccggggattggtaccgtaaccatggtcagctggggtcgtttcatctgcctggtcgtggtcaccatggcaaccttgtccctggcccggccctccttcagtttagttgaggataccacattagagccagaagagccaccaaccaaataccaaatctctcaaccagaagtgtacgtggctgcgccaggggagtcgctagaggtgcgctgcctgttgaaagatgccgccgtgatcagttggactaaggatggggtgcacttggggcccaacaataggacagtgcttattggggagtacttgcagataaagggcgccacgcctagagactccggcctctatgcttgtactgccagtaggactgtagacagtgaaacttggtacttcatggtgaatgtcacagatgccatctcatccggagatgatgaggatgacaccgatggtgcggaagattttgtcagtgagaacagtaacaacaagagagcaccatactggaccaacacagaaaagatggaaaagcggctccatgctgtgcctgcggccaacactgtcaagtttcgctgcccagccggggggaacccaatgccaaccatgcggtggctgaaaaacgggaaggagtttaagcaggagcatcgcattggaggctacaaggtacgaaaccagcactggagcctcattatggaaagtgtggtcccatctgacaagggaaattatacctgtgtggtggagaatgaatacgggtccatcaatcacacgtaccacctggatgttgtggagcgatcgcctcaccggcccatcctccaagccggactgccggcaaatgcctccacagtggtcggaggagacgtagagtttgtctgcaaggtttacagtgatgcccagccccacatccagtggatcaagcacgtggaaaagaacggcagtaaatacgggcccgacgggctgccctacctcaaggttctcaagcactcggggataaatagttccaatgcagaagtgctggctctgttcaatgtgaccgaggcggatgctggggaatatatatgtaaggtctccaattatatagggcaggccaaccagtctgcctggctcactgtcctgccaaaacagcaagcgcctggaagagaaaaggagattacagcttccccagactacctggagatagccatttactgcataggggtcttcttaatcgcctgtatggtggtaacagtcatcctgtgccgaatgaagaacacgaccaagaagccagacttcagcagccagccggctgtgcacaagctgaccaaacgtatccccctgcggagacaggtaacagaaagtttcggctgagtccagctcctccatgaactccaacaccccgctggtgaggataacaacacgcctctcttcaacggcagacacccccatgctggcaggggtctccgagtatgaacttccagaggacccaaaatgggagtttccaagagataagctgacactgggcaagcccctgggagaaggttgctttgggcaagtggtcatggcggaagcagtgggaattgacaaagacaagcccaaggaggcggtcaccgtggccgtgaagatgttgaaagatgatgccacagagaaagacctttctgatctggtgtcagagatggagatgatgaagatgattgggaaacacaagaatatcataaatcttcttggagcctgcacacaggatgggcctctctatgtcatagttgagtatgcctctaaaggcaacctccgagaatacctccgagcccggaggccacccgggatggagtactcctatgacattaaccgtgttcctgaggagcagatgaccttcaaggacttggtgtcatgcacctaccagctggccagaggcatggagtacttggcttcccaaaaatgtattcatcgagatttagcagccagaaatgttttggtaacagaaaacaatgtgatgaaaatagcagactttggactcgccagagatatcaacaatatagactattacaaaaagaccaccaatgggcggcttccagtcaagtggatggctccagaagccctgtttgatagagtatacactcatcagagtgatgtctggtccttcggggtgttaatgtgggagatcttcactttagggggctcgccctacccagggattcccgtggaggaactttttaagctgctgaaggaaggacacagaatggataagccagccaactgcaccaacgaactgtacatgatgatgagggactgttggcatgcagtgccctcccagagaccaacgttcaagcagttggtagaagacttggatcgaattctcactctcacaaccaatgaggaatacttggacctcagccaacctctcgaacagtattcacctagttaccctgacacaagaagttcttgttcttcaggagatgattctgttttttctccagaccccatgccttacgaaccatgccttcctcagtatccacacataaacggcagtgttaaaacatgaatgactgtgtctgcctgtccccaaacaggacagcactgggaacctagctacactgagcagggagaccatgcctcccagagcttgttgtctccacttgtatatatggatcagaggagtaaataattggaaaagtaatcagcatatgtgtaaagatttatacagttgaaaacttgtaatcttccccaggaggagaagaaggtttctggagcagtggactgccacaagccaccatgtaacccctctcacctgccgtgcgtactggctgtggaccagtaggactcaaggtggacgtgcgttctgccttccttgttaattttgtaataattggagaagatttatgtcagcacacacttacagagcacaaatgcagtatataggtgctggatgtatgtaaatatattcaaattatgtataaatatatattatatatttacaaggagttattttttgtattgattttaaatggatgtcccaatgcacctagaaaattggtctctctttttttaatagctatttgctaaatgctgttcttacacataatttcttaattttcaccgagcagaggtggaaaaatacttttgctttcagggaaaatggtataacgttaatttattaataaattggtaatatacaaaacaattaatcatttatagttttttttgtaatttaagtggcatttctatgcaggcagcacagcagactagttaatctattgcttggacttaactagttatcagatcctttgaaaagagaatatttacaatatatgactaatttggggaaaatgaagttttgatttatttgtgtttaaatgctgctgtcagacgattgttcttagacctcctaaatgccccatattaaaagaactcattcataggaaggtgtttcattttggtgtgcaaccctgtcattacgtcaacgcaacgtctaactggacttcccaagataaatggtaccagcgtcctcttaaaagatgccttaatccattccttgaggacagaccttagttgaaatgatagcagaatgtgcttctctctggcagctggccttctgcttctgagttgcacattaatcagattagcctgtattctcttcagtgaattttgataatggcttccagactctttggcgttggagacgcctgttaggatcttcaagtcccatcatagaaaattgaaacacagagttgttctgctgatagttttggggatacgtccatctttttaagggattgctttcatctaattctggcaggacctcaccaaaagatccagcctcatacctacatcagacaaaatatcgccgttgttccttctgtactaaagtattgtgttttgctttggaaacacccactcactttgcaatagccgtgcaagatgaatgcagattacactgatcttatgtgttacaaaattggagaaagtatttaataaaacctgttaatttttatactgacaataaaaatgtttctacagatattaatgttaacaagacaaaataaatgtcacgcaacttatttttttaatac

SEQ ID NO: 573 - protein, 449 aa, Homo sapiens; identical to SEQ ID NO: 567

SEQ ID NO: 574 - DNA, 1828 bp, Homo sapiens
cgggcgggcggcgggtgcggagcgggcgagggagcgcgcgcggccgccacaaagctcgggcgccgcggggctgcatgcggcgtacctggcccggcgcggcgactgctctccgggctggcgggggccggccgcgagccccgggggccccgaggccgcagcttgcctgcgcgctctgagccttcgcaactcgcgagcaaagtttggtggaggcaacgccaagcctgagtcctttcttcctctcgttccccaaatccgagggcagcccgcgggcgtcatgcccgcgctcctccgcagcctggggtacgcgtgaagcccgggaggcttggcgccggcgaagacccaaggaccactcttctgcgtttggagttgctccccacaaccccgggctcgtcgctttctccatcccgacccacgcggggcgcggggacaacacaggtcgcggaggagcgttgccattcaagtgactgcagcagcagcggcagcgcctcggttcctgagcccaccgcaggctgaaggcattgcgcgtagtccatgcccgtagaggaagtgtgcagatgggattaacgtccacatggagatatggaagaggaccggggattggtaccgtaaccatggtcagctggggtcgtttcatctgcctggtcgtggtcaccatggcaaccttgtccctggcccggccctccttcagtttagttgaggataccacattagagccagaagagccaccaaccaaataccaaatctctcaaccagaagtgtacgtggctgcgccaggggagtcgctagaggtgcgctgcctgttgaaagatgccgccgtgatcagttggactaaggatggggtgcacttggggcccaacaataggacagtgcttattggggagtacttgcagataaagggcgccacgcctagagactccggcctctatgcttgtactgccagtaggactgtagacagtgaaacttggtacttcatggtgaatgtcacagatgccatctcatccggagatgatgaggatgacaccgatggtgcggaagattttgtcagtgagaacagtaacaacaagagagcaccatactggaccaacacagaaaagatggaaaagcggctccatgctgtgcctgcggccaacactgtcaagtttcgctgcccagccggggggaacccaatgccaaccatgcggtggctgaaaaacgggaaggagtttaagcaggagcatcgcattggaggctacaaggtacgaaaccagcactggagcctcattatggaaagtgtggtcccatctgacaagggaaattatacctgtgtggtggagaatgaatacgggtccatcaatcacacgtaccacctggatgttgtggagcgatcgcctcaccggcccatcctccaagccggactgccggcaaatgcctccacagtggtcggaggagacgtagagtttgtctgcaaggtttacagtgatgcccagccccacatccagtggatcaagcacgtggaaaagaacggcagtaaatacgggcccgacgggctgccctacctcaaggttctcaagcactcggggataaatagttccaatgcagaagtgctggctctgttcaatgtgaccgaggcggatgctggggaatatatatgtaaggtctccaattatatagggcaggccaaccagtctgcctggctcactgtcctgccaaaacagcaaggccgccggtgttaacaccacggacaaagagattgaggttctctatattcggaatgtaacttttgaggacgctggggaatatacgtgcttggcgggtaattctattgggatatcctttcactctgcatggt

SEQ ID NO: 575 - protein, 383 aa, Homo sapiens
MGLTSTWRYGRGPGIGTVTMVSWGRFICLVVVTMATLSLARPSFSLVEDTTLEPEEPPTKYQISQPEVYVAAPGESLEVRCLLKDAAVISWTKDGVHLGPNNRTVLIGEYLQIKGATPRDSGACTASRTVDSETWYFMVNVTDAISSGDDEDDTDGAEDFVSENSNNKRAPYWTNTEKMEKRLHAVPAANTVKFRCPAGGNPMPTMRWLKNGKEFKQEHRIGGYKVRNQHWSLIMESVVPSDKGNYTCVVENEYGSINHTYHLDVVERSPHRPILQAGLPANASTVVGGDVEFVCKVYSDAQPHIQWIKHVEKNGSKYGPDGLPYLKVLKHSGINSSNAEVLALFNVTEADAGEYICKVSNYIGQANQSAWLTVLPKQQGRRC

SEQ ID NO: 576 - DNA, 4609 bp, Homo sapiens
cgggcgggcggcgggtgcggagcgggcgagggagcgcgcgcggccgccacaaagctcgggcgccgcggggctgcatgcggcgtacctggcccggcgcggcgactgctctccgggctggcgggggccggccgcgagccccgggggccccgaggccgcagcttgcctgcgcgctctgagccttcgcaactcgcgagcaaagtttggtggaggcaacgccaagcctgagtcctttcttcctctcgttccccaaatccgagggcagcccgcgggcgtcatgcccgcgctcctccgcagcctggggtacgcgtgaagcccgggaggcttggcgccggcgaagacccaaggaccactcttctgcgtttggagttgctccccacaaccccgggctcgtcgctttctccatcccgacccacgcggggcgcggggacaacacaggtcgcggaggagcgttgccattcaagtgactgcagcagcagcggcagcgcctcggttcctgagcccaccgcaggctgaaggcattgcgcgtagtccatgcccgtagaggaagtgtgcagatgggattaacgtccacatggagatatggaagaggaccggggattggtaccgtaaccatggtcagctggggtcgtttcatctgcctggtcgtggtcaccatggcaaccttgtccctggcccggccctccttcagtttagttgaggataccacattagagccagaagagccaccaaccaaataccaaatctctcaaccagaagtgtacgtggctgcgccaggggagtcgctagaggtgcgctgcctgttgaaagatgccgccgtgatcagttggactaaggatggggtgcacttggggcccaacaataggacagtgcttattggggagtacttgcagataaagggcgccacgcctagagactccggcctctatgcttgtactgccagtaggactgtagacagtgaaacttggtacttcatggtgaatgtcacagatgccatctcatccggagatgatgaggatgacaccgatggtgcggaagattttgtcagtgagaacagtaacaacaagagagcaccatactggaccaacacagaaaagatggaaaagcggctccatgctgtgcctgcggccaacactgtcaagtttcgctgcccagccggggggaacccaatgccaaccatgcggtggctgaaaaacgggaaggagtttaagcaggagcatcgcattggaggctacaaggtacgaaaccagcactggagcctcattatggaaagtgtggtcccatctgacaagggaaattatacctgtgtggtggagaatgaatacgggtccatcaatcacacgtaccacctggatgttgtggagcgatcgcctcaccggcccatcctccaagccggactgccggcaaatgcctccacagtggtcggaggagacgtagagtttgtctgcaaggtttacagtgatgcccagccccacatccagtggatcaagcacgtggaaaagaacggcagtaaatacgggcccgacgggctgccctacctcaaggttctcaaggccgccggtgttaacaccacggacaaagagattgaggttctctatattcggaatgtaacttttgaggacgctggggaatatacgtgcttggcgggtaattctattgggatatcctttcactctgcatggttgacagttctgccagcgcctggaagagaaaaggagattacagcttccccagactacctggagatagccatttactgcataggggtcttcttaatcgcctgtatggtggtaacagtcatcctgtgccgaatgaagaacacgaccaagaagccagacttcagcagccagccggctgtgcacaagctgaccaaacgtatccccctgcggagacaggtaacagaaagtttcggctgagtccagctcctccatgaactccaacaccccgctggtgaggataacaacacgcctctcttcaacggcagacacccccatgctggcaggggtctccgagtatgaacttccagaggacccaaaatgggagtttccaagagataagctgacactgggcaagcccctgggagaaggttgctttgggcaagtggtcatggcggaagcagtgggaattgacaaagacaagcccaaggaggcggtcaccgtggccgtgaagatgttgaaagatgatgccacagagaaagacctttctgatctggtgtcagagatggagatgatgaagatgattgggaaacacaagaatatcataaatcttcttggagcctgcacacaggatgggcctctctatgtcatagttgagtatgcctctaaaggcaacctccgagaatacctccgagcccggaggccacccgggatggagtactcctatgacattaaccgtgttcctgaggagcagatgaccttcaaggacttggtgtcatgcacctaccagctggccagaggcatggagtacttggcttcccaaaaatgtattcatcgagatttagcagccagaaatgttttggtaacagaaaacaatgtgatgaaaatagcagactttggactcgccagagatatcaacaatatagactattacaaaaagaccaccaatgggcggcttccagtcaagtggatggctccagaagccctgtttgatagagtatacactcatcagagtgatgtctggtccttcggggtgttaatgtgggagatcttcactttagggggctcgccctacccagggattcccgtggaggaactttttaagctgctgaaggaaggacacagaatggataagccagccaactgcaccaacgaactgtacatgatgatgagggactgttggcatgcagtgccctcccagagaccaacgttcaagcagttggtagaagacttggatcgaattctcactctcacaaccaatgaggaatacttggacctcagccaacctctcgaacagtattcacctagttaccctgacacaagaagttcttgttcttcaggagatgattctgttttttctccagaccccatgccttacgaaccatgccttcctcagtatccacacataaacggcagtgttaaaacatgaatgactgtgtctgcctgtccccaaacaggacagcactgggaacctagctacactgagcagggagaccatgcctcccagagcttgttgtctccacttgtatatatggatcagaggagtaaataattggaaaagtaatcagcatatgtgtaaagatttatacagttgaaaacttgtaatcttccccaggaggagaagaaggtttctggagcagtggactgccacaagccaccatgtaacccctctcacctgccgtgcgtactggctgtggaccagtaggactcaaggtggacgtgcgttctgccttccttgttaattttgtaataattggagaagatttatgtcagcacacacttacagagcacaaatgcagtatataggtgctggatgtatgtaaatatattcaaattatgtataaatatatattatatatttacaaggagttattttttgtattgattttaaatggatgtcccaatgcacctagaaaattggtctctctttttttaatagctatttgctaaatgctgttcttacacataatttcttaattttcaccgagcagaggtggaaaaatacttttgctttcagggaaaatggtataacgttaatttattaataaattggtaatatacaaaacaattaatcatttatagttttttttgtaatttaagtggcatttctatgcaggcagcacagcagactagttaatctattgcttggacttaactagttatcagatcctttgaaaagagaatatttacaatatatgactaatttggggaaaatgaagttttgatttatttgtgtttaaatgctgctgtcagacgattgttcttagacctcctaaatgccccatattaaaagaactcattcataggaaggtgtttcattttggtgtgcaaccctgtcattacgtcaacgcaacgtctaactggacttcccaagataaatggtaccagcgtcctcttaaaagatgccttaatccattccttgaggacagaccttagttgaaatgatagcagaatgtgcttctctctggcagctggccttctgcttctgagttgcacattaatcagattagcctgtattctcttcagtgaattttgataatggcttccagactctttggcgttggagacgcctgttaggatcttcaagtcccatcatagaaaattgaaacacagagttgttctgctgatagttttggggatacgtccatctttttaagggattgctttcatctaattctggcaggacctcaccaaaagatccagcctcatacctacatcagacaaaatatcgccgttgttccttctgtactaaagtattgtgttttgctttggaaacacccactcactttgcaatagccgtgcaagatgaatgcagattacactgatcttatgtgttacaaaattggagaaagtatttaataaaacctgttaatttttatactgacaataaaaatgtttctacagatattaatgttaacaagacaaaataaatgtcacgcaacttatttttttaatac

SEQ ID NO: 577 - protein, 448 aa, Homo sapiens; identical to SEQ ID NO: 565

SEQ ID NO: 578 - DNA, 4257 bp, Homo sapiens
cgggcgggcggcgggtgcggagcgggcgagggagcgcgcgcggccgccacaaagctcgggcgccgcggggctgcatgcggcgtacctggcccggcgcggcgactgctctccgggctggcgggggccggccgcgagccccgggggccccgaggccgcagcttgcctgcgcgctctgagccttcgcaactcgcgagcaaagtttggtggaggcaacgccaagcctgagtcctttcttcctctcgttccccaaatccgagggcagcccgcgggcgtcatgcccgcgctcctccgcagcctggggtacgcgtgaagcccgggaggcttggcgccggcgaagacccaaggaccactcttctgcgtttggagttgctccccacaaccccgggctcgtcgctttctccatcccgacccacgcggggcgcggggacaacacaggtcgcggaggagcgttgccattcaagtgactgcagcagcagcggcagcgcctcggttcctgagcccaccgcaggctgaaggcattgcgcgtagtccatgcccgtagaggaagtgtgcagatgggattaacgtccacatggagatatggaagaggaccggggattggtaccgtaaccatggtcagctggggtcgtttcatctgcctggtcgtggtcaccatggcaaccttgtccctggcccggccctccttcagtttagttgaggataccacattagagccagaaggagcaccatactggaccaacacagaaaagatggaaaagcggctccatgctgtgcctgcggccaacactgtcaagtttcgctgcccagccggggggaacccaatgccaaccatgcggtggctgaaaaacgggaaggagtttaagcaggagcatcgcattggaggctacaaggtacgaaaccagcactggagcctcattatggaaagtgtggtcccatctgacaagggaaattatacctgtgtggtggagaatgaatacgggtccatcaatcacacgtaccacctggatgttgtggagcgatcgcctcaccggcccatcctccaagccggactgccggcaaatgcctccacagtggtcggaggagacgtagagtttgtctgcaaggtttacagtgatgcccagccccacatccagtggatcaagcacgtggaaaagaacggcagtaaatacgggcccgacgggctgccctacctcaaggttctcaagcactcggggataaatagttccaatgcagaagtgctggctctgttcaatgtgaccgaggcggatgctggggaatatatatgtaaggtctccaattatatagggcaggccaaccagtctgcctggctcactgtcctgccaaaacagcaagcgcctggaagagaaaaggagattacagcttccccagactacctggagatagccatttactgcataggggtcttcttaatcgcctgtatggtggtaacagtcatcctgtgccgaatgaagaacacgaccaagaagccagacttcagcagccagccggctgtgcacaagctgaccaaacgtatccccctgcggagacaggtttcggctgagtccagctcctccatgaactccaacaccccgctggtgaggataacaacacgcctctcttcaacggcagacacccccatgctggcaggggtctccgagtatgaacttccagaggacccaaaatgggagtttccaagagataagctgacactgggcaagcccctgggagaaggttgctttgggcaagtggtcatggcggaagcagtgggaattgacaaagacaagcccaaggaggcggtcaccgtggccgtgaagatgttgaaagatgatgccacagagaaagacctttctgatctggtgtcagagatggagatgatgaagatgattgggaaacacaagaatatcataaatcttcttggagcctgcacacaggatgggcctctctatgtcatagttgagtatgcctctaaaggcaacctccgagaatacctccgagcccggaggccacccgggatggagtactcctatgacattaaccgtgttcctgaggagcagatgaccttcaaggacttggtgtcatgcacctaccagctggccagaggcatggagtacttggcttcccaaaaatgtattcatcgagatttagcagccagaaatgttttggtaacagaaaacaatgtgatgaaaatagcagactttggactcgccagagatatcaacaatatagactattacaaaaagaccaccaatgggcggcttccagtcaagtggatggctccagaagccctgtttgatagagtatacactcatcagagtgatgtctggtccttcggggtgttaatgtgggagatcttcactttagggggctcgccctacccagggattcccgtggaggaactttttaagctgctgaaggaaggacacagaatggataagccagccaactgcaccaacgaactgtacatgatgatgagggactgttggcatgcagtgccctcccagagaccaacgttcaagcagttggtagaagacttggatcgaattctcactctcacaaccaatgaggaatacttggacctcagccaacctctcgaacagtattcacctagttaccctgacacaagaagttcttgttcttcaggagatgattctgttttttctccagaccccatgccttacgaaccatgccttcctcagtatccacacataaacggcagtgttaaaacatgaatgactgtgtctgcctgtccccaaacaggacagcactgggaacctagctacactgagcagggagaccatgcctcccagagcttgttgtctccacttgtatatatggatcagaggagtaaataattggaaaagtaatcagcatatgtgtaaagatttatacagttgaaaacttgtaatcttccccaggaggagaagaaggtttctggagcagtggactgccacaagccaccatgtaacccctctcacctgccgtgcgtactggctgtggaccagtaggactcaaggtggacgtgcgttctgccttccttgttaattttgtaataattggagaagatttatgtcagcacacacttacagagcacaaatgcagtatataggtgctggatgtatgtaaatatattcaaattatgtataaatatatattatatatttacaaggagttattttttgtattgattttaaatggatgtcccaatgcacctagaaaattggtctctctttttttaatagctatttgctaaatgctgttcttacacataatttcttaattttcaccgagcagaggtggaaaaatacttttgctttcagggaaaatggtataacgttaatttattaataaattggtaatatacaaaacaattaatcatttatagttttttttgtaatttaagtggcatttctatgcaggcagcacagcagactagttaatctattgcttggacttaactagttatcagatcctttgaaaagagaatatttacaatatatgactaatttggggaaaatgaagttttgatttatttgtgtttaaatgctgctgtcagacgattgttcttagacctcctaaatgccccatattaaaagaactcattcataggaaggtgtttcattttggtgtgcaaccctgtcattacgtcaacgcaacgtctaactggacttcccaagataaatggtaccagcgtcctcttaaaagatgccttaatccattccttgaggacagaccttagttgaaatgatagcagaatgtgcttctctctggcagctggccttctgcttctgagttgcacattaatcagattagcctgtattctcttcagtgaattttgataatggcttccagactctttggcgttggagacgcctgttaggatcttcaagtcccatcatagaaaattgaaacacagagttgttctgctgatagttttggggatacgtccatctttttaagggattgctttcatctaattctggcaggacctcaccaaaagatccagcctcatacctacatcagacaaaatatcgccgttgttccttctgtactaaagtattgtgttttgctttggaaacacccactcactttgcaatagccgtgcaagatgaatgcagattacactgatcttatgtgttacaaaattggagaaagtatttaataaaacctgttaatttttatactgacaataaaaatgtttctacagatattaatgttaacaagacaaaataaatgtcacgcaacttatttttttaatac

SEQ ID NO: 579 - protein, 720 aa, Homo sapiens; identical to SEQ ID NO: 569

SEQ ID NO: 580 - DNA, 2011 bp, Homo sapiens
cgggcgggcggcgggtgcggagcgggcgagggagcgcgcgcggccgccacaaagctcgggcgccgcggggctgcatgcggcgtacctggcccggcgcggcgactgctctccgggctggcgggggccggccgcgagccccgggggccccgaggccgcagcttgcctgcgcgctctgagccttcgcaactcgcgagcaaagtttggtggaggcaacgccaagcctgagtcctttcttcctctcgttccccaaatccgagggcagcccgcgggcgtcatgcccgcgctcctccgcagcctggggtacgcgtgaagcccgggaggcttggcgccggcgaagacccaaggaccactcttctgcgtttggagttgctccccacaaccccgggctcgtcgctttctccatcccgacccacgcggggcgcggggacaacacaggtcgcggaggagcgttgccattcaagtgactgcagcagcagcggcagcgcctcggttcctgagcccaccgcaggctgaaggcattgcgcgtagtccatgcccgtagaggaagtgtgcagatgggattaacgtccacatggagatatggaagaggaccggggattggtaccgtaaccatggtcagctggggtcgtttcatctgcctggtcgtggtcaccatggcaaccttgtccctggcccggccctccttcagtttagttgaggataccacattagagccagaagagccaccaaccaaataccaaatctctcaaccagaagtgtacgtggctgcgccaggggagtcgctagaggtgcgctgcctgttgaaagatgccgccgtgatcagttggactaaggatggggtgcacttggggcccaacaataggacagtgcttattggggagtacttgcagataaagggcgccacgcctagagactccggcctctatgcttgtactgccagtaggactgtagacagtgaaacttggtacttcatggtgaatgtcacagatgccatctcatccggagatgatgaggatgacaccgatggtgcggaagattttgtcagtgagaacagtaacaacaagagagcaccatactggaccaacacagaaaagatggaaaagcggctccatgctgtgcctgcggccaacactgtcaagtttcgctgcccagccggggggaacccaatgccaaccatgcggtggctgaaaaacgggaaggagtttaagcaggagcatcgcattggaggctacaaggtacgaaaccagcactggagcctcattatggaaagtgtggtcccatctgacaagggaaattatacctgtgtggtggagaatgaatacgggtccatcaatcacacgtaccacctggatgttgtgggcagccagggtttatgagctttgcatgatcctcatggttcccaagcgtcatctgtgtaaagtggacgtggtatgaaatgtctgacattttggaagctgagattactctgaaaatgttaattgggcaggtgaaaagggtacagatgtgctgtagcagacctttggttttaaaagagaagcatcatttccccaacagggcaactgtagaaggccagctgaagagtaaaggaaaaggtctgaggactgagcctgtggctggctggaaaaaggtgaatgttgagggcccttcacttccatcacaagaaagtcattagacggtaccaattcagtgtctgttcctggcatctatttcctctgtgcaaagggaaccatgtatatgagcttataaatacatttttgtcagagtgcacagataagtaggccattttaattaaacattgaagaccacctcgcctgttgtcttggaaattcaagtttcttcccaggttttgcctgtgatgatggggctttgttgtaactaatgaagaaaggaggtttctgtgtcttggaggattgctaacatatggaactctacccaagacatacttcattgttgcaggatggcaggttaagatcccttccatgtaggggccatcttttctctttcctgtcat

SEQ ID NO: 581 - protein, 271 aa, Homo sapiens
MGLTSTWRYGRGPGIGTVTMVSWGRFICLVVVTMATLSLARPSFSLVEDTTLEPEEPPTKYQISQPEVYVAAPGESLEVRCLLKDAAVISWTKDGVHLGPNNRTVLIGEYLQIKGATPRDSGACTASRTVDSETWYFMVNVTDAISSGDDEDDTDGAEDFVSENSNNKRAPYWTNTEKMEKRLHAVPAANTVKFRCPAGGNPMPTMRWLKNGKEFKQEHRIGGYKVRNQHWSLIMESVVPSDKGNYTCVVENEYGSINHTYHLDVVGSQGL

SEQ ID NO: 582 - DNA, 5088 bp, Homo sapiens
tctctgatcctgtttccttatcagaaactgggaatagtactctgcagggtggttgggcagatgaaatagaatcacctatgtagtgtgaccctcccatagtagggcctccattaatattcagttttttcctctcatttctattgtttagaaggacagaaacatgcaatgtcctgcgaacatttccaagtggcttcctctcctccaaaagcttcagctgcctggcaaccctccccgcagtatcaagcaggcgcattttaaagtctctttagcgggagggcagggttagagccttcggtcacttgttttctaacttgacataaaacaacgtaacgcagtcactcagcgagccgttggccagcctcgctcgcccggggaggagggaggaggtggccgggcgggcggcgggtgcggagcgggcgagggagcgcgcgcggccgccacaaagctcgggcgccgcggggctgcatgcggcgtacctggcccggcgcggcgactgctctccgggctggcgggggccggccgcgagccccgggggccccgaggccgcagcttgcctgcgcgctctgagccttcgcaactcgcgagcaaagtttggtggaggcaacgccaagcctgagtcctttcttcctctcgttccccaaatccgagggcagcccgcgggcgtcatgcccgcgctcctccgcagcctggggtacgcgtgaagcccgggaggcttggcgccggcgaagacccaaggaccactcttctgcgtttggagttgctccccacaaccccgggctcgtcgctttctccatcccgacccacgcggggcgcggggacaacacaggtcgcggaggagcgttgccattcaagtgactgcagcagcagcggcagcgcctcggttcctgagcccaccgcaggctgaaggcattgcgcgtagtccatgcccgtagaggaagtgtgcagatgggattaacgtccacatggagatatggaagaggaccggggattggtaccgtaaccatggtcagctggggtcgtttcatctgcctggtcgtggtcaccatggcaaccttgtccctggcccggccctccttcagtttagttgaggataccacattagagccagaagagccaccaaccaaataccaaatctctcaaccagaagtgtacgtggctgcgccaggggagtcgctagaggtgcgctgcctgttgaaagatgccgccgtgatcagttggactaaggatggggtgcacttggggcccaacaataggacagtgcttattggggagtacttgcagataaagggcgccacgcctagagactccggcctctatgcttgtactgccagtaggactgtagacagtgaaacttggtacttcatggtgaatgtcacagatgccatctcatccggagatgatgaggatgacaccgatggtgcggaagattttgtcagtgagaacagtaacaacaagagagcaccatactggaccaacacagaaaagatggaaaagcggctccatgctgtgcctgcggccaacactgtcaagtttcgctgcccagccggggggaacccaatgccaaccatgcggtggctgaaaaacgggaaggagtttaagcaggagcatcgcattggaggctacaaggtacgaaaccagcactggagcctcattatggaaagtgtggtcccatctgacaagggaaattatacctgtgtggtggagaatgaatacgggtccatcaatcacacgtaccacctggatgttgtggagcgatcgcctcaccggcccatcctccaagccggactgccggcaaatgcctccacagtggtcggaggagacgtagagtttgtctgcaaggtttacagtgatgcccagccccacatccagtggatcaagcacgtggaaaagaacggcagtaaatacgggcccgacgggctgccctacctcaaggttctcaagttttctaggccgccggtgttaacaccacggacaaagagattgaggttctctatattcggaatgtaacttttgaggacgctggggaatatacgtgcttggcgggtaattctattgggatatcctttcactctgcatggttgacagttctgccagcgcctggaagagaaaaggagattacagcttccccagactacctggagatagccatttactgcataggggtcttcttaatcgcctgtatggtggtaacagtcatcctgtgccgaatgaagaacacgaccaagaagccagacttcagcagccagccggctgtgcacaagctgaccaaacgtatccccctgcggagacaggtttcggctgagtccagctcctccatgaactccaacaccccgctggtgaggataacaacacgcctctcttcaacggcagacacccccatgctggcaggggtctccgagtatgaacttccagaggacccaaaatgggagtttccaagagataagctgacactgggcaagcccctgggagaaggttgctttgggcaagtggtcatggcggaagcagtgggaattgacaaagacaagcccaaggaggcggtcaccgtggccgtgaagatgttgaaagatgatgccacagagaaagacctttctgatctggtgtcagagatggagatgatgaagatgattgggaaacacaagaatatcataaatcttcttggagcctgcacacaggatgggcctctctatgtcatagttgagtatgcctctaaaggcaacctccgagaatacctccgagcccggaggccacccgggatggagtactcctatgacattaaccgtgttcctgaggagcagatgaccttcaaggacttggtgtcatgcacctaccagctggccagaggcatggagtacttggcttcccaaaaatgtattcatcgagatttagcagccagaaatgttttggtaacagaaaacaatgtgatgaaaatagcagactttggactcgccagagatatcaacaatatagactattacaaaaagaccaccaatgggcggcttccagtcaagtggatggctccagaagccctgtttgatagagtatacactcatcagagtgatgtctggtccttcggggtgttaatgtgggagatcttcactttagggggctcgccctacccagggattcccgtggaggaactttttaagctgctgaaggaaggacacagaatggataagccagccaactgcaccaacgaactgtacatgatgatgagggactgttggcatgcagtgccctcccagagaccaacgttcaagcagttggtagaagacttggatcgaattctcactctcacaaccaatgaggaatacttggacctcagtcagcctctcgaaccgtattcaccttgttatcctgacccaagatgaaataaaacgtctctcttcccttctttcaggaatacttggacctcagccaacctctcgaacagtattcacctagttaccctgacacaagaagttcttgttcttcaggagatgattctgttttttctccagaccccatgccttacgaaccatgccttcctcagtatccacacataaacggcagtgttaaaacatgaatgactgtgtctgcctgtccccaaacaggacagcactgggaacctagctacactgagcagggagaccatgcctcccagagcttgttgtctccacttgtatatatggatcagaggagtaaataattggaaaagtaatcagcatatgtgtaaagatttatacagttgaaaacttgtaatcttccccaggaggagaagaaggtttctggagcagtggactgccacaagccaccatgtaacccctctcacctgccgtgcgtactggctgtggaccagtaggactcaaggtggacgtgcgttctgccttccttgttaattttgtaataattggagaagatttatgtcagcacacacttacagagcacaaatgcagtatataggtgctggatgtatgtaaatatattcaaattatgtataaatatatattatatatttacaaggagttattttttgtattgattttaaatggatgtcccaatgcacctagaaaattggtctctctttttttaatagctatttgctaaatgctgttcttacacataatttcttaattttcaccgagcagaggtggaaaaatacttttgctttcagggaaaatggtataacgttaatttattaataaattggtaatatacaaaacaattaatcatttatagttttttttgtaatttaagtggcatttctatgcaggcagcacagcagactagttaatctattgcttggacttaactagttatcagatcctttgaaaagagaatatttacaatatatgactaatttggggaaaatgaagttttgatttatttgtgtttaaatgctgctgtcagacgattgttcttagacctcctaaatgccccatattaaaagaactcattcataggaaggtgtttcattttggtgtgcaaccctgtcattacgtcaacgcaacgtctaactggacttcccaagataaatggtaccagcgtcctcttaaaagatgccttaatccattccttgaggacagaccttagttgaaatgatagcagaatgtgcttctctctggcagctggccttctgcttctgagttgcacattaatcagattagcctgtattctcttcagtgaattttgataatggcttccagactctttggcgttggagacgcctgttaggatcttcaagtcccatcatagaaaattgaaacacagagttgttctgctgatagttttggggatacgtccatctttttaagggattgctttcatctaattctggcaggacctcaccaaaagatccagcctcatacctacatcagacaaaatatcgccgttgttccttctgtactaaagtattgtgttttgctttggaaacacccactcactttgcaatagccgtgcaagatgaatgcagattacactgatcttatgtgttacaaaattggagaaagtatttaataaaacctgttaatttttatactgacaataaaaatgtttctacagatattaatgttaacaagacaaaataaatgtcacgcaacttatttttttaat

SEQ ID NO: 583 - protein, 393 aa, Homo sapiens
MVVTVILCRMKNTTKKPDFSSQPAVHKLTKRIPLRRQVSAESSSSMNSNTPLVRITTRLSSTADTPMLAGVSEYELPEDPKWEFPRDKLTLGKPLGEGCFGQVVMAEAVGIDKDKPKEAVTVAVKMLKDDATEKDLSDLVSEMEMMKMIGKHKNIINLLGACTQDGPLYVIVEYASKGNLREYLRARRPPGMEYSYDINRVPEEQMTFKDLVSCTYQLRMEYLASQKCIHRDLAARNVLVTENNVMKIADFGLARDINNIDYYKKTTNGRLPVKWMAPEALFDRVYTHQSDVWSFGVLMWEIFTLGGSPYPGIPVEELFKLLKEGHRMDKPANCTNELYMMMRDCWHAVPSQRPTFKQLVEDLDRILTLTTNEEYLDLSQPLEPYSPCYPDPR

SEQ ID NO: 584 - DNA, 3048 bp, Homo sapiens
tctctgatcctgtttccttatcagaaactgggaatagtactctgcagggtggttgggcagatgaaatagaatcacctatgtagtgtgaccctcccatagtagggcctccattaatattcagttttttcctctcatttctattgtttagaaggacagaaacatgcaatgtcctgcgaacatttccaagtggcttcctctcctccaaaagcttcagctgcctggcaaccctccccgcagtatcaagcaggcgcattttaaagtctctttagcgggagggcagggttagagccttcggtcacttgttttctaacttgacataaaacaacgtaacgcagtcactcagcgagccgttggccagcctcgctcgcccggggaggagggaggaggtggccgggcgggcggcgggtgcggagcgggcgagggagcgcgcgcggccgccacaaagctcgggcgccgcggggctgcatgcggcgtacctggcccggcgcggcgactgctctccgggctggcgggggccggccgcgagccccgggggccccgaggccgcagcttgcctgcgcgctctgagccttcgcaactcgcgagcaaagtttggtggaggcaacgccaagcctgagtcctttcttcctctcgttccccaaatccgagggcagcccgcgggcgtcatgcccgcgctcctccgcagcctggggtacgcgtgaagcccgggaggcttggcgccggcgaagacccaaggaccactcttctgcgtttggagttgctccccacaaccccgggctcgtcgctttctccatcccgacccacgcggggcgcggggacaacacaggtcgcggaggagcgttgccattcaagtgactgcagcagcagcggcagcgcctcggttcctgagcccaccgcaggctgaaggcattgcgcgtagtccatgcccgtagaggaagtgtgcagatgggattaacgtccacatggagatatggaagaggaccggggattggtaccgtaaccatggtcagctggggtcgtttcatctgcctggtcgtggtcaccatggcaaccttgtccctggcccggccctccttcagtttagttgaggataccacattagagccagaagatgccatctcatccggagatgatgaggatgacaccgatggtgcggaagattttgtcagtgagaacagtaacaacaagagagcaccatactggaccaacacagaaaagatggaaaagcggctccatgctgtgcctgcggccaacactgtcaagtttcgctgcccagccggggggaacccaatgccaaccatgcggtggctgaaaaacgggaaggagtttaagcaggagcatcgcattggaggctacaaggtacgaaaccagcactggagcctcattatggaaagtgtggtcccatctgacaagggaaattatacctgtgtggtggagaatgaatacgggtccatcaatcacacgtaccacctggatgttgtggagcgatcgcctcaccggcccatcctccaagccggactgccggcaaatgcctccacagtggtcggaggagacgtagagtttgtctgcaaggtttacagtgatgcccagccccacatccagtggatcaagcacgtggaaaagaacggcagtaaatacgggcccgacgggctgccctacctcaaggttctcaagcactcggggataaatagttccaatgcagaagtgctggctctgttcaatgtgaccgaggcggatgctggggaatatatatgtaaggtctccaattatatagggcaggccaaccagtctgcctggctcactgtcctgccaaaacagcaagcgcctggaagagaaaaggagattacagcttccccagactacctggagatagccatttactgcataggggtcttcttaatcgcctgtatggtggtaacagtcatcctgtgccgaatgaagaacacgaccaagaagccagacttcagcagccagccggctgtgcacaagctgaccaaacgtatccccctgcggagacaggtttcggctgagtccagctcctccatgaactccaacaccccgctggtgaggataacaacacgcctctcttcaacggcagacacccccatgctggcaggggtctccgagtatgaacttccagaggacccaaaatgggagtttccaagagataagctgacactgggcaagcccctgggagaaggttgctttgggcaagtggtcatggcggaagcagtgggaattgacaaagacaagcccaaggaggcggtcaccgtggccgtgaagatgttgaaagatgatgccacagagaaagacctttctgatctggtgtcagagatggagatgatgaagatgattgggaaacacaagaatatcataaatcttcttggagcctgcacacaggatgggcctctctatgtcatagttgagtatgcctctaaaggcaacctccgagaatacctccgagcccggaggccacccgggatggagtactcctatgacattaaccgtgttcctgaggagcagatgaccttcaaggacttggtgtcatgcacctaccagctggccagaggcatggagtacttggcttcccaaaaatgtattcatcgagatttagcagccagaaatgttttggtaacagaaaacaatgtgatgaaaatagcagactttggactcgccagagatatcaacaatatagactattacaaaaagaccaccaatgggcggcttccagtcaagtggatggctccagaagccctgtttgatagagtatacactcatcagagtgatgtctggtccttcggggtgttaatgtgggagatcttcactttagggggctcgccctacccagggattcccgtggaggaactttttaagctgctgaaggaaggacacagaatggataagccagccaactgcaccaacgaactgtacatgatgatgagggactgttggcatgcagtgccctcccagagaccaacgttcaagcagttggtagaagacttggatcgaattctcactctcacaaccaatgaggtaagaacttccttc

SEQ ID NO: 585 - protein, 697 aa, Homo sapiens
MGLTSTWRYGRGPGIGTVTMVSWGRFICLVVVTMATLSLARPSFSLVEDTTLEPEDAISSGDDEDDTDGAEDFVSENSNNKRAPYWTNTEKMEKRLHAVPAANTVKFRCPAGGNPMPTMRWLKNGKEFKQEHRIGGYKVRNQHWSLIMESVVPSDKGNYTCVVENEYGSINHTYHLDVVERSPHRPILQAGLPANASTVVGGDVEFVCKVYSDAQPHIQWIKHVEKNGSKYGPDGLPYLKVLKHSGINSSNAEVLALFNVTEADAGEYICKVSNYIGQANQSAWLTVLPKQQAPGREKEITDDYLEIAIYCIGVFLIACMVVTVILCRMKNTTKKPDFSSQPAVHKLTKRIPLRRQVSAESSSSMNSNTPLVRITTRLSSTADTPMLAGVSEYELPEDPKWEFPRDKLTLGKPLGEGCFGQVVMAEAVGIDKDKPKEAVTVAVKMLKDDATEKDLSDLVSEMEMMKMIGKHKNIINLLGACTQDGPLYVIVEYASKGNLREYLRARRPPGMEYSYDINRVPEEQMTFKDLVSCTYQLRMEYLASQKCIHRDLAARNVLVTENNVMKIADFGLARDINNIDYYKKTTNGRLPVKWMAPEALFDRVYTHQSDVWSFGVLMWEIFTLGGSPYPGIPVEELFKLLKEGHRMDKPANCTNELYMMMRDCWHAVPSQRPTFKQLVEDLDRILTLTTNEVRTSF

SEQ ID NO: 586 - DNA, 4648 bp, Homo sapiens
tctctgatcctgtttccttatcagaaactgggaatagtactctgcagggtggttgggcagatgaaatagaatcacctatgtagtgtgaccctcccatagtagggcctccattaatattcagttttttcctctcatttctattgtttagaaggacagaaacatgcaatgtcctgcgaacatttccaagtggcttcctctcctccaaaagcttcagctgcctggcaaccctccccgcagtatcaagcaggcgcattttaaagtctctttagcgggagggcagggttagagccttcggtcacttgttttctaacttgacataaaacaacgtaacgcagtcactcagcgagccgttggccagcctcgctcgcccggggaggagggaggaggtggccgggcgggcggcgggtgcggagcgggcgagggagcgcgcgcggccgccacaaagctcgggcgccgcggggctgcatgcggcgtacctggcccggcgcggcgactgctctccgggctggcgggggccggccgcgagccccgggggccccgaggccgcagcttgcctgcgcgctctgagccttcgcaactcgcgagcaaagtttggtggaggcaacgccaagcctgagtcctttcttcctctcgttccccaaatccgagggcagcccgcgggcgtcatgcccgcgctcctccgcagcctggggtacgcgtgaagcccgggaggcttggcgccggcgaagacccaaggaccactcttctgcgtttggagttgctccccacaaccccgggctcgtcgctttctccatcccgacccacgcggggcgcggggacaacacaggtcgcggaggagcgttgccattcaagtgactgcagcagcagcggcagcgcctcggttcctgagcccaccgcaggctgaaggcattgcgcgtagtccatgcccgtagaggaagtgtgcagatgggattaacgtccacatggagatatggaagaggaccggggattggtaccgtaaccatggtcagctggggtcgtttcatctgcctggtcgtggtcaccatggcaaccttgtccctggcccggccctccttcagtttagttgaggataccacattagagccagaaggagcaccatactggaccaacacagaaaagatggaaaagcggctccatgctgtgcctgcggccaacactgtcaagtttcgctgcccagccggggggaacccaatgccaaccatgcggtggctgaaaaacgggaaggagtttaagcaggagcatcgcattggaggctacaaggtacgaaaccagcactggagcctcattatggaaagtgtggtcccatctgacaagggaaattatacctgtgtggtggagaatgaatacgggtccatcaatcacacgtaccacctggatgttgtggagcgatcgcctcaccggcccatcctccaagccggactgccggcaaatgcctccacagtggtcggaggagacgtagagtttgtctgcaaggtttacagtgatgcccagccccacatccagtggatcaagcacgtggaaaagaacggcagtaaatacgggcccgacgggctgccctacctcaaggttctcaagcactcggggataaatagttccaatgcagaagtgctggctctgttcaatgtgaccgaggcggatgctggggaatatatatgtaaggtctccaattatatagggcaggccaaccagtctgcctggctcactgtcctgccaaaacagcaagcgcctggaagagaaaaggagattacagcttccccagactacctggagatagccatttactgcataggggtcttcttaatcgcctgtatggtggtaacagtcatcctgtgccgaatgaagaacacgaccaagaagccagacttcagcagccagccggctgtgcacaagctgaccaaacgtatccccctgcggagacaggtttcggctgagtccagctcctccatgaactccaacaccccgctggtgaggataacaacacgcctctcttcaacggcagacacccccatgctggcaggggtctccgagtatgaacttccagaggacccaaaatgggagtttccaagagataagctgacactgggcaagcccctgggagaaggttgctttgggcaagtggtcatggcggaagcagtgggaattgacaaagacaagcccaaggaggcggtcaccgtggccgtgaagatgttgaaagatgatgccacagagaaagacctttctgatctggtgtcagagatggagatgatgaagatgattgggaaacacaagaatatcataaatcttcttggagcctgcacacaggatgggcctctctatgtcatagttgagtatgcctctaaaggcaacctccgagaatacctccgagcccggaggccacccgggatggagtactcctatgacattaaccgtgttcctgaggagcagatgaccttcaaggacttggtgtcatgcacctaccagctggccagaggcatggagtacttggcttcccaaaaatgtattcatcgagatttagcagccagaaatgttttggtaacagaaaacaatgtgatgaaaatagcagactttggactcgccagagatatcaacaatatagactattacaaaaagaccaccaatgggcggcttccagtcaagtggatggctccagaagccctgtttgatagagtatacactcatcagagtgatgtctggtccttcggggtgttaatgtgggagatcttcactttagggggctcgccctacccagggattcccgtggaggaactttttaagctgctgaaggaaggacacagaatggataagccagccaactgcaccaacgaactgtacatgatgatgagggactgttggcatgcagtgccctcccagagaccaacgttcaagcagttggtagaagacttggatcgaattctcactctcacaaccaatgaggaatacttggacctcagccaacctctcgaacagtattcacctagttaccctgacacaagaagttcttgttcttcaggagatgattctgttttttctccagaccccatgccttacgaaccatgccttcctcagtatccacacataaacggcagtgttaaaacatgaatgactgtgtctgcctgtccccaaacaggacagcactgggaacctagctacactgagcagggagaccatgcctcccagagcttgttgtctccacttgtatatatggatcagaggagtaaataattggaaaagtaatcagcatatgtgtaaagatttatacagttgaaaacttgtaatcttccccaggaggagaagaaggtttctggagcagtggactgccacaagccaccatgtaacccctctcacctgccgtgcgtactggctgtggaccagtaggactcaaggtggacgtgcgttctgccttccttgttaattttgtaataattggagaagatttatgtcagcacacacttacagagcacaaatgcagtatataggtgctggatgtatgtaaatatattcaaattatgtataaatatatattatatatttacaaggagttattttttgtattgattttaaatggatgtcccaatgcacctagaaaattggtctctctttttttaatagctatttgctaaatgctgttcttacacataatttcttaattttcaccgagcagaggtggaaaaatacttttgctttcagggaaaatggtataacgttaatttattaataaattggtaatatacaaaacaattaatcatttatagttttttttgtaatttaagtggcatttctatgcaggcagcacagcagactagttaatctattgcttggacttaactagttatcagatcctttgaaaagagaatatttacaatatatgactaatttggggaaaatgaagttttgatttatttgtgtttaaatgctgctgtcagacgattgttcttagacctcctaaatgccccatattaaaagaactcattcataggaaggtgtttcattttggtgtgcaaccctgtcattacgtcaacgcaacgtctaactggacttcccaagataaatggtaccagcgtcctcttaaaagatgccttaatccattccttgaggacagaccttagttgaaatgatagcagaatgtgcttctctctggcagctggccttctgcttctgagttgcacattaatcagattagcctgtattctcttcagtgaattttgataatggcttccagactctttggcgttggagacgcctgttaggatcttcaagtcccatcatagaaaattgaaacacagagttgttctgctgatagttttggggatacgtccatctttttaagggattgctttcatctaattctggcaggacctcaccaaaagatccagcctcatacctacatcagacaaaatatcgccgttgttccttctgtactaaagtattgtgttttgctttggaaacacccactcactttgcaatagccgtgcaagatgaatgcagattacactgatcttatgtgttacaaaattggagaaagtatttaataaaacctgttaatttttatactgacaataaaaatgtttctacagatattaatgttaacaagacaaaataaatgtcacgcaacttatttttttaatac

SEQ ID NO: 587 - protein, 720 aa, Homo sapiens; identical to SEQ ID NO: 569

SEQ ID NO: 588 - DNA, 4218 bp, Homo sapiens
tctctgatcctgtttccttatcagaaactgggaatagtactctgcagggtggttgggcagatgaaatagaatcacctatgtagtgtgaccctcccatagtagggcctccattaatattcagttttttcctctcatttctattgtttagaaggacagaaacatgcaatgtcctgcgaacatttccaagtggcttcctctcctccaaaagcttcagctgcctggcaaccctccccgcagtatcaagcaggcgcattttaaagtctctttagcgggagggcagggttagagccttcggtcacttgttttctaacttgacataaaacaacgtaacgcagtcactcagcgagccgttggccagcctcgctcgcccggggaggagggaggaggtggccgggcgggcggcgggtgcggagcgggcgagggagcgcgcgcggccgccacaaagctcgggcgccgcggggctgcatgcggcgtacctggcccggcgcggcgactgctctccgggctggcgggggccggccgcgagccccgggggccccgaggccgcagcttgcctgcgcgctctgagccttcgcaactcgcgagcaaagtttggtggaggcaacgccaagcctgagtcctttcttcctctcgttccccaaatccgagggcagcccgcgggcgtcatgcccgcgctcctccgcagcctggggtacgcgtgaagcccgggaggcttggcgccggcgaagacccaaggaccactcttctgcgtttggagttgctccccacaaccccgggctcgtcgctttctccatcccgacccacgcggggcgcggggacaacacaggtcgcggaggagcgttgccattcaagtgactgcagcagcagcggcagcgcctcggttcctgagcccaccgcaggctgaaggcattgcgcgtagtccatgcccgtagaggaagtgtgcagatgggattaacgtccacatggagatatggaagaggaccggggattggtaccgtaaccatggtcagctggggtcgtttcatctgcctggtcgtggtcaccatggcaaccttgtccctggcccggccctccttcagtttagttgaggataccacattagagccagaagatgccatctcatccggagatgatgaggatgacaccgatggtgcggaagattttgtcagtgagaacagtaacaacaagagagcaccatactggaccaacacagaaaagatggaaaagcggctccatgctgtgcctgcggccaacactgtcaagtttcgctgcccagccggggggaacccaatgccaaccatgcggtggctgaaaaacgggaaggagtttaagcaggagcatcgcattggaggctacaaggtacgaaaccagcactggagcctcattatggaaagtgtggtcccatctgacaagggaaattatacctgtgtggtggagaatgaatacgggtccatcaatcacacgtaccacctggatgttgtggagcgatcgcctcaccggcccatcctccaagccggactgccggcaaatgcctccacagtggtcggaggagacgtagagtttgtctgcaaggtttacagtgatgcccagccccacatccagtggatcaagcacgtggaaaagaacggcagtaaatacgggcccgacgggctgccctacctcaaggttctcaagcactcggggataaatagttccaatgcagaagtgctggctctgttcaatgtgaccgaggcggatgctggggaatatatatgtaaggtctccaattatatagggcaggccaaccagtctgcctggctcactgtcctgccaaaacagcaagcgcctggaagagaaaaggagattacagcttccccagactacctggagatagccatttactgcataggggtcttcttaatcgcctgtatggtggtaacagtcatcctgtgccgaatgaagaacacgaccaagaagccagacttcagcagccagccggctgtgcacaagctgaccaaacgtatccccctgcggagacaggtaacagaaagtttcggctgagtccagctcctccatgaactccaacaccccgctggtgaggataacaacacgcctctcttcaacggcagacacccccatgctggcaggggtctccgagtatgaacttccagaggacccaaaatgggagtttccaagagataagctgacactgggcaagcccctgggagaaggttgctttgggcaagtggtcatggcggaagcagtgggaattgacaaagacaagcccaaggaggcggtcaccgtggccgtgaagatgttgaaagatgatgccacagagaaagacctttctgatctggtgtcagagatggagatgatgaagatgattgggaaacacaagaatatcataaatcttcttggagcctgcacacaggatgggcctctctatgtcatagttgagtatgcctctaaaggcaacctccgagaatacctccgagcccggaggccacccgggatggagtactcctatgacattaaccgtgttcctgaggagcagatgaccttcaaggacttggtgtcatgcacctaccagctggccagaggcatggagtacttggcttcccaaaaatgtattcatcgagatttagcagccagaaatgttttggtaacagaaaacaatgtgatgaaaatagcagactttggactcgccagagatatcaacaatatagactattacaaaaagaccaccaatgggcggcttccagtcaagtggatggctccagaagccctgtttgatagagtatacactcatcagagtgatgtctggtccttcggggtgttaatgtgggagatcttcactttagggggctcgccctacccagggattcccgtggaggaactttttaagctgctgaaggaaggacacagaatggataagccagccaactgcaccaacgaactgtacatgatgatgagggactgttggcatgcagtgccctcccagagaccaacgttcaagcagttggtagaagacttggatcgaattctcactctcacaaccaatgaggaatacttggacctcagccaacctctcgaacagtattcacctagttaccctgacacaagaagttcttgttcttcaggagatgattctgttttttctccagaccccatgccttacgaaccatgccttcctcagtatccacacataaacggcagtgttaaaacatgaatgactgtgtctgcctgtccccaaacaggacagcactgggaacctagctacactgagcagggagaccatgcctcccagagcttgttgtctccacttgtatatatggatcagaggagtaaataattggaaaagtaatcagcatatgtgtaaagatttatacatggactgccacaagccaccatgtaacccctctcacctgccgtgcgtactggctgtggaccagtaggactcaaggtggacgtgcgttctgccttccttgttaattttgtaataattggagaagatttatgtcagcacacacttacagagcacaaatgcagtatataggtgctggatgtatgtaaatatattcaaattatgtataaatatatattatatatttacaaggagttattttttgtattgattttaaatggatgtcccaatgcacctagaaaattggtctctctttttttaatagctatttgctaaatgctgttcttacacataatttcttaattttcaccgagcagaggtggaaaaatacttttgctttcagggaaaatggtataacgttaatttattaataaattggtaatatacaaaacaattaatcatttatagttttttttgtaatttaagtggcatttctatgcaggcagcacagcagactagttaatctattgcttggacttaactagttatcagatcctttgaaaagagaatatttacaatatatgactaatttggggaaaatgaagttttgatttatttgtgtttaaatgctgctgtcagacgattgttcttagacctcctaaatgccccatattaaaagaactcattcataggaaggtgtttcattttggtgtgcaaccctgtcattacgtcaacgcaacgtctaactggacttcccaagataaatggtaccagcgtcctcttaaaagatgccttaatccattccttgaggacagaccttagttgaaatgatagcagaatgtgcttctctctggcagctggccttctgcttctga

SEQ ID NO: 589 - protein, 382 aa, Homo sapiens
MNSNTPLVRITTRLSSTADTPMLAGVSEYELPEDPKWEFPRDKLTLGKPLGEGCFGQVVMAEAVGIDKDKPKEAVTVAVKMLKDDATEKDLSDLVSEMEMMKMIGKHKNIINLLGACTQDGPLYVIVEYASKGNLREYLRARRPPGMEYSYDINRVPEEQMTFKDLVSCTYQLRMEYLASQKCIHRDLAARNVLVTENNVMKIADFGLARDINNIDYYKKTTNGRLPVKWMAPEALFDRVYTHQSDVWSFGVLMWEIFTLGGSPYPGIPVEELFKLLKEGHRMDKPANCTNELYMMMRDCWHAVPSQRPTFKQLVEDLDRILTLTTNEEYLDLSQPLEQYSPSYPDTRSSCSSGDDSVFSPDPMPYEPCLPQYPHINGSVKT

SEQ ID NO: 590 - DNA, 4472 bp, Homo sapiens
tctctgatcctgtttccttatcagaaactgggaatagtactctgcagggtggttgggcagatgaaatagaatcacctatgtagtgtgaccctcccatagtagggcctccattaatattcagttttttcctctcatttctattgtttagaaggacagaaacatgcaatgtcctgcgaacatttccaagtggcttcctctcctccaaaagcttcagctgcctggcaaccctccccgcagtatcaagcaggcgcattttaaagtctctttagcgggagggcagggttagagccttcggtcacttgttttctaacttgacataaaacaacgtaacgcagtcactcagcgagccgttggccagcctcgctcgcccggggaggagggaggaggtggccgggcgggcggcgggtgcggagcgggcgagggagcgcgcgcggccgccacaaagctcgggcgccgcggggctgcatgcggcgtacctggcccggcgcggcgactgctctccgggctggcgggggccggccgcgagccccgggggccccgaggccgcagcttgcctgcgcgctctgagccttcgcaactcgcgagcaaagtttggtggaggcaacgccaagcctgagtcctttcttcctctcgttccccaaatccgagggcagcccgcgggcgtcatgcccgcgctcctccgcagcctggggtacgcgtgaagcccgggaggcttggcgccggcgaagacccaaggaccactcttctgcgtttggagttgctccccacaaccccgggctcgtcgctttctccatcccgacccacgcggggcgcggggacaacacaggtcgcggaggagcgttgccattcaagtgactgcagcagcagcggcagcgcctcggttcctgagcccaccgcaggctgaaggcattgcgcgtagtccatgcccgtagaggaagtgtgcagatgggattaacgtccacatggagatatggaagaggaccggggattggtaccgtaaccatggtcagctggggtcgtttcatctgcctggtcgtggtcaccatggcaaccttgtccctggcccggccctccttcagtttagttgaggataccacattagagccagaagagccaccaaccaaataccaaatctctcaaccagaagtgtacgtggctgcgccaggggagtcgctagaggtgcgctgcctgttgaaagatgccgccgtgatcagttggactaaggatggggtgcacttggggcccaacaataggacagtgcttattggggagtacttgcagataaagggcgccacgcctagagactccggcctctatgcttgtactgccagtaggactgtagacagtgaaacttggtacttcatggtgaatgtcacagatgccatctcatccggagatgatgaggatgacaccgatggtgcggaagattttgtcagtgagaacagtaacaacaagagagcaccatactggaccaacacagaaaagatggaaaagcggctccatgctgtgcctgcggccaacactgtcaagtttcgctgcccagccggggggaacccaatgccaaccatgcggtggctgaaaaacgggaaggagtttaagcaggagcatcgcattggaggctacaaggtacgaaaccagcactggagcctcattatggaaagtgtggtcccatctgacaagggaaattatacctgtgtggtggagaatgaatacgggtccatcaatcacacgtaccacctggatgttgtggagcgatcgcctcaccggcccatcctccaagccggactgccggcaaatgcctccacagtggtcggaggagacgtagagtttgtctgcaaggtttacagtgatgcccagccccacatccagtggatcaagcacgtggaaaagaacggcagtaaatacgggcccgacgggctgccctacctcaaggttctcaaggccgccggtgttaacaccacggacaaagagattgaggttctctatattcggaatgtaacttttgaggacgctggggaatatacgtgcttggcgggtaattctattgggatatcctttcactctgcatggttgacagttctgccagcgcctggaagagaaaaggagattacagcttccccagactacctggagatagccatttactgcataggggtcttcttaatcgcctgtatggtggtaacagtcatcctgtgccgaatgaagaacacgaccaagaagccagacttcagcagccagccggctgtgcacaagctgaccaaacgtatccccctgcggagacaggtttcggctgagtccagctcctccatgaactccaacaccccgctggtgaggataacaacacgcctctcttcaacggcagacacccccatgctggcaggggtctccgagtatgaacttccagaggacccaaaatgggagtttccaagagataagctgacactgggcaagcccctgggagaaggttgctttgggcaagtggtcatggcggaagcagtgggaattgacaaagacaagcccaaggaggcggtcaccgtggccgtgaagatgttgaaagatgatgccacagagaaagacctttctgatctggtgtcagagatggagatgatgaagatgattgggaaacacaagaatatcataaatcttcttggagcctgcacacaggatgggcctctctatgtcatagttgagtatgcctctaaaggcaacctccgagaatacctccgagcccggaggccacccgggatggagtactcctatgacattaaccgtgttcctgaggagcagatgaccttcaaggacttggtgtcatgcacctaccagctggccagaggcatggagtacttggcttcccaaaaatgtattcatcgagatttagcagccagaaatgttttggtaacagaaaacaatgtgatgaaaatagcagactttggactcgccagagatatcaacaatatagactattacaaaaagaccaccaatgggcggcttccagtcaagtggatggctccagaagccctgtttgatagagtatacactcatcagagtgatgtctggtccttcggggtgttaatgtgggagatcttcactttagggggctcgccctacccagggattcccgtggaggaactttttaagctgctgaaggaaggacacagaatggataagccagccaactgcaccaacgaactgtacatgatgatgagggactgttggcatgcagtgccctcccagagaccaacgttcaagcagttggtagaagacttggatcgaattctcactctcacaaccaatgaggaatacttggacctcagccaacctctcgaacagtattcacctagttaccctgacacaagaagttcttgttcttcaggagatgattctgttttttctccagaccccatgccttacgaaccatgccttcctcagtatccacacataaacggcagtgttaaaacatgaatgactgtgtctgcctgtccccaaacaggacagcactgggaacctagctacactgagcagggagaccatgcctcccagagcttgttgtctccacttgtatatatggatcagaggagtaaataattggaaaagtaatcagcatatgtgtaaagatttatacatggactgccacaagccaccatgtaacccctctcacctgccgtgcgtactggctgtggaccagtaggactcaaggtggacgtgcgttctgccttccttgttaattttgtaataattggagaagatttatgtcagcacacacttacagagcacaaatgcagtatataggtgctggatgtatgtaaatatattcaaattatgtataaatatatattatatatttacaaggagttattttttgtattgattttaaatggatgtcccaatgcacctagaaaattggtctctctttttttaatagctatttgctaaatgctgttcttacacataatttcttaattttcaccgagcagaggtggaaaaatacttttgctttcagggaaaatggtataacgttaatttattaataaattggtaatatacaaaacaattaatcatttatagttttttttgtaatttaagtggcatttctatgcaggcagcacagcagactagttaatctattgcttggacttaactagttatcagatcctttgaaaagagaatatttacaatatatgactaatttggggaaaatgaagttttgatttatttgtgtttaaatgctgctgtcagacgattgttcttagacctcctaaatgccccatattaaaagaactcattcataggaaggtgtttcattttggtgtgcaaccctgtcattacgtcaacgcaacgtctaactggacttcccaagataaatggtaccagcgtcctcttaaaagatgccttaatccattccttgaggacagaccttagttgaaatgatagcagaatgtgcttctctctggcagctggccttctgcttctga

SEQ ID NO: 591 - protein, 832 aa, Homo sapiens
MGLTSTWRYGRGPGIGTVTMVSWGRFICLVVVTMATLSLARPSFSLVEDTTLEPEEPPTKYQISQPEVYVAAPGESLEVRCLLKDAAVISWTKDGVHLGPNNRTVLIGEYLQIKGATPRDSGACTASRTVDSETWYFMVNVTDAISSGDDEDDTDGAEDFVSENSNNKRAPYWTNTEKMEKRLHAVPAANTVKFRCPAGGNPMPTMRWLKNGKEFKQEHRIGGYKVRNQHWSLIMESVVPSDKGNYTCVVENEYGSINHTYHLDVVERSPHRPILQAGLPANASTVVGGDVEFVCKVYSDAQPHIQWIKHVEKNGSKYGPDGLPYLKVLKAAGVNTTDKEIEVLYIRNVTFEDAGEYTCLAGNSIGISFHSAWLTVLPAPGREKEITDDYLEIAIYCIGVFLIACMVVTVILCRMKNTTKKPDFSSQPAVHKLTKRIPLRRQVSAESSSSMNSNTPLVRITTRLSSTADTPMLAGVSEYELPEDPKWEFPRDKLTLGKPLGEGCFGQVVMAEAVGIDKDKPKEAVTVAVKMLKDDATEKDLSDLVSEMEMMKMIGKHKNIINLLGACTQDGPLYVIVEYASKGNLREYLRARRPPGMEYSYDINRVPEEQMTFKDLVSCTYQLRMEYLASQKCIHRDLAARNVLVTENNVMKIADFGLARDINNIDYYKKTTNGRLPVKWMAPEALFDRVYTHQSDVWSFGVLMWEIFTLGGSPYPGIPVEELFKLLKEGHRMDKPANCTNELYMMMRDCWHAVPSQRPTFKQLVEDLDRILTLTTNEEYLDLSQPLEQYSPSYPDTRSSCSSGDDSVFSPDPMPYEPCLPQYPHINGSVKT

SEQ ID NO: 592 - DNA, 2657 bp, Homo sapiens
cgggcgggcggcgggtgcggagcgggcgagggagcgcgcgcggccgccacaaagctcgggcgccgcggggctgcatgcggcgtacctggcccggcgcggcgactgctctccgggctggcgggggccggccgcgagccccgggggccccgaggccgcagcttgcctgcgcgctctgagccttcgcaactcgcgagcaaagtttggtggaggcaacgccaagcctgagtcctttcttcctctcgttccccaaatccgagggcagcccgcgggcgtcatgcccgcgctcctccgcagcctggggtacgcgtgaagcccgggaggcttggcgccggcgaagacccaaggaccactcttctgcgtttggagttgctccccacaaccccgggctcgtcgctttctccatcccgacccacgcggggcgcggggacaacacaggtcgcggaggagcgttgccattcaagtgactgcagcagcagcggcagcgcctcggttcctgagcccaccgcaggctgaaggcattgcgcgtagtccatgcccgtagaggaagtgtgcagatgggattaacgtccacatggagatatggaagaggaccggggattggtaccgtaaccatggtcagctggggtcgtttcatctgcctggtcgtggtcaccatggcaaccttgtccctggcccggccctccttcagtttagttgaggataccacattagagccagaagatgccatctcatccggagatgatgaggatgacaccgatggtgcggaagattttgtcagtgagaacagtaacaacaagagagcaccatactggaccaacacagaaaagatggaaaagcggctccatgctgtgcctgcggccaacactgtcaagtttcgctgcccagccggggggaacccaatgccaaccatgcggtggctgaaaaacgggaaggagtttaagcaggagcatcgcattggaggctacaaggtacgaaaccagcactggagcctcattatggaaagtgtggtcccatctgacaagggaaattatacctgtgtggtggagaatgaatacgggtccatcaatcacacgtaccacctggatgttgtggagcgatcgcctcaccggcccatcctccaagccggactgccggcaaatgcctccacagtggtcggaggagacgtagagtttgtctgcaaggtttacagtgatgcccagccccacatccagtggatcaagcacgtggaaaagaacggcagtaaatacgggcccgacgggctgccctacctcaaggttctcaagcactcggggataaatagttccaatgcagaagtgctggctctgttcaatgtgaccgaggcggatgctggggaatatatatgtaaggtctccaattatatagggcaggccaaccagtctgcctggctcactgtcctgccaaaacagcaagcgcctggaagagaaaaggagattacagcttccccagactacctggagatagccatttactgcataggggtcttcttaatcgcctgtatggtggtaacagtcatcctgtgccgaatgaagaacacgaccaagaagccagacttcagcagccagccggctgtgcacaagctgaccaaacgtatccccctgcggagacaggtttcggctgagtccagctcctccatgaactccaacaccccgctggtgaggataacaacacgcctctcttcaacggcagacacccccatgctggcaggggtctccgagtatgaacttccagaggacccaaaatgggagtttccaagagataagctgacactgggcaagcccctgggagaaggttgctttgggcaagtggtcatggcggaagcagtgggaattgacaaagacaagcccaaggaggcggtcaccgtggccgtgaagatgttgaaagatgatgccacagagaaagacctttctgatctggtgtcagagatggagatgatgaagatgattgggaaacacaagaatatcataaatcttcttggagcctgcacacaggatgggcctctctatgtcatagttgagtatgcctctaaaggcaacctccgagaatacctccgagcccggaggccacccgggatggagtactcctatgacattaaccgtgttcctgaggagcagatgaccttcaaggacttggtgtcatgcacctaccagctggccagaggcatggagtacttggcttcccaaaaatgtattcatcgagatttagcagccagaaatgttttggtaacagaaaacaatgtgatgaaaatagcagactttggactcgccagagatatcaacaatatagactattacaaaaagaccaccaatgggcggcttccagtcaagtggatggctccagaagccctgtttgatagagtatacactcatcagagtgatgtctggtccttcggggtgttaatgtgggagatcttcactttagggggctcgccctacccagggattcccgtggaggaactttttaagctgctgaaggaaggacacagaatggataagccagccaactgcaccaacgaactgtacatgatgatgagggactgttggcatgcagtgccctcccagagaccaacgttcaagcagttggtagaagacttggatcgaattctcactctcacaaccaatgaggtaagaacttccttc

SEQ ID NO: 593 - protein, 697 aa, Homo sapiens; identical to SEQ ID NO: 585

SEQ ID NO: 594 - DNA, 4648 bp, Homo sapiens
tctctgatcctgtttccttatcagaaactgggaatagtactctgcagggtggttgggcagatgaaatagaatcacctatgtagtgtgaccctcccatagtagggcctccattaatattcagttttttcctctcatttctattgtttagaaggacagaaacatgcaatgtcctgcgaacatttccaagtggcttcctctcctccaaaagcttcagctgcctggcaaccctccccgcagtatcaagcaggcgcattttaaagtctctttagcgggagggcagggttagagccttcggtcacttgttttctaacttgacataaaacaacgtaacgcagtcactcagcgagccgttggccagcctcgctcgcccggggaggagggaggaggtggccgggcgggcggcgggtgcggagcgggcgagggagcgcgcgcggccgccacaaagctcgggcgccgcggggctgcatgcggcgtacctggcccggcgcggcgactgctctccgggctggcgggggccggccgcgagccccgggggccccgaggccgcagcttgcctgcgcgctctgagccttcgcaactcgcgagcaaagtttggtggaggcaacgccaagcctgagtcctttcttcctctcgttccccaaatccgagggcagcccgcgggcgtcatgcccgcgctcctccgcagcctggggtacgcgtgaagcccgggaggcttggcgccggcgaagacccaaggaccactcttctgcgtttggagttgctccccacaaccccgggctcgtcgctttctccatcccgacccacgcggggcgcggggacaacacaggtcgcggaggagcgttgccattcaagtgactgcagcagcagcggcagcgcctcggttcctgagcccaccgcaggctgaaggcattgcgcgtagtccatgcccgtagaggaagtgtgcagatgggattaacgtccacatggagatatggaagaggaccggggattggtaccgtaaccatggtcagctggggtcgtttcatctgcctggtcgtggtcaccatggcaaccttgtccctggcccggccctccttcagtttagttgaggataccacattagagccagaagagccaccaaccaaataccaaatctctcaaccagaagtgtacgtggctgcgccaggggagtcgctagaggtgcgctgcctgttgaaagatgccgccgtgatcagttggactaaggatggggtgcacttggggcccaacaataggacagtgcttattggggagtacttgcagataaagggcgccacgcctagagactccggcctctatgcttgtactgccagtaggactgtagacagtgaaacttggtacttcatggtgaatgtcacagatgccatctcatccggagatgatgaggatgacaccgatggtgcggaagattttgtcagtgagaacagtaacaacaagagagcaccatactggaccaacacagaaaagatggaaaagcggctccatgctgtgcctgcggccaacactgtcaagtttcgctgcccagccggggggaacccaatgccaaccatgcggtggctgaaaaacgggaaggagtttaagcaggagcatcgcattggaggctacaaggtacgaaaccagcactggagcctcattatggaaagtgtggtcccatctgacaagggaaattatacctgtgtggtggagaatgaatacgggtccatcaatcacacgtaccacctggatgttgtggagcgatcgcctcaccggcccatcctccaagccggactgccggcaaatgcctccacagtggtcggaggagacgtagagtttgtctgcaaggtttacagtgatgcccagccccacatccagtggatcaagcacgtggaaaagaacggcagtaaatacgggcccgacgggctgccctacctcaaggttctcaaggtttcggctgagtccagctcctccatgaactccaacaccccgctggtgaggataacaacacgcctctcttcaacggcagacacccccatgctggcaggggtctccgagtatgaacttccagaggacccaaaatgggagtttccaagagataagctgacactgggcaagcccctgggagaaggttgctttgggcaagtggtcatggcggaagcagtgggaattgacaaagacaagcccaaggaggcggtcaccgtggccgtgaagatgttgaaagatgatgccacagagaaagacctttctgatctggtgtcagagatggagatgatgaagatgattgggaaacacaagaatatcataaatcttcttggagcctgcacacaggatgggcctctctatgtcatagttgagtatgcctctaaaggcaacctccgagaatacctccgagcccggaggccacccgggatggagtactcctatgacattaaccgtgttcctgaggagcagatgaccttcaaggacttggtgtcatgcacctaccagctggccagaggcatggagtacttggcttcccaaaaatgtattcatcgagatttagcagccagaaatgttttggtaacagaaaacaatgtgatgaaaatagcagactttggactcgccagagatatcaacaatatagactattacaaaaagaccaccaatgggcggcttccagtcaagtggatggctccagaagccctgtttgatagagtatacactcatcagagtgatgtctggtccttcggggtgttaatgtgggagatcttcactttagggggctcgccctacccagggattcccgtggaggaactttttaagctgctgaaggaaggacacagaatggataagccagccaactgcaccaacgaactgtacatgatgatgagggactgttggcatgcagtgccctcccagagaccaacgttcaagcagttggtagaagacttggatcgaattctcactctcacaaccaatgaggaatacttggacctcagccaacctctcgaacagtattcacctagttaccctgacacaagaagttcttgttcttcaggagatgattctgttttttctccagaccccatgccttacgaaccatgccttcctcagtatccacacataaacggcagtgttaaaacatgaatgactgtgtctgcctgtccccaaacaggacagcactgggaacctagctacactgagcagggagaccatgcctcccagagcttgttgtctccacttgtatatatggatcagaggagtaaataattggaaaagtaatcagcatatgtgtaaagatttatacagttgaaaacttgtaatcttccccaggaggagaagaaggtttctggagcagtggactgccacaagccaccatgtaacccctctcacctgccgtgcgtactggctgtggaccagtaggactcaaggtggacgtgcgttctgccttccttgttaattttgtaataattggagaagatttatgtcagcacacacttacagagcacaaatgcagtatataggtgctggatgtatgtaaatatattcaaattatgtataaatatatattatatatttacaaggagttattttttgtattgattttaaatggatgtcccaatgcacctagaaaattggtctctctttttttaatagctatttgctaaatgctgttcttacacataatttcttaattttcaccgagcagaggtggaaaaatacttttgctttcagggaaaatggtataacgttaatttattaataaattggtaatatacaaaacaattaatcatttatagttttttttgtaatttaagtggcatttctatgcaggcagcacagcagactagttaatctattgcttggacttaactagttatcagatcctttgaaaagagaatatttacaatatatgactaatttggggaaaatgaagttttgatttatttgtgtttaaatgctgctgtcagacgattgttcttagacctcctaaatgccccatattaaaagaactcattcataggaaggtgtttcattttggtgtgcaaccctgtcattacgtcaacgcaacgtctaactggacttcccaagataaatggtaccagcgtcctcttaaaagatgccttaatccattccttgaggacagaccttagttgaaatgatagcagaatgtgcttctctctggcagctggccttctgcttctgagttgcacattaatcagattagcctgtattctcttcagtgaattttgataatggcttccagactctttggcgttggagacgcctgttaggatcttcaagtcccatcatagaaaattgaaacacagagttgttctgctgatagttttggggatacgtccatctttttaagggattgctttcatctaattctggcaggacctcaccaaaagatccagcctcatacctacatcagacaaaatatcgccgttgttccttctgtactaaagtattgtgttttgctttggaaacacccactcactttgcaatagccgtgcaagatgaatgcagattacactgatcttatgtgttacaaaattggagaaagtatttaataaaacctgttaatttttatactgacaataaaaatgtttctacagatattaatgttaacaagacaaaataaatgtcacgcaacttatttttttaatac

SEQ ID NO: 595 - protein, 720 aa, Homo sapiens
MGLTSTWRYGRGPGIGTVTMVSWGRFICLVVVTMATLSLARPSFSLVEDTTLEPEEPPTKYQISQPEVYVAAPGESLEVRCLLKDAAVISWTKDGVHLGPNNRTVLIGEYLQIKGATPRDSGACTASRTVDSETWYFMVNVTDAISSGDDEDDTDGAEDFVSENSNNKRAPYWTNTEKMEKRLHAVPAANTVKFRCPAGGNPMPTMRWLKNGKEFKQEHRIGGYKVRNQHWSLIMESVVPSDKGNYTCVVENEYGSINHTYHLDVVERSPHRPILQAGLPANASTVVGGDVEFVCKVYSDAQPHIQWIKHVEKNGSKYGPDGLPYLKVLKVSAESSSSMNSNTPLVRITTRLSSTADTPMLAGVSEYELPEDPKWEFPRDKLTLGKPLGEGCFGQVVMAEAVGIDKDKPKEAVTVAVKMLKDDATEKDLSDLVSEMEMMKMIGKHKNIINLLGACTQDGPLYVIVEYASKGNLREYLRARRPPGMEYSYDINRVPEEQMTFKDLVSCTYQLRMEYLASQKCIHRDLAARNVLVTENNVMKIADFGLARDINNIDYYKKTTNGRLPVKWMAPEALFDRVYTHQSDVWSFGVLMWEIFTLGGSPYPGIPVEELFKLLKEGHRMDKPANCTNELYMMMRDCWHAVPSQRPTFKQLVEDLDRILTLTTNEEYLDLSQPLEQYSPSYPDTRSSCSSGDDSVFSPDPMPYEPCLPQYPHINGSVKT

SEQ ID NO: 596 - DNA, 2219 bp, Homo sapiens
tctctgatcctgtttccttatcagaaactgggaatagtactctgcagggtggttgggcagatgaaatagaatcacctatgtagtgtgaccctcccatagtagggcctccattaatattcagttttttcctctcatttctattgtttagaaggacagaaacatgcaatgtcctgcgaacatttccaagtggcttcctctcctccaaaagcttcagctgcctggcaaccctccccgcagtatcaagcaggcgcattttaaagtctctttagcgggagggcagggttagagccttcggtcacttgttttctaacttgacataaaacaacgtaacgcagtcactcagcgagccgttggccagcctcgctcgcccggggaggagggaggaggtggccgggcgggcggcgggtgcggagcgggcgagggagcgcgcgcggccgccacaaagctcgggcgccgcggggctgcatgcggcgtacctggcccggcgcggcgactgctctccgggctggcgggggccggccgcgagccccgggggccccgaggccgcagcttgcctgcgcgctctgagccttcgcaactcgcgagcaaagtttggtggaggcaacgccaagcctgagtcctttcttcctctcgttccccaaatccgagggcagcccgcgggcgtcatgcccgcgctcctccgcagcctggggtacgcgtgaagcccgggaggcttggcgccggcgaagacccaaggaccactcttctgcgtttggagttgctccccacaaccccgggctcgtcgctttctccatcccgacccacgcggggcgcggggacaacacaggtcgcggaggagcgttgccattcaagtgactgcagcagcagcggcagcgcctcggttcctgagcccaccgcaggctgaaggcattgcgcgtagtccatgcccgtagaggaagtgtgcagatgggattaacgtccacatggagatatggaagaggaccggggattggtaccgtaaccatggtcagctggggtcgtttcatctgcctggtcgtggtcaccatggcaaccttgtccctggcccggccctccttcagtttagttgaggataccacattagagccagaagagccaccaaccaaataccaaatctctcaaccagaagtgtacgtggctgcgccaggggagtcgctagaggtgcgctgcctgttgaaagatgccgccgtgatcagttggactaaggatggggtgcacttggggcccaacaataggacagtgcttattggggagtacttgcagataaagggcgccacgcctagagactccggcctctatgcttgtactgccagtaggactgtagacagtgaaacttggtacttcatggtgaatgtcacagatgccatctcatccggagatgatgaggatgacaccgatggtgcggaagattttgtcagtgagaacagtaacaacaagagagcaccatactggaccaacacagaaaagatggaaaagcggctccatgctgtgcctgcggccaacactgtcaagtttcgctgcccagccggggggaacccaatgccaaccatgcggtggctgaaaaacgggaaggagtttaagcaggagcatcgcattggaggctacaaggtacgaaaccagcactggagcctcattatggaaagtgtggtcccatctgacaagggaaattatacctgtgtggtggagaatgaatacgggtccatcaatcacacgtaccacctggatgttgtggagcgatcgcctcaccggcccatcctccaagccggactgccggcaaatgcctccacagtggtcggaggagacgtagagtttgtctgcaaggtttacagtgatgcccagccccacatccagtggatcaagcacgtggaaaagaacggcagtaaatacgggcccgacgggctgccctacctcaaggttctcaagcactcggggataaatagttccaatgcagaagtgctggctctgttcaatgtgaccgaggcggatgctggggaatatatatgtaaggtctccaattatatagggcaggccaaccagtctgcctggctcactgtcctgccaaaacagcaaggccgccggtgttaacaccacggacaaagagattgaggttctctatattcggaatgtaacttttgaggacgctggggaatatacgtgcttggcgggtaattctattgggatatcctttcactctgcatggt

SEQ ID NO: 597 - protein, 383 aa, Homo sapiens; identical to SEQ ID NO: 575

SEQ ID NO: 598 - DNA, 5080 bp, Homo sapiens
tctctgatcctgtttccttatcagaaactgggaatagtactctgcagggtggttgggcagatgaaatagaatcacctatgtagtgtgaccctcccatagtagggcctccattaatattcagttttttcctctcatttctattgtttagaaggacagaaacatgcaatgtcctgcgaacatttccaagtggcttcctctcctccaaaagcttcagctgcctggcaaccctccccgcagtatcaagcaggcgcattttaaagtctctttagcgggagggcagggttagagccttcggtcacttgttttctaacttgacataaaacaacgtaacgcagtcactcagcgagccgttggccagcctcgctcgcccggggaggagggaggaggtggccgggcgggcggcgggtgcggagcgggcgagggagcgcgcgcggccgccacaaagctcgggcgccgcggggctgcatgcggcgtacctggcccggcgcggcgactgctctccgggctggcgggggccggccgcgagccccgggggccccgaggccgcagcttgcctgcgcgctctgagccttcgcaactcgcgagcaaagtttggtggaggcaacgccaagcctgagtcctttcttcctctcgttccccaaatccgagggcagcccgcgggcgtcatgcccgcgctcctccgcagcctggggtacgcgtgaagcccgggaggcttggcgccggcgaagacccaaggaccactcttctgcgtttggagttgctccccacaaccccgggctcgtcgctttctccatcccgacccacgcggggcgcggggacaacacaggtcgcggaggagcgttgccattcaagtgactgcagcagcagcggcagcgcctcggttcctgagcccaccgcaggctgaaggcattgcgcgtagtccatgcccgtagaggaagtgtgcagatgggattaacgtccacatggagatatggaagaggaccggggattggtaccgtaaccatggtcagctggggtcgtttcatctgcctggtcgtggtcaccatggcaaccttgtccctggcccggccctccttcagtttagttgaggataccacattagagccagaagagccaccaaccaaataccaaatctctcaaccagaagtgtacgtggctgcgccaggggagtcgctagaggtgcgctgcctgttgaaagatgccgccgtgatcagttggactaaggatggggtgcacttggggcccaacaataggacagtgcttattggggagtacttgcagataaagggcgccacgcctagagactccggcctctatgcttgtactgccagtaggactgtagacagtgaaacttggtacttcatggtgaatgtcacagatgccatctcatccggagatgatgaggatgacaccgatggtgcggaagattttgtcagtgagaacagtaacaacaagagagcaccatactggaccaacacagaaaagatggaaaagcggctccatgctgtgcctgcggccaacactgtcaagtttcgctgcccagccggggggaacccaatgccaaccatgcggtggctgaaaaacgggaaggagtttaagcaggagcatcgcattggaggctacaaggtacgaaaccagcactggagcctcattatggaaagtgtggtcccatctgacaagggaaattatacctgtgtggtggagaatgaatacgggtccatcaatcacacgtaccacctggatgttgtggagcgatcgcctcaccggcccatcctccaagccggactgccggcaaatgcctccacagtggtcggaggagacgtagagtttgtctgcaaggtttacagtgatgcccagccccacatccagtggatcaagcacgtggaaaagaacggcagtaaatacgggcccgacgggctgccctacctcaaggttctcaaggccgccggtgttaacaccacggacaaagagattgaggttctctatattcggaatgtaacttttgaggacgctggggaatatacgtgcttggcgggtaattctattgggatatcctttcactctgcatggttgacagttctgccagcgcctggaagagaaaaggagattacagcttccccagactacctggagatagccatttactgcataggggtcttcttaatcgcctgtatggtggtaacagtcatcctgtgccgaatgaagaacacgaccaagaagccagacttcagcagccagccggctgtgcacaagctgaccaaacgtatccccctgcggagacaggtttcggctgagtccagctcctccatgaactccaacaccccgctggtgaggataacaacacgcctctcttcaacggcagacacccccatgctggcaggggtctccgagtatgaacttccagaggacccaaaatgggagtttccaagagataagctgacactgggcaagcccctgggagaaggttgctttgggcaagtggtcatggcggaagcagtgggaattgacaaagacaagcccaaggaggcggtcaccgtggccgtgaagatgttgaaagatgatgccacagagaaagacctttctgatctggtgtcagagatggagatgatgaagatgattgggaaacacaagaatatcataaatcttcttggagcctgcacacaggatgggcctctctatgtcatagttgagtatgcctctaaaggcaacctccgagaatacctccgagcccggaggccacccgggatggagtactcctatgacattaaccgtgttcctgaggagcagatgaccttcaaggacttggtgtcatgcacctaccagctggccagaggcatggagtacttggcttcccaaaaatgtattcatcgagatttagcagccagaaatgttttggtaacagaaaacaatgtgatgaaaatagcagactttggactcgccagagatatcaacaatatagactattacaaaaagaccaccaatgggcggcttccagtcaagtggatggctccagaagccctgtttgatagagtatacactcatcagagtgatgtctggtccttcggggtgttaatgtgggagatcttcactttagggggctcgccctacccagggattcccgtggaggaactttttaagctgctgaaggaaggacacagaatggataagccagccaactgcaccaacgaactgtacatgatgatgagggactgttggcatgcagtgccctcccagagaccaacgttcaagcagttggtagaagacttggatcgaattctcactctcacaaccaatgaggaatacttggacctcagtcagcctctcgaaccgtattcaccttgttatcctgacccaagatgaaataaaacgtctctcttcccttctttcaggaatacttggacctcagccaacctctcgaacagtattcacctagttaccctgacacaagaagttcttgttcttcaggagatgattctgttttttctccagaccccatgccttacgaaccatgccttcctcagtatccacacataaacggcagtgttaaaacatgaatgactgtgtctgcctgtccccaaacaggacagcactgggaacctagctacactgagcagggagaccatgcctcccagagcttgttgtctccacttgtatatatggatcagaggagtaaataattggaaaagtaatcagcatatgtgtaaagatttatacagttgaaaacttgtaatcttccccaggaggagaagaaggtttctggagcagtggactgccacaagccaccatgtaacccctctcacctgccgtgcgtactggctgtggaccagtaggactcaaggtggacgtgcgttctgccttccttgttaattttgtaataattggagaagatttatgtcagcacacacttacagagcacaaatgcagtatataggtgctggatgtatgtaaatatattcaaattatgtataaatatatattatatatttacaaggagttattttttgtattgattttaaatggatgtcccaatgcacctagaaaattggtctctctttttttaatagctatttgctaaatgctgttcttacacataatttcttaattttcaccgagcagaggtggaaaaatacttttgctttcagggaaaatggtataacgttaatttattaataaattggtaatatacaaaacaattaatcatttatagttttttttgtaatttaagtggcatttctatgcaggcagcacagcagactagttaatctattgcttggacttaactagttatcagatcctttgaaaagagaatatttacaatatatgactaatttggggaaaatgaagttttgatttatttgtgtttaaatgctgctgtcagacgattgttcttagacctcctaaatgccccatattaaaagaactcattcataggaaggtgtttcattttggtgtgcaaccctgtcattacgtcaacgcaacgtctaactggacttcccaagataaatggtaccagcgtcctcttaaaagatgccttaatccattccttgaggacagaccttagttgaaatgatagcagaatgtgcttctctctggcagctggccttctgcttctgagttgcacattaatcagattagcctgtattctcttcagtgaattttgataatggcttccagactctttggcgttggagacgcctgttaggatcttcaagtcccatcatagaaaattgaaacacagagttgttctgctgatagttttggggatacgtccatctttttaagggattgctttcatctaattctggcaggacctcaccaaaagatccagcctcatacctacatcagacaaaatatcgccgttgttccttctgtactaaagtattgtgttttgctttggaaacacccactcactttgcaatagccgtgcaagatgaatgcagattacactgatcttatgtgttacaaaattggagaaagtatttaataaaacctgttaatttttatactgacaataaaaatgtttctacagatattaatgttaacaagacaaaataaatgtcacgcaacttatttttttaat

SEQ ID NO: 599 - protein, 798 aa, Homo sapiens
MGLTSTWRYGRGPGIGTVTMVSWGRFICLVVVTMATLSLARPSFSLVEDTTLEPEEPPTKYQISQPEVYVAAPGESLEVRCLLKDAAVISWTKDGVHLGPNNRTVLIGEYLQIKGATPRDSGACTASRTVDSETWYFMVNVTDAISSGDDEDDTDGAEDFVSENSNNKRAPYWTNTEKMEKRLHAVPAANTVKFRCPAGGNPMPTMRWLKNGKEFKQEHRIGGYKVRNQHWSLIMESVVPSDKGNYTCVVENEYGSINHTYHLDVVERSPHRPILQAGLPANASTVVGGDVEFVCKVYSDAQPHIQWIKHVEKNGSKYGPDGLPYLKVLKAAGVNTTDKEIEVLYIRNVTFEDAGEYTCLAGNSIGISFHSAWLTVLPAPGREKEITDDYLEIAIYCIGVFLIACMVVTVILCRMKNTTKKPDFSSQPAVHKLTKRIPLRRQVSAESSSSMNSNTPLVRITTRLSSTADTPMLAGVSEYELPEDPKWEFPRDKLTLGKPLGEGCFGQVVMAEAVGIDKDKPKEAVTVAVKMLKDDATEKDLSDLVSEMEMMKMIGKHKNIINLLGACTQDGPLYVIVEYASKGNLREYLRARRPPGMEYSYDINRVPEEQMTFKDLVSCTYQLRMEYLASQKCIHRDLAARNVLVTENNVMKIADFGLARDINNIDYYKKTTNGRLPVKWMAPEALFDRVYTHQSDVWSFGVLMWEIFTLGGSPYPGIPVEELFKLLKEGHRMDKPANCTNELYMMMRDCWHAVPSQRPTFKQLVEDLDRILTLTTNEEYLDLSQPLEPYSPCYPDPR

SEQ ID NO: 600 - DNA, 4697 bp, Homo sapiens
cgggcgggcggcgggtgcggagcgggcgagggagcgcgcgcggccgccacaaagctcgggcgccgcggggctgcatgcggcgtacctggcccggcgcggcgactgctctccgggctggcgggggccggccgcgagccccgggggccccgaggccgcagcttgcctgcgcgctctgagccttcgcaactcgcgagcaaagtttggtggaggcaacgccaagcctgagtcctttcttcctctcgttccccaaatccgagggcagcccgcgggcgtcatgcccgcgctcctccgcagcctggggtacgcgtgaagcccgggaggcttggcgccggcgaagacccaaggaccactcttctgcgtttggagttgctccccacaaccccgggctcgtcgctttctccatcccgacccacgcggggcgcggggacaacacaggtcgcggaggagcgttgccattcaagtgactgcagcagcagcggcagcgcctcggttcctgagcccaccgcaggctgaaggcattgcgcgtagtccatgcccgtagaggaagtgtgcagatgggattaacgtccacatggagatatggaagaggaccggggattggtaccgtaaccatggtcagctggggtcgtttcatctgcctggtcgtggtcaccatggcaaccttgtccctggcccggccctccttcagtttagttgaggataccacattagagccagaagagccaccaaccaaataccaaatctctcaaccagaagtgtacgtggctgcgccaggggagtcgctagaggtgcgctgcctgttgaaagatgccgccgtgatcagttggactaaggatggggtgcacttggggcccaacaataggacagtgcttattggggagtacttgcagataaagggcgccacgcctagagactccggcctctatgcttgtactgccagtaggactgtagacagtgaaacttggtacttcatggtgaatgtcacagatgccatctcatccggagatgatgaggatgacaccgatggtgcggaagattttgtcagtgagaacagtaacaacaagagagcaccatactggaccaacacagaaaagatggaaaagcggctccatgctgtgcctgcggccaacactgtcaagtttcgctgcccagccggggggaacccaatgccaaccatgcggtggctgaaaaacgggaaggagtttaagcaggagcatcgcattggaggctacaaggtacgaaaccagcactggagcctcattatggaaagtgtggtcccatctgacaagggaaattatacctgtgtggtggagaatgaatacgggtccatcaatcacacgtaccacctggatgttgtggagcgatcgcctcaccggcccatcctccaagccggactgccggcaaatgcctccacagtggtcggaggagacgtagagtttgtctgcaaggtttacagtgatgcccagccccacatccagtggatcaagcacgtggaaaagaacggcagtaaatacgggcccgacgggctgccctacctcaaggttctcaagttttctaggccgccggtgttaacaccacggacaaagagattgaggttctctatattcggaatgtaacttttgaggacgctggggaatatacgtgcttggcgggtaattctattgggatatcctttcactctgcatggttgacagttctgccagcgcctggaagagaaaaggagattacagcttccccagactacctggagatagccatttactgcataggggtcttcttaatcgcctgtatggtggtaacagtcatcctgtgccgaatgaagaacacgaccaagaagccagacttcagcagccagccggctgtgcacaagctgaccaaacgtatccccctgcggagacaggtttcggctgagtccagctcctccatgaactccaacaccccgctggtgaggataacaacacgcctctcttcaacggcagacacccccatgctggcaggggtctccgagtatgaacttccagaggacccaaaatgggagtttccaagagataagctgacactgggcaagcccctgggagaaggttgctttgggcaagtggtcatggcggaagcagtgggaattgacaaagacaagcccaaggaggcggtcaccgtggccgtgaagatgttgaaagatgatgccacagagaaagacctttctgatctggtgtcagagatggagatgatgaagatgattgggaaacacaagaatatcataaatcttcttggagcctgcacacaggatgggcctctctatgtcatagttgagtatgcctctaaaggcaacctccgagaatacctccgagcccggaggccacccgggatggagtactcctatgacattaaccgtgttcctgaggagcagatgaccttcaaggacttggtgtcatgcacctaccagctggccagaggcatggagtacttggcttcccaaaaatgtattcatcgagatttagcagccagaaatgttttggtaacagaaaacaatgtgatgaaaatagcagactttggactcgccagagatatcaacaatatagactattacaaaaagaccaccaatgggcggcttccagtcaagtggatggctccagaagccctgtttgatagagtatacactcatcagagtgatgtctggtccttcggggtgttaatgtgggagatcttcactttagggggctcgccctacccagggattcccgtggaggaactttttaagctgctgaaggaaggacacagaatggataagccagccaactgcaccaacgaactgtacatgatgatgagggactgttggcatgcagtgccctcccagagaccaacgttcaagcagttggtagaagacttggatcgaattctcactctcacaaccaatgaggaatacttggacctcagtcagcctctcgaaccgtattcaccttgttatcctgacccaagatgaaataaaacgtctctcttcccttctttcaggaatacttggacctcagccaacctctcgaacagtattcacctagttaccctgacacaagaagttcttgttcttcaggagatgattctgttttttctccagaccccatgccttacgaaccatgccttcctcagtatccacacataaacggcagtgttaaaacatgaatgactgtgtctgcctgtccccaaacaggacagcactgggaacctagctacactgagcagggagaccatgcctcccagagcttgttgtctccacttgtatatatggatcagaggagtaaataattggaaaagtaatcagcatatgtgtaaagatttatacagttgaaaacttgtaatcttccccaggaggagaagaaggtttctggagcagtggactgccacaagccaccatgtaacccctctcacctgccgtgcgtactggctgtggaccagtaggactcaaggtggacgtgcgttctgccttccttgttaattttgtaataattggagaagatttatgtcagcacacacttacagagcacaaatgcagtatataggtgctggatgtatgtaaatatattcaaattatgtataaatatatattatatatttacaaggagttattttttgtattgattttaaatggatgtcccaatgcacctagaaaattggtctctctttttttaatagctatttgctaaatgctgttcttacacataatttcttaattttcaccgagcagaggtggaaaaatacttttgctttcagggaaaatggtataacgttaatttattaataaattggtaatatacaaaacaattaatcatttatagttttttttgtaatttaagtggcatttctatgcaggcagcacagcagactagttaatctattgcttggacttaactagttatcagatcctttgaaaagagaatatttacaatatatgactaatttggggaaaatgaagttttgatttatttgtgtttaaatgctgctgtcagacgattgttcttagacctcctaaatgccccatattaaaagaactcattcataggaaggtgtttcattttggtgtgcaaccctgtcattacgtcaacgcaacgtctaactggacttcccaagataaatggtaccagcgtcctcttaaaagatgccttaatccattccttgaggacagaccttagttgaaatgatagcagaatgtgcttctctctggcagctggccttctgcttctgagttgcacattaatcagattagcctgtattctcttcagtgaattttgataatggcttccagactctttggcgttggagacgcctgttaggatcttcaagtcccatcatagaaaattgaaacacagagttgttctgctgatagttttggggatacgtccatctttttaagggattgctttcatctaattctggcaggacctcaccaaaagatccagcctcatacctacatcagacaaaatatcgccgttgttccttctgtactaaagtattgtgttttgctttggaaacacccactcactttgcaatagccgtgcaagatgaatgcagattacactgatcttatgtgttacaaaattggagaaagtatttaataaaacctgttaatttttatactgacaataaaaatgtttctacagatattaatgttaacaagacaaaataaatgtcacgcaacttatttttttaat

SEQ ID NO: 601 - protein, 393 aa, Homo sapiens; identical to SEQ ID NO: 583

SEQ ID NO: 602 - DNA, 3241 bp, Homo sapiens
cgggcgggcggcgggtgcggagcgggcgagggagcgcgcgcggccgccacaaagctcgggcgccgcggggctgcatgcggcgtacctggcccggcgcggcgactgctctccgggctggcgggggccggccgcgagccccgggggccccgaggccgcagcttgcctgcgcgctctgagccttcgcaactcgcgagcaaagtttggtggaggcaacgccaagcctgagtcctttcttcctctcgttccccaaatccgagggcagcccgcgggcgtcatgcccgcgctcctccgcagcctggggtacgcgtgaagcccgggaggcttggcgccggcgaagacccaaggaccactcttctgcgtttggagttgctccccacaaccccgggctcgtcgctttctccatcccgacccacgcggggcgcggggacaacacaggtcgcggaggagcgttgccattcaagtgactgcagcagcagcggcagcgcctcggttcctgagcccaccgcaggctgaaggcattgcgcgtagtccatgcccgtagaggaagtgtgcagatgggattaacgtccacatggagatatggaagaggaccggggattggtaccgtaaccatggtcagctggggtcgtttcatctgcctggtcgtggtcaccatggcaaccttgtccctggcccggccctccttcagtttagttgaggataccacattagagccagaagagccaccaaccaaataccaaatctctcaaccagaagtgtacgtggctgcgccaggggagtcgctagaggtgcgctgcctgttgaaagatgccgccgtgatcagttggactaaggatggggtgcacttggggcccaacaataggacagtgcttattggggagtacttgcagataaagggcgccacgcctagagactccggcctctatgcttgtactgccagtaggactgtagacagtgaaacttggtacttcatggtgaatgtcacagatgccatctcatccggagatgatgaggatgacaccgatggtgcggaagattttgtcagtgagaacagtaacaacaagagagcaccatactggaccaacacagaaaagatggaaaagcggctccatgctgtgcctgcggccaacactgtcaagtttcgctgcccagccggggggaacccaatgccaaccatgcggtggctgaaaaacgggaaggagtttaagcaggagcatcgcattggaggctacaaggtacgaaaccagcactggagcctcattatggaaagtgtggtcccatctgacaagggaaattatacctgtgtggtggagaatgaatacgggtccatcaatcacacgtaccacctggatgttgtggagcgatcgcctcaccggcccatcctccaagccggactgccggcaaatgcctccacagtggtcggaggagacgtagagtttgtctgcaaggtttacagtgatgcccagccccacatccagtggatcaagcacgtggaaaagaacggcagtaaatacgggcccgacgggctgccctacctcaaggttctcaagcactcggggataaatagttccaatgcagaagtgctggctctgttcaatgtgaccgaggcggatgctggggaatatatatgtaaggtctccaattatatagggcaggccaaccagtctgcctggctcactgtcctgccaaaacagcaagcgcctggaagagaaaaggagattacagcttccccagactacctggagatagccatttactgcataggggtcttcttaatcgcctgtatggtggtaacagtcatcctgtgccgaatgaagaacacgaccaagaagccagacttcagcagccagccggctgtgcacaagctgaccaaacgtatccccctgcggagacaggtaacagaaagtttcggctgagtccagctcctccatgaactccaacaccccgctggtgaggataacaacacgcctctcttcaacggcagacacccccatgctggcaggggtctccgagtatgaacttccagaggacccaaaatgggagtttccaagagataagctgacactgggcaagcccctgggagaaggttgctttgggcaagtggtcatggcggaagcagtgggaattgacaaagacaagcccaaggaggcggtcaccgtggccgtgaagatgttgaaagatgatgccacagagaaagacctttctgatctggtgtcagagatggagatgatgaagatgattgggaaacacaagaatatcataaatcttcttggagcctgcacacaggatgggcctctctatgtcatagttgagtatgcctctaaaggcaacctccgagaatacctccgagcccggaggccacccgggatggagtactcctatgacattaaccgtgttcctgaggagcagatgaccttcaaggacttggtgtcatgcacctaccagctggccagaggcatggagtacttggcttcccaaaaatgtattcatcgagatttagcagccagaaatgttttggtaacagaaaacaatgtgatgaaaatagcagactttggactcgccagagatatcaacaatatagactattacaaaaagaccaccaatgggcggcttccagtcaagtggatggctccagaagccctgtttgatagagtatacactcatcagagtgatgtctggtccttcggggtgttaatgtgggagatcttcactttagggggctcgccctacccagggattcccgtggaggaactttttaagctgctgaaggaaggacacagaatggataagccagccaactgcaccaacgaactgtacatgatgatgagggactgttggcatgcagtgccctcccagagaccaacgttcaagcagttggtagaagacttggatcgaattctcactctcacaaccaatgagatctgaaagtttatggcttcattgagaaactgggaaaagttggtcaggcgcagtggctcatgcctgtaatcccagcactttgggaggccgaggcaggcggatcatgaggtcaggagttccagaccagcctggccaacatggtgaaaccctgtctctactaaagatacaaaaaattagccgggcgtgttggtgtgcgcctgtaatcccagctactccgggaggctgaggcaggagagtcacttgaaccggggaggcggaggttgcagtgagccgagatcatgccattgcattccagccttggcgacagagcgagactccgtct

SEQ ID NO: 603 - protein, 449 aa, Homo sapiens; identical to SEQ ID NO: 567

SEQ ID NO: 604 - DNA, 4733 bp, Homo sapiens
tctctgatcctgtttccttatcagaaactgggaatagtactctgcagggtggttgggcagatgaaatagaatcacctatgtagtgtgaccctcccatagtagggcctccattaatattcagttttttcctctcatttctattgtttagaaggacagaaacatgcaatgtcctgcgaacatttccaagtggcttcctctcctccaaaagcttcagctgcctggcaaccctccccgcagtatcaagcaggcgcattttaaagtctctttagcgggagggcagggttagagccttcggtcacttgttttctaacttgacataaaacaacgtaacgcagtcactcagcgagccgttggccagcctcgctcgcccggggaggagggaggaggtggccgggcgggcggcgggtgcggagcgggcgagggagcgcgcgcggccgccacaaagctcgggcgccgcggggctgcatgcggcgtacctggcccggcgcggcgactgctctccgggctggcgggggccggccgcgagccccgggggccccgaggccgcagcttgcctgcgcgctctgagccttcgcaactcgcgagcaaagtttggtggaggcaacgccaagcctgagtcctttcttcctctcgttccccaaatccgagggcagcccgcgggcgtcatgcccgcgctcctccgcagcctggggtacgcgtgaagcccgggaggcttggcgccggcgaagacccaaggaccactcttctgcgtttggagttgctccccacaaccccgggctcgtcgctttctccatcccgacccacgcggggcgcggggacaacacaggtcgcggaggagcgttgccattcaagtgactgcagcagcagcggcagcgcctcggttcctgagcccaccgcaggctgaaggcattgcgcgtagtccatgcccgtagaggaagtgtgcagatgggattaacgtccacatggagatatggaagaggaccggggattggtaccgtaaccatggtcagctggggtcgtttcatctgcctggtcgtggtcaccatggcaaccttgtccctggcccggccctccttcagtttagttgaggataccacattagagccagaagatgccatctcatccggagatgatgaggatgacaccgatggtgcggaagattttgtcagtgagaacagtaacaacaagagagcaccatactggaccaacacagaaaagatggaaaagcggctccatgctgtgcctgcggccaacactgtcaagtttcgctgcccagccggggggaacccaatgccaaccatgcggtggctgaaaaacgggaaggagtttaagcaggagcatcgcattggaggctacaaggtacgaaaccagcactggagcctcattatggaaagtgtggtcccatctgacaagggaaattatacctgtgtggtggagaatgaatacgggtccatcaatcacacgtaccacctggatgttgtggagcgatcgcctcaccggcccatcctccaagccggactgccggcaaatgcctccacagtggtcggaggagacgtagagtttgtctgcaaggtttacagtgatgcccagccccacatccagtggatcaagcacgtggaaaagaacggcagtaaatacgggcccgacgggctgccctacctcaaggttctcaaggccgccggtgttaacaccacggacaaagagattgaggttctctatattcggaatgtaacttttgaggacgctggggaatatacgtgcttggcgggtaattctattgggatatcctttcactctgcatggttgacagttctgccagcgcctggaagagaaaaggagattacagcttccccagactacctggagatagccatttactgcataggggtcttcttaatcgcctgtatggtggtaacagtcatcctgtgccgaatgaagaacacgaccaagaagccagacttcagcagccagccggctgtgcacaagctgaccaaacgtatccccctgcggagacaggtaacagaaagtttcggctgagtccagctcctccatgaactccaacaccccgctggtgaggataacaacacgcctctcttcaacggcagacacccccatgctggcaggggtctccgagtatgaacttccagaggacccaaaatgggagtttccaagagataagctgacactgggcaagcccctgggagaaggttgctttgggcaagtggtcatggcggaagcagtgggaattgacaaagacaagcccaaggaggcggtcaccgtggccgtgaagatgttgaaagatgatgccacagagaaagacctttctgatctggtgtcagagatggagatgatgaagatgattgggaaacacaagaatatcataaatcttcttggagcctgcacacaggatgggcctctctatgtcatagttgagtatgcctctaaaggcaacctccgagaatacctccgagcccggaggccacccgggatggagtactcctatgacattaaccgtgttcctgaggagcagatgaccttcaaggacttggtgtcatgcacctaccagctggccagaggcatggagtacttggcttcccaaaaatgtattcatcgagatttagcagccagaaatgttttggtaacagaaaacaatgtgatgaaaatagcagactttggactcgccagagatatcaacaatatagactattacaaaaagaccaccaatgggcggcttccagtcaagtggatggctccagaagccctgtttgatagagtatacactcatcagagtgatgtctggtccttcggggtgttaatgtgggagatcttcactttagggggctcgccctacccagggattcccgtggaggaactttttaagctgctgaaggaaggacacagaatggataagccagccaactgcaccaacgaactgtacatgatgatgagggactgttggcatgcagtgccctcccagagaccaacgttcaagcagttggtagaagacttggatcgaattctcactctcacaaccaatgaggaatacttggacctcagccaacctctcgaacagtattcacctagttaccctgacacaagaagttcttgttcttcaggagatgattctgttttttctccagaccccatgccttacgaaccatgccttcctcagtatccacacataaacggcagtgttaaaacatgaatgactgtgtctgcctgtccccaaacaggacagcactgggaacctagctacactgagcagggagaccatgcctcccagagcttgttgtctccacttgtatatatggatcagaggagtaaataattggaaaagtaatcagcatatgtgtaaagatttatacagttgaaaacttgtaatcttccccaggaggagaagaaggtttctggagcagtggactgccacaagccaccatgtaacccctctcacctgccgtgcgtactggctgtggaccagtaggactcaaggtggacgtgcgttctgccttccttgttaattttgtaataattggagaagatttatgtcagcacacacttacagagcacaaatgcagtatataggtgctggatgtatgtaaatatattcaaattatgtataaatatatattatatatttacaaggagttattttttgtattgattttaaatggatgtcccaatgcacctagaaaattggtctctctttttttaatagctatttgctaaatgctgttcttacacataatttcttaattttcaccgagcagaggtggaaaaatacttttgctttcagggaaaatggtataacgttaatttattaataaattggtaatatacaaaacaattaatcatttatagttttttttgtaatttaagtggcatttctatgcaggcagcacagcagactagttaatctattgcttggacttaactagttatcagatcctttgaaaagagaatatttacaatatatgactaatttggggaaaatgaagttttgatttatttgtgtttaaatgctgctgtcagacgattgttcttagacctcctaaatgccccatattaaaagaactcattcataggaaggtgtttcattttggtgtgcaaccctgtcattacgtcaacgcaacgtctaactggacttcccaagataaatggtaccagcgtcctcttaaaagatgccttaatccattccttgaggacagaccttagttgaaatgatagcagaatgtgcttctctctggcagctggccttctgcttctgagttgcacattaatcagattagcctgtattctcttcagtgaattttgataatggcttccagactctttggcgttggagacgcctgttaggatcttcaagtcccatcatagaaaattgaaacacagagttgttctgctgatagttttggggatacgtccatctttttaagggattgctttcatctaattctggcaggacctcaccaaaagatccagcctcatacctacatcagacaaaatatcgccgttgttccttctgtactaaagtattgtgttttgctttggaaacacccactcactttgcaatagccgtgcaagatgaatgcagattacactgatcttatgtgttacaaaattggagaaagtatttaataaaacctgttaatttttatactgacaataaaaatgtttctacagatattaatgttaacaagacaaaataaatgtcacgcaacttatttttttaatac

SEQ ID NO: 605 - protein, 382 aa, Homo sapiens; identical to SEQ ID NO: 589

SEQ ID NO: 606 - DNA, 4208 bp, Homo sapiens
tctctgatcctgtttccttatcagaaactgggaatagtactctgcagggtggttgggcagatgaaatagaatcacctatgtagtgtgaccctcccatagtagggcctccattaatattcagttttttcctctcatttctattgtttagaaggacagaaacatgcaatgtcctgcgaacatttccaagtggcttcctctcctccaaaagcttcagctgcctggcaaccctccccgcagtatcaagcaggcgcattttaaagtctctttagcgggagggcagggttagagccttcggtcacttgttttctaacttgacataaaacaacgtaacgcagtcactcagcgagccgttggccagcctcgctcgcccggggaggagggaggaggtggccgggcgggcggcgggtgcggagcgggcgagggagcgcgcgcggccgccacaaagctcgggcgccgcggggctgcatgcggcgtacctggcccggcgcggcgactgctctccgggctggcgggggccggccgcgagccccgggggccccgaggccgcagcttgcctgcgcgctctgagccttcgcaactcgcgagcaaagtttggtggaggcaacgccaagcctgagtcctttcttcctctcgttccccaaatccgagggcagcccgcgggcgtcatgcccgcgctcctccgcagcctggggtacgcgtgaagcccgggaggcttggcgccggcgaagacccaaggaccactcttctgcgtttggagttgctccccacaaccccgggctcgtcgctttctccatcccgacccacgcggggcgcggggacaacacaggtcgcggaggagcgttgccattcaagtgactgcagcagcagcggcagcgcctcggttcctgagcccaccgcaggctgaaggcattgcgcgtagtccatgcccgtagaggaagtgtgcagatgggattaacgtccacatggagatatggaagaggaccggggattggtaccgtaaccatggtcagctggggtcgtttcatctgcctggtcgtggtcaccatggcaaccttgtccctggcccggccctccttcagtttagttgaggataccacattagagccagaagatgccatctcatccggagatgatgaggatgacaccgatggtgcggaagattttgtcagtgagaacagtaacaacaagagagcaccatactggaccaacacagaaaagatggaaaagcggctccatgctgtgcctgcggccaacactgtcaagtttcgctgcccagccggggggaacccaatgccaaccatgcggtggctgaaaaacgggaaggagtttaagcaggagcatcgcattggaggctacaaggtacgaaaccagcactggagcctcattatggaaagtgtggtcccatctgacaagggaaattatacctgtgtggtggagaatgaatacgggtccatcaatcacacgtaccacctggatgttgtggagcgatcgcctcaccggcccatcctccaagccggactgccggcaaatgcctccacagtggtcggaggagacgtagagtttgtctgcaaggtttacagtgatgcccagccccacatccagtggatcaagcacgtggaaaagaacggcagtaaatacgggcccgacgggctgccctacctcaaggttctcaagcactcggggataaatagttccaatgcagaagtgctggctctgttcaatgtgaccgaggcggatgctggggaatatatatgtaaggtctccaattatatagggcaggccaaccagtctgcctggctcactgtcctgccaaaacagcaagcgcctggaagagaaaaggagattacagcttccccagactacctggagatagccatttactgcataggggtcttcttaatcgcctgtatggtggtaacagtcatcctgtgccgaatgaagaacacgaccaagaagccagacttcagcagccagccggctgtgcacaagctgaccaaacgtatccccctgcggagacaggtttcggctgagtccagctcctccatgaactccaacaccccgctggtgaggataacaacacgcctctcttcaacggcagacacccccatgctggcaggggtctccgagtatgaacttccagaggacccaaaatgggagtttccaagagataagctgacactgggcaagcccctgggagaaggttgctttgggcaagtggtcatggcggaagcagtgggaattgacaaagacaagcccaaggaggcggtcaccgtggccgtgaagatgttgaaagatgatgccacagagaaagacctttctgatctggtgtcagagatggagatgatgaagatgattgggaaacacaagaatatcataaatcttcttggagcctgcacacaggatgggcctctctatgtcatagttgagtatgcctctaaaggcaacctccgagaatacctccgagcccggaggccacccgggatggagtactcctatgacattaaccgtgttcctgaggagcagatgaccttcaaggacttggtgtcatgcacctaccagctggccagaggcatggagtacttggcttcccaaaaatgtattcatcgagatttagcagccagaaatgttttggtaacagaaaacaatgtgatgaaaatagcagactttggactcgccagagatatcaacaatatagactattacaaaaagaccaccaatgggcggcttccagtcaagtggatggctccagaagccctgtttgatagagtatacactcatcagagtgatgtctggtccttcggggtgttaatgtgggagatcttcactttagggggctcgccctacccagggattcccgtggaggaactttttaagctgctgaaggaaggacacagaatggataagccagccaactgcaccaacgaactgtacatgatgatgagggactgttggcatgcagtgccctcccagagaccaacgttcaagcagttggtagaagacttggatcgaattctcactctcacaaccaatgaggaatacttggacctcagccaacctctcgaacagtattcacctagttaccctgacacaagaagttcttgttcttcaggagatgattctgttttttctccagaccccatgccttacgaaccatgccttcctcagtatccacacataaacggcagtgttaaaacatgaatgactgtgtctgcctgtccccaaacaggacagcactgggaacctagctacactgagcagggagaccatgcctcccagagcttgttgtctccacttgtatatatggatcagaggagtaaataattggaaaagtaatcagcatatgtgtaaagatttatacatggactgccacaagccaccatgtaacccctctcacctgccgtgcgtactggctgtggaccagtaggactcaaggtggacgtgcgttctgccttccttgttaattttgtaataattggagaagatttatgtcagcacacacttacagagcacaaatgcagtatataggtgctggatgtatgtaaatatattcaaattatgtataaatatatattatatatttacaaggagttattttttgtattgattttaaatggatgtcccaatgcacctagaaaattggtctctctttttttaatagctatttgctaaatgctgttcttacacataatttcttaattttcaccgagcagaggtggaaaaatacttttgctttcagggaaaatggtataacgttaatttattaataaattggtaatatacaaaacaattaatcatttatagttttttttgtaatttaagtggcatttctatgcaggcagcacagcagactagttaatctattgcttggacttaactagttatcagatcctttgaaaagagaatatttacaatatatgactaatttggggaaaatgaagttttgatttatttgtgtttaaatgctgctgtcagacgattgttcttagacctcctaaatgccccatattaaaagaactcattcataggaaggtgtttcattttggtgtgcaaccctgtcattacgtcaacgcaacgtctaactggacttcccaagataaatggtaccagcgtcctcttaaaagatgccttaatccattccttgaggacagaccttagttgaaatgatagcagaatgtgcttctctctggcagctggccttctgcttctga

SEQ ID NO: 607 - protein, 746 aa, Homo sapiens
MGLTSTWRYGRGPGIGTVTMVSWGRFICLVVVTMATLSLARPSFSLVEDTTLEPEDAISSGDDEDDTDGAEDFVSENSNNKRAPYWTNTEKMEKRLHAVPAANTVKFRCPAGGNPMPTMRWLKNGKEFKQEHRIGGYKVRNQHWSLIMESVVPSDKGNYTCVVENEYGSINHTYHLDVVERSPHRPILQAGLPANASTVVGGDVEFVCKVYSDAQPHIQWIKHVEKNGSKYGPDGLPYLKVLKHSGINSSNAEVLALFNVTEADAGEYICKVSNYIGQANQSAWLTVLPKQQAPGREKEITDDYLEIAIYCIGVFLIACMVVTVILCRMKNTTKKPDFSSQPAVHKLTKRIPLRRQVSAESSSSMNSNTPLVRITTRLSSTADTPMLAGVSEYELPEDPKWEFPRDKLTLGKPLGEGCFGQVVMAEAVGIDKDKPKEAVTVAVKMLKDDATEKDLSDLVSEMEMMKMIGKHKNIINLLGACTQDGPLYVIVEYASKGNLREYLRARRPPGMEYSYDINRVPEEQMTFKDLVSCTYQLRMEYLASQKCIHRDLAARNVLVTENNVMKIADFGLARDINNIDYYKKTTNGRLPVKWMAPEALFDRVYTHQSDVWSFGVLMWEIFTLGGSPYPGIPVEELFKLLKEGHRMDKPANCTNELYMMMRDCWHAVPSQRPTFKQLVEDLDRILTLTTNEEYLDLSQPLEQYSPSYPDTRSSCSSGDDSVFSPDPMPYEPCLPQYPHINGSVKT

SEQ ID NO: 608 - DNA, 4607 bp, Homo sapiens
cgggcgggcggcgggtgcggagcgggcgagggagcgcgcgcggccgccacaaagctcgggcgccgcggggctgcatgcggcgtacctggcccggcgcggcgactgctctccgggctggcgggggccggccgcgagccccgggggccccgaggccgcagcttgcctgcgcgctctgagccttcgcaactcgcgagcaaagtttggtggaggcaacgccaagcctgagtcctttcttcctctcgttccccaaatccgagggcagcccgcgggcgtcatgcccgcgctcctccgcagcctggggtacgcgtgaagcccgggaggcttggcgccggcgaagacccaaggaccactcttctgcgtttggagttgctccccacaaccccgggctcgtcgctttctccatcccgacccacgcggggcgcggggacaacacaggtcgcggaggagcgttgccattcaagtgactgcagcagcagcggcagcgcctcggttcctgagcccaccgcaggctgaaggcattgcgcgtagtccatgcccgtagaggaagtgtgcagatgggattaacgtccacatggagatatggaagaggaccggggattggtaccgtaaccatggtcagctggggtcgtttcatctgcctggtcgtggtcaccatggcaaccttgtccctggcccggccctccttcagtttagttgaggataccacattagagccagaagagccaccaaccaaataccaaatctctcaaccagaagtgtacgtggctgcgccaggggagtcgctagaggtgcgctgcctgttgaaagatgccgccgtgatcagttggactaaggatggggtgcacttggggcccaacaataggacagtgcttattggggagtacttgcagataaagggcgccacgcctagagactccggcctctatgcttgtactgccagtaggactgtagacagtgaaacttggtacttcatggtgaatgtcacagatgccatctcatccggagatgatgaggatgacaccgatggtgcggaagattttgtcagtgagaacagtaacaacaagagagcaccatactggaccaacacagaaaagatggaaaagcggctccatgctgtgcctgcggccaacactgtcaagtttcgctgcccagccggggggaacccaatgccaaccatgcggtggctgaaaaacgggaaggagtttaagcaggagcatcgcattggaggctacaaggtacgaaaccagcactggagcctcattatggaaagtgtggtcccatctgacaagggaaattatacctgtgtggtggagaatgaatacgggtccatcaatcacacgtaccacctggatgttgtggagcgatcgcctcaccggcccatcctccaagccggactgccggcaaatgcctccacagtggtcggaggagacgtagagtttgtctgcaaggtttacagtgatgcccagccccacatccagtggatcaagcacgtggaaaagaacggcagtaaatacgggcccgacgggctgccctacctcaaggttctcaagttttctaggccgccggtgttaacaccacggacaaagagattgaggttctctatattcggaatgtaacttttgaggacgctggggaatatacgtgcttggcgggtaattctattgggatatcctttcactctgcatggttgacagttctgccagcgcctggaagagaaaaggagattacagcttccccagactacctggagatagccatttactgcataggggtcttcttaatcgcctgtatggtggtaacagtcatcctgtgccgaatgaagaacacgaccaagaagccagacttcagcagccagccggctgtgcacaagctgaccaaacgtatccccctgcggagacaggtttcggctgagtccagctcctccatgaactccaacaccccgctggtgaggataacaacacgcctctcttcaacggcagacacccccatgctggcaggggtctccgagtatgaacttccagaggacccaaaatgggagtttccaagagataagctgacactgggcaagcccctgggagaaggttgctttgggcaagtggtcatggcggaagcagtgggaattgacaaagacaagcccaaggaggcggtcaccgtggccgtgaagatgttgaaagatgatgccacagagaaagacctttctgatctggtgtcagagatggagatgatgaagatgattgggaaacacaagaatatcataaatcttcttggagcctgcacacaggatgggcctctctatgtcatagttgagtatgcctctaaaggcaacctccgagaatacctccgagcccggaggccacccgggatggagtactcctatgacattaaccgtgttcctgaggagcagatgaccttcaaggacttggtgtcatgcacctaccagctggccagaggcatggagtacttggcttcccaaaaatgtattcatcgagatttagcagccagaaatgttttggtaacagaaaacaatgtgatgaaaatagcagactttggactcgccagagatatcaacaatatagactattacaaaaagaccaccaatgggcggcttccagtcaagtggatggctccagaagccctgtttgatagagtatacactcatcagagtgatgtctggtccttcggggtgttaatgtgggagatcttcactttagggggctcgccctacccagggattcccgtggaggaactttttaagctgctgaaggaaggacacagaatggataagccagccaactgcaccaacgaactgtacatgatgatgagggactgttggcatgcagtgccctcccagagaccaacgttcaagcagttggtagaagacttggatcgaattctcactctcacaaccaatgaggaatacttggacctcagccaacctctcgaacagtattcacctagttaccctgacacaagaagttcttgttcttcaggagatgattctgttttttctccagaccccatgccttacgaaccatgccttcctcagtatccacacataaacggcagtgttaaaacatgaatgactgtgtctgcctgtccccaaacaggacagcactgggaacctagctacactgagcagggagaccatgcctcccagagcttgttgtctccacttgtatatatggatcagaggagtaaataattggaaaagtaatcagcatatgtgtaaagatttatacagttgaaaacttgtaatcttccccaggaggagaagaaggtttctggagcagtggactgccacaagccaccatgtaacccctctcacctgccgtgcgtactggctgtggaccagtaggactcaaggtggacgtgcgttctgccttccttgttaattttgtaataattggagaagatttatgtcagcacacacttacagagcacaaatgcagtatataggtgctggatgtatgtaaatatattcaaattatgtataaatatatattatatatttacaaggagttattttttgtattgattttaaatggatgtcccaatgcacctagaaaattggtctctctttttttaatagctatttgctaaatgctgttcttacacataatttcttaattttcaccgagcagaggtggaaaaatacttttgctttcagggaaaatggtataacgttaatttattaataaattggtaatatacaaaacaattaatcatttatagttttttttgtaatttaagtggcatttctatgcaggcagcacagcagactagttaatctattgcttggacttaactagttatcagatcctttgaaaagagaatatttacaatatatgactaatttggggaaaatgaagttttgatttatttgtgtttaaatgctgctgtcagacgattgttcttagacctcctaaatgccccatattaaaagaactcattcataggaaggtgtttcattttggtgtgcaaccctgtcattacgtcaacgcaacgtctaactggacttcccaagataaatggtaccagcgtcctcttaaaagatgccttaatccattccttgaggacagaccttagttgaaatgatagcagaatgtgcttctctctggcagctggccttctgcttctgagttgcacattaatcagattagcctgtattctcttcagtgaattttgataatggcttccagactctttggcgttggagacgcctgttaggatcttcaagtcccatcatagaaaattgaaacacagagttgttctgctgatagttttggggatacgtccatctttttaagggattgctttcatctaattctggcaggacctcaccaaaagatccagcctcatacctacatcagacaaaatatcgccgttgttccttctgtactaaagtattgtgttttgctttggaaacacccactcactttgcaatagccgtgcaagatgaatgcagattacactgatcttatgtgttacaaaattggagaaagtatttaataaaacctgttaatttttatactgacaataaaaatgtttctacagatattaatgttaacaagacaaaataaatgtcacgcaacttatttttttaatac

SEQ ID NO: 609 - protein, 427 aa, Homo sapiens
MVVTVILCRMKNTTKKPDFSSQPAVHKLTKRIPLRRQVSAESSSSMNSNTPLVRITTRLSSTADTPMLAGVSEYELPEDPKWEFPRDKLTLGKPLGEGCFGQVVMAEAVGIDKDKPKEAVTVAVKMLKDDATEKDLSDLVSEMEMMKMIGKHKNIINLLGACTQDGPLYVIVEYASKGNLREYLRARRPPGMEYSYDINRVPEEQMTFKDLVSCTYQLRMEYLASQKCIHRDLAARNVLVTENNVMKIADFGLARDINNIDYYKKTTNGRLPVKWMAPEALFDRVYTHQSDVWSFGVLMWEIFTLGGSPYPGIPVEELFKLLKEGHRMDKPANCTNELYMMMRDCWHAVPSQRPTFKQLVEDLDRILTLTTNEEYLDLSQPLEQYSPSYPDTRSSCSSGDDSVFSPDPMPYEPCLPQYPHINGSVKT

SEQ ID NO: 610 - DNA, 4342 bp, Homo sapiens
cgggcgggcggcgggtgcggagcgggcgagggagcgcgcgcggccgccacaaagctcgggcgccgcggggctgcatgcggcgtacctggcccggcgcggcgactgctctccgggctggcgggggccggccgcgagccccgggggccccgaggccgcagcttgcctgcgcgctctgagccttcgcaactcgcgagcaaagtttggtggaggcaacgccaagcctgagtcctttcttcctctcgttccccaaatccgagggcagcccgcgggcgtcatgcccgcgctcctccgcagcctggggtacgcgtgaagcccgggaggcttggcgccggcgaagacccaaggaccactcttctgcgtttggagttgctccccacaaccccgggctcgtcgctttctccatcccgacccacgcggggcgcggggacaacacaggtcgcggaggagcgttgccattcaagtgactgcagcagcagcggcagcgcctcggttcctgagcccaccgcaggctgaaggcattgcgcgtagtccatgcccgtagaggaagtgtgcagatgggattaacgtccacatggagatatggaagaggaccggggattggtaccgtaaccatggtcagctggggtcgtttcatctgcctggtcgtggtcaccatggcaaccttgtccctggcccggccctccttcagtttagttgaggataccacattagagccagaagatgccatctcatccggagatgatgaggatgacaccgatggtgcggaagattttgtcagtgagaacagtaacaacaagagagcaccatactggaccaacacagaaaagatggaaaagcggctccatgctgtgcctgcggccaacactgtcaagtttcgctgcccagccggggggaacccaatgccaaccatgcggtggctgaaaaacgggaaggagtttaagcaggagcatcgcattggaggctacaaggtacgaaaccagcactggagcctcattatggaaagtgtggtcccatctgacaagggaaattatacctgtgtggtggagaatgaatacgggtccatcaatcacacgtaccacctggatgttgtggagcgatcgcctcaccggcccatcctccaagccggactgccggcaaatgcctccacagtggtcggaggagacgtagagtttgtctgcaaggtttacagtgatgcccagccccacatccagtggatcaagcacgtggaaaagaacggcagtaaatacgggcccgacgggctgccctacctcaaggttctcaaggccgccggtgttaacaccacggacaaagagattgaggttctctatattcggaatgtaacttttgaggacgctggggaatatacgtgcttggcgggtaattctattgggatatcctttcactctgcatggttgacagttctgccagcgcctggaagagaaaaggagattacagcttccccagactacctggagatagccatttactgcataggggtcttcttaatcgcctgtatggtggtaacagtcatcctgtgccgaatgaagaacacgaccaagaagccagacttcagcagccagccggctgtgcacaagctgaccaaacgtatccccctgcggagacaggtaacagaaagtttcggctgagtccagctcctccatgaactccaacaccccgctggtgaggataacaacacgcctctcttcaacggcagacacccccatgctggcaggggtctccgagtatgaacttccagaggacccaaaatgggagtttccaagagataagctgacactgggcaagcccctgggagaaggttgctttgggcaagtggtcatggcggaagcagtgggaattgacaaagacaagcccaaggaggcggtcaccgtggccgtgaagatgttgaaagatgatgccacagagaaagacctttctgatctggtgtcagagatggagatgatgaagatgattgggaaacacaagaatatcataaatcttcttggagcctgcacacaggatgggcctctctatgtcatagttgagtatgcctctaaaggcaacctccgagaatacctccgagcccggaggccacccgggatggagtactcctatgacattaaccgtgttcctgaggagcagatgaccttcaaggacttggtgtcatgcacctaccagctggccagaggcatggagtacttggcttcccaaaaatgtattcatcgagatttagcagccagaaatgttttggtaacagaaaacaatgtgatgaaaatagcagactttggactcgccagagatatcaacaatatagactattacaaaaagaccaccaatgggcggcttccagtcaagtggatggctccagaagccctgtttgatagagtatacactcatcagagtgatgtctggtccttcggggtgttaatgtgggagatcttcactttagggggctcgccctacccagggattcccgtggaggaactttttaagctgctgaaggaaggacacagaatggataagccagccaactgcaccaacgaactgtacatgatgatgagggactgttggcatgcagtgccctcccagagaccaacgttcaagcagttggtagaagacttggatcgaattctcactctcacaaccaatgaggaatacttggacctcagccaacctctcgaacagtattcacctagttaccctgacacaagaagttcttgttcttcaggagatgattctgttttttctccagaccccatgccttacgaaccatgccttcctcagtatccacacataaacggcagtgttaaaacatgaatgactgtgtctgcctgtccccaaacaggacagcactgggaacctagctacactgagcagggagaccatgcctcccagagcttgttgtctccacttgtatatatggatcagaggagtaaataattggaaaagtaatcagcatatgtgtaaagatttatacagttgaaaacttgtaatcttccccaggaggagaagaaggtttctggagcagtggactgccacaagccaccatgtaacccctctcacctgccgtgcgtactggctgtggaccagtaggactcaaggtggacgtgcgttctgccttccttgttaattttgtaataattggagaagatttatgtcagcacacacttacagagcacaaatgcagtatataggtgctggatgtatgtaaatatattcaaattatgtataaatatatattatatatttacaaggagttattttttgtattgattttaaatggatgtcccaatgcacctagaaaattggtctctctttttttaatagctatttgctaaatgctgttcttacacataatttcttaattttcaccgagcagaggtggaaaaatacttttgctttcagggaaaatggtataacgttaatttattaataaattggtaatatacaaaacaattaatcatttatagttttttttgtaatttaagtggcatttctatgcaggcagcacagcagactagttaatctattgcttggacttaactagttatcagatcctttgaaaagagaatatttacaatatatgactaatttggggaaaatgaagttttgatttatttgtgtttaaatgctgctgtcagacgattgttcttagacctcctaaatgccccatattaaaagaactcattcataggaaggtgtttcattttggtgtgcaaccctgtcattacgtcaacgcaacgtctaactggacttcccaagataaatggtaccagcgtcctcttaaaagatgccttaatccattccttgaggacagaccttagttgaaatgatagcagaatgtgcttctctctggcagctggccttctgcttctgagttgcacattaatcagattagcctgtattctcttcagtgaattttgataatggcttccagactctttggcgttggagacgcctgttaggatcttcaagtcccatcatagaaaattgaaacacagagttgttctgctgatagttttggggatacgtccatctttttaagggattgctttcatctaattctggcaggacctcaccaaaagatccagcctcatacctacatcagacaaaatatcgccgttgttccttctgtactaaagtattgtgttttgctttggaaacacccactcactttgcaatagccgtgcaagatgaatgcagattacactgatcttatgtgttacaaaattggagaaagtatttaataaaacctgttaatttttatactgacaataaaaatgtttctacagatattaatgttaacaagacaaaataaatgtcacgcaacttatttttttaatac

SEQ ID NO: 611 - protein, 382 aa, Homo sapiens; identical to SEQ ID NO: 589

SEQ ID NO: 612 - DNA, 4267 bp, Homo sapiens
cgggcgggcggcgggtgcggagcgggcgagggagcgcgcgcggccgccacaaagctcgggcgccgcggggctgcatgcggcgtacctggcccggcgcggcgactgctctccgggctggcgggggccggccgcgagccccgggggccccgaggccgcagcttgcctgcgcgctctgagccttcgcaactcgcgagcaaagtttggtggaggcaacgccaagcctgagtcctttcttcctctcgttccccaaatccgagggcagcccgcgggcgtcatgcccgcgctcctccgcagcctggggtacgcgtgaagcccgggaggcttggcgccggcgaagacccaaggaccactcttctgcgtttggagttgctccccacaaccccgggctcgtcgctttctccatcccgacccacgcggggcgcggggacaacacaggtcgcggaggagcgttgccattcaagtgactgcagcagcagcggcagcgcctcggttcctgagcccaccgcaggctgaaggcattgcgcgtagtccatgcccgtagaggaagtgtgcagatgggattaacgtccacatggagatatggaagaggaccggggattggtaccgtaaccatggtcagctggggtcgtttcatctgcctggtcgtggtcaccatggcaaccttgtccctggcccggccctccttcagtttagttgaggataccacattagagccagaaggagcaccatactggaccaacacagaaaagatggaaaagcggctccatgctgtgcctgcggccaacactgtcaagtttcgctgcccagccggggggaacccaatgccaaccatgcggtggctgaaaaacgggaaggagtttaagcaggagcatcgcattggaggctacaaggtacgaaaccagcactggagcctcattatggaaagtgtggtcccatctgacaagggaaattatacctgtgtggtggagaatgaatacgggtccatcaatcacacgtaccacctggatgttgtggagcgatcgcctcaccggcccatcctccaagccggactgccggcaaatgcctccacagtggtcggaggagacgtagagtttgtctgcaaggtttacagtgatgcccagccccacatccagtggatcaagcacgtggaaaagaacggcagtaaatacgggcccgacgggctgccctacctcaaggttctcaagcactcggggataaatagttccaatgcagaagtgctggctctgttcaatgtgaccgaggcggatgctggggaatatatatgtaaggtctccaattatatagggcaggccaaccagtctgcctggctcactgtcctgccaaaacagcaagcgcctggaagagaaaaggagattacagcttccccagactacctggagatagccatttactgcataggggtcttcttaatcgcctgtatggtggtaacagtcatcctgtgccgaatgaagaacacgaccaagaagccagacttcagcagccagccggctgtgcacaagctgaccaaacgtatccccctgcggagacaggtaacagaaagtttcggctgagtccagctcctccatgaactccaacaccccgctggtgaggataacaacacgcctctcttcaacggcagacacccccatgctggcaggggtctccgagtatgaacttccagaggacccaaaatgggagtttccaagagataagctgacactgggcaagcccctgggagaaggttgctttgggcaagtggtcatggcggaagcagtgggaattgacaaagacaagcccaaggaggcggtcaccgtggccgtgaagatgttgaaagatgatgccacagagaaagacctttctgatctggtgtcagagatggagatgatgaagatgattgggaaacacaagaatatcataaatcttcttggagcctgcacacaggatgggcctctctatgtcatagttgagtatgcctctaaaggcaacctccgagaatacctccgagcccggaggccacccgggatggagtactcctatgacattaaccgtgttcctgaggagcagatgaccttcaaggacttggtgtcatgcacctaccagctggccagaggcatggagtacttggcttcccaaaaatgtattcatcgagatttagcagccagaaatgttttggtaacagaaaacaatgtgatgaaaatagcagactttggactcgccagagatatcaacaatatagactattacaaaaagaccaccaatgggcggcttccagtcaagtggatggctccagaagccctgtttgatagagtatacactcatcagagtgatgtctggtccttcggggtgttaatgtgggagatcttcactttagggggctcgccctacccagggattcccgtggaggaactttttaagctgctgaaggaaggacacagaatggataagccagccaactgcaccaacgaactgtacatgatgatgagggactgttggcatgcagtgccctcccagagaccaacgttcaagcagttggtagaagacttggatcgaattctcactctcacaaccaatgaggaatacttggacctcagccaacctctcgaacagtattcacctagttaccctgacacaagaagttcttgttcttcaggagatgattctgttttttctccagaccccatgccttacgaaccatgccttcctcagtatccacacataaacggcagtgttaaaacatgaatgactgtgtctgcctgtccccaaacaggacagcactgggaacctagctacactgagcagggagaccatgcctcccagagcttgttgtctccacttgtatatatggatcagaggagtaaataattggaaaagtaatcagcatatgtgtaaagatttatacagttgaaaacttgtaatcttccccaggaggagaagaaggtttctggagcagtggactgccacaagccaccatgtaacccctctcacctgccgtgcgtactggctgtggaccagtaggactcaaggtggacgtgcgttctgccttccttgttaattttgtaataattggagaagatttatgtcagcacacacttacagagcacaaatgcagtatataggtgctggatgtatgtaaatatattcaaattatgtataaatatatattatatatttacaaggagttattttttgtattgattttaaatggatgtcccaatgcacctagaaaattggtctctctttttttaatagctatttgctaaatgctgttcttacacataatttcttaattttcaccgagcagaggtggaaaaatacttttgctttcagggaaaatggtataacgttaatttattaataaattggtaatatacaaaacaattaatcatttatagttttttttgtaatttaagtggcatttctatgcaggcagcacagcagactagttaatctattgcttggacttaactagttatcagatcctttgaaaagagaatatttacaatatatgactaatttggggaaaatgaagttttgatttatttgtgtttaaatgctgctgtcagacgattgttcttagacctcctaaatgccccatattaaaagaactcattcataggaaggtgtttcattttggtgtgcaaccctgtcattacgtcaacgcaacgtctaactggacttcccaagataaatggtaccagcgtcctcttaaaagatgccttaatccattccttgaggacagaccttagttgaaatgatagcagaatgtgcttctctctggcagctggccttctgcttctgagttgcacattaatcagattagcctgtattctcttcagtgaattttgataatggcttccagactctttggcgttggagacgcctgttaggatcttcaagtcccatcatagaaaattgaaacacagagttgttctgctgatagttttggggatacgtccatctttttaagggattgctttcatctaattctggcaggacctcaccaaaagatccagcctcatacctacatcagacaaaatatcgccgttgttccttctgtactaaagtattgtgttttgctttggaaacacccactcactttgcaatagccgtgcaagatgaatgcagattacactgatcttatgtgttacaaaattggagaaagtatttaataaaacctgttaatttttatactgacaataaaaatgtttctacagatattaatgttaacaagacaaaataaatgtcacgcaacttatttttttaatac

SEQ ID NO: 613 - protein, 382 aa, Homo sapiens; identical to SEQ ID NO: 589

SEQ ID NO: 614 - DNA, 4485 bp, Homo sapiens
tctctgatcctgtttccttatcagaaactgggaatagtactctgcagggtggttgggcagatgaaatagaatcacctatgtagtgtgaccctcccatagtagggcctccattaatattcagttttttcctctcatttctattgtttagaaggacagaaacatgcaatgtcctgcgaacatttccaagtggcttcctctcctccaaaagcttcagctgcctggcaaccctccccgcagtatcaagcaggcgcattttaaagtctctttagcgggagggcagggttagagccttcggtcacttgttttctaacttgacataaaacaacgtaacgcagtcactcagcgagccgttggccagcctcgctcgcccggggaggagggaggaggtggccgggcgggcggcgggtgcggagcgggcgagggagcgcgcgcggccgccacaaagctcgggcgccgcggggctgcatgcggcgtacctggcccggcgcggcgactgctctccgggctggcgggggccggccgcgagccccgggggccccgaggccgcagcttgcctgcgcgctctgagccttcgcaactcgcgagcaaagtttggtggaggcaacgccaagcctgagtcctttcttcctctcgttccccaaatccgagggcagcccgcgggcgtcatgcccgcgctcctccgcagcctggggtacgcgtgaagcccgggaggcttggcgccggcgaagacccaaggaccactcttctgcgtttggagttgctccccacaaccccgggctcgtcgctttctccatcccgacccacgcggggcgcggggacaacacaggtcgcggaggagcgttgccattcaagtgactgcagcagcagcggcagcgcctcggttcctgagcccaccgcaggctgaaggcattgcgcgtagtccatgcccgtagaggaagtgtgcagatgggattaacgtccacatggagatatggaagaggaccggggattggtaccgtaaccatggtcagctggggtcgtttcatctgcctggtcgtggtcaccatggcaaccttgtccctggcccggccctccttcagtttagttgaggataccacattagagccagaagagccaccaaccaaataccaaatctctcaaccagaagtgtacgtggctgcgccaggggagtcgctagaggtgcgctgcctgttgaaagatgccgccgtgatcagttggactaaggatggggtgcacttggggcccaacaataggacagtgcttattggggagtacttgcagataaagggcgccacgcctagagactccggcctctatgcttgtactgccagtaggactgtagacagtgaaacttggtacttcatggtgaatgtcacagatgccatctcatccggagatgatgaggatgacaccgatggtgcggaagattttgtcagtgagaacagtaacaacaagagagcaccatactggaccaacacagaaaagatggaaaagcggctccatgctgtgcctgcggccaacactgtcaagtttcgctgcccagccggggggaacccaatgccaaccatgcggtggctgaaaaacgggaaggagtttaagcaggagcatcgcattggaggctacaaggtacgaaaccagcactggagcctcattatggaaagtgtggtcccatctgacaagggaaattatacctgtgtggtggagaatgaatacgggtccatcaatcacacgtaccacctggatgttgtggagcgatcgcctcaccggcccatcctccaagccggactgccggcaaatgcctccacagtggtcggaggagacgtagagtttgtctgcaaggtttacagtgatgcccagccccacatccagtggatcaagcacgtggaaaagaacggcagtaaatacgggcccgacgggctgccctacctcaaggttctcaagcactcggggataaatagttccaatgcagaagtgctggctctgttcaatgtgaccgaggcggatgctggggaatatatatgtaaggtctccaattatatagggcaggccaaccagtctgcctggctcactgtcctgccaaaacagcaagcgcctggaagagaaaaggagattacagcttccccagactacctggagatagccatttactgcataggggtcttcttaatcgcctgtatggtggtaacagtcatcctgtgccgaatgaagaacacgaccaagaagccagacttcagcagccagccggctgtgcacaagctgaccaaacgtatccccctgcggagacaggtaacagaaagtttcggctgagtccagctcctccatgaactccaacaccccgctggtgaggataacaacacgcctctcttcaacggcagacacccccatgctggcaggggtctccgagtatgaacttccagaggacccaaaatgggagtttccaagagataagctgacactgggcaagcccctgggagaaggttgctttgggcaagtggtcatggcggaagcagtgggaattgacaaagacaagcccaaggaggcggtcaccgtggccgtgaagatgttgaaagatgatgccacagagaaagacctttctgatctggtgtcagagatggagatgatgaagatgattgggaaacacaagaatatcataaatcttcttggagcctgcacacaggatgggcctctctatgtcatagttgagtatgcctctaaaggcaacctccgagaatacctccgagcccggaggccacccgggatggagtactcctatgacattaaccgtgttcctgaggagcagatgaccttcaaggacttggtgtcatgcacctaccagctggccagaggcatggagtacttggcttcccaaaaatgtattcatcgagatttagcagccagaaatgttttggtaacagaaaacaatgtgatgaaaatagcagactttggactcgccagagatatcaacaatatagactattacaaaaagaccaccaatgggcggcttccagtcaagtggatggctccagaagccctgtttgatagagtatacactcatcagagtgatgtctggtccttcggggtgttaatgtgggagatcttcactttagggggctcgccctacccagggattcccgtggaggaactttttaagctgctgaaggaaggacacagaatggataagccagccaactgcaccaacgaactgtacatgatgatgagggactgttggcatgcagtgccctcccagagaccaacgttcaagcagttggtagaagacttggatcgaattctcactctcacaaccaatgaggaatacttggacctcagccaacctctcgaacagtattcacctagttaccctgacacaagaagttcttgttcttcaggagatgattctgttttttctccagaccccatgccttacgaaccatgccttcctcagtatccacacataaacggcagtgttaaaacatgaatgactgtgtctgcctgtccccaaacaggacagcactgggaacctagctacactgagcagggagaccatgcctcccagagcttgttgtctccacttgtatatatggatcagaggagtaaataattggaaaagtaatcagcatatgtgtaaagatttatacatggactgccacaagccaccatgtaacccctctcacctgccgtgcgtactggctgtggaccagtaggactcaaggtggacgtgcgttctgccttccttgttaattttgtaataattggagaagatttatgtcagcacacacttacagagcacaaatgcagtatataggtgctggatgtatgtaaatatattcaaattatgtataaatatatattatatatttacaaggagttattttttgtattgattttaaatggatgtcccaatgcacctagaaaattggtctctctttttttaatagctatttgctaaatgctgttcttacacataatttcttaattttcaccgagcagaggtggaaaaatacttttgctttcagggaaaatggtataacgttaatttattaataaattggtaatatacaaaacaattaatcatttatagttttttttgtaatttaagtggcatttctatgcaggcagcacagcagactagttaatctattgcttggacttaactagttatcagatcctttgaaaagagaatatttacaatatatgactaatttggggaaaatgaagttttgatttatttgtgtttaaatgctgctgtcagacgattgttcttagacctcctaaatgccccatattaaaagaactcattcataggaaggtgtttcattttggtgtgcaaccctgtcattacgtcaacgcaacgtctaactggacttcccaagataaatggtaccagcgtcctcttaaaagatgccttaatccattccttgaggacagaccttagttgaaatgatagcagaatgtgcttctctctggcagctggccttctgcttctga

SEQ ID NO: 615 - protein, 449 aa, Homo sapiens; identical to SEQ ID NO: 567

SEQ ID NO: 616 - DNA, 4257 bp, Homo sapiens
cgggcgggcggcgggtgcggagcgggcgagggagcgcgcgcggccgccacaaagctcgggcgccgcggggctgcatgcggcgtacctggcccggcgcggcgactgctctccgggctggcgggggccggccgcgagccccgggggccccgaggccgcagcttgcctgcgcgctctgagccttcgcaactcgcgagcaaagtttggtggaggcaacgccaagcctgagtcctttcttcctctcgttccccaaatccgagggcagcccgcgggcgtcatgcccgcgctcctccgcagcctggggtacgcgtgaagcccgggaggcttggcgccggcgaagacccaaggaccactcttctgcgtttggagttgctccccacaaccccgggctcgtcgctttctccatcccgacccacgcggggcgcggggacaacacaggtcgcggaggagcgttgccattcaagtgactgcagcagcagcggcagcgcctcggttcctgagcccaccgcaggctgaaggcattgcgcgtagtccatgcccgtagaggaagtgtgcagatgggattaacgtccacatggagatatggaagaggaccggggattggtaccgtaaccatggtcagctggggtcgtttcatctgcctggtcgtggtcaccatggcaaccttgtccctggcccggccctccttcagtttagttgaggataccacattagagccagaagagccaccaaccaaataccaaatctctcaaccagaagtgtacgtggctgcgccaggggagtcgctagaggtgcgctgcctgttgaaagatgccgccgtgatcagttggactaaggatggggtgcacttggggcccaacaataggacagtgcttattggggagtacttgcagataaagggcgccacgcctagagactccggcctctatgcttgtactgccagtaggactgtagacagtgaaacttggtacttcatggtgaatgtcacagatgccatctcatccggagatgatgaggatgacaccgatggtgcggaagattttgtcagtgagaacagtaacaacaagagagcaccatactggaccaacacagaaaagatggaaaagcggctccatgctgtgcctgcggccaacactgtcaagtttcgctgcccagccggggggaacccaatgccaaccatgcggtggctgaaaaacgggaaggagtttaagcaggagcatcgcattggaggctacaaggtacgaaaccagcactggagcctcattatggaaagtgtggtcccatctgacaagggaaattatacctgtgtggtggagaatgaatacgggtccatcaatcacacgtaccacctggatgttgtggagcgatcgcctcaccggcccatcctccaagccggactgccggcaaatgcctccacagtggtcggaggagacgtagagtttgtctgcaaggtttacagtgatgcccagccccacatccagtggatcaagcacgtggaaaagaacggcagtaaatacgggcccgacgggctgccctacctcaaggttctcaaggtttcggctgagtccagctcctccatgaactccaacaccccgctggtgaggataacaacacgcctctcttcaacggcagacacccccatgctggcaggggtctccgagtatgaacttccagaggacccaaaatgggagtttccaagagataagctgacactgggcaagcccctgggagaaggttgctttgggcaagtggtcatggcggaagcagtgggaattgacaaagacaagcccaaggaggcggtcaccgtggccgtgaagatgttgaaagatgatgccacagagaaagacctttctgatctggtgtcagagatggagatgatgaagatgattgggaaacacaagaatatcataaatcttcttggagcctgcacacaggatgggcctctctatgtcatagttgagtatgcctctaaaggcaacctccgagaatacctccgagcccggaggccacccgggatggagtactcctatgacattaaccgtgttcctgaggagcagatgaccttcaaggacttggtgtcatgcacctaccagctggccagaggcatggagtacttggcttcccaaaaatgtattcatcgagatttagcagccagaaatgttttggtaacagaaaacaatgtgatgaaaatagcagactttggactcgccagagatatcaacaatatagactattacaaaaagaccaccaatgggcggcttccagtcaagtggatggctccagaagccctgtttgatagagtatacactcatcagagtgatgtctggtccttcggggtgttaatgtgggagatcttcactttagggggctcgccctacccagggattcccgtggaggaactttttaagctgctgaaggaaggacacagaatggataagccagccaactgcaccaacgaactgtacatgatgatgagggactgttggcatgcagtgccctcccagagaccaacgttcaagcagttggtagaagacttggatcgaattctcactctcacaaccaatgaggaatacttggacctcagccaacctctcgaacagtattcacctagttaccctgacacaagaagttcttgttcttcaggagatgattctgttttttctccagaccccatgccttacgaaccatgccttcctcagtatccacacataaacggcagtgttaaaacatgaatgactgtgtctgcctgtccccaaacaggacagcactgggaacctagctacactgagcagggagaccatgcctcccagagcttgttgtctccacttgtatatatggatcagaggagtaaataattggaaaagtaatcagcatatgtgtaaagatttatacagttgaaaacttgtaatcttccccaggaggagaagaaggtttctggagcagtggactgccacaagccaccatgtaacccctctcacctgccgtgcgtactggctgtggaccagtaggactcaaggtggacgtgcgttctgccttccttgttaattttgtaataattggagaagatttatgtcagcacacacttacagagcacaaatgcagtatataggtgctggatgtatgtaaatatattcaaattatgtataaatatatattatatatttacaaggagttattttttgtattgattttaaatggatgtcccaatgcacctagaaaattggtctctctttttttaatagctatttgctaaatgctgttcttacacataatttcttaattttcaccgagcagaggtggaaaaatacttttgctttcagggaaaatggtataacgttaatttattaataaattggtaatatacaaaacaattaatcatttatagttttttttgtaatttaagtggcatttctatgcaggcagcacagcagactagttaatctattgcttggacttaactagttatcagatcctttgaaaagagaatatttacaatatatgactaatttggggaaaatgaagttttgatttatttgtgtttaaatgctgctgtcagacgattgttcttagacctcctaaatgccccatattaaaagaactcattcataggaaggtgtttcattttggtgtgcaaccctgtcattacgtcaacgcaacgtctaactggacttcccaagataaatggtaccagcgtcctcttaaaagatgccttaatccattccttgaggacagaccttagttgaaatgatagcagaatgtgcttctctctggcagctggccttctgcttctgagttgcacattaatcagattagcctgtattctcttcagtgaattttgataatggcttccagactctttggcgttggagacgcctgttaggatcttcaagtcccatcatagaaaattgaaacacagagttgttctgctgatagttttggggatacgtccatctttttaagggattgctttcatctaattctggcaggacctcaccaaaagatccagcctcatacctacatcagacaaaatatcgccgttgttccttctgtactaaagtattgtgttttgctttggaaacacccactcactttgcaatagccgtgcaagatgaatgcagattacactgatcttatgtgttacaaaattggagaaagtatttaataaaacctgttaatttttatactgacaataaaaatgtttctacagatattaatgttaacaagacaaaataaatgtcacgcaacttatttttttaatac

SEQ ID NO: 617 - protein, 720 aa, Homo sapiens; identical to SEQ ID NO: 595

SEQ ID NO: 618 - DNA, 1637 bp, Homo sapiens
tctctgatcctgtttccttatcagaaactgggaatagtactctgcagggtggttgggcagatgaaatagaatcacctatgtagtgtgaccctcccatagtagggcctccattaatattcagttttttcctctcatttctattgtttagaaggacagaaacatgcaatgtcctgcgaacatttccaagtggcttcctctcctccaaaagcttcagctgcctggcaaccctccccgcagtatcaagcaggcgcattttaaagtctctttagcgggagggcagggttagagccttcggtcacttgttttctaacttgacataaaacaacgtaacgcagtcactcagcgagccgttggccagcctcgctcgcccggggaggagggaggaggtggccgggcgggcggcgggtgcggagcgggcgagggagcgcgcgcggccgccacaaagctcgggcgccgcggggctgcatgcggcgtacctggcccggcgcggcgactgctctccgggctggcgggggccggccgcgagccccgggggccccgaggccgcagcttgcctgcgcgctctgagccttcgcaactcgcgagcaaagtttggtggaggcaacgccaagcctgagtcctttcttcctctcgttccccaaatccgagggcagcccgcgggcgtcatgcccgcgctcctccgcagcctggggtacgcgtgaagcccgggaggcttggcgccggcgaagacccaaggaccactcttctgcgtttggagttgctccccacaaccccgggctcgtcgctttctccatcccgacccacgcggggcgcggggacaacacaggtcgcggaggagcgttgccattcaagtgactgcagcagcagcggcagcgcctcggttcctgagcccaccgcaggctgaaggcattgcgcgtagtccatgcccgtagaggaagtgtgcagatgggattaacgtccacatggagatatggaagaggaccggggattggtaccgtaaccatggtcagctggggtcgtttcatctgcctggtcgtggtcaccatggcaaccttgtccctggcccggccctccttcagtttagttgaggataccacattagagccagaagagccaccaaccaaataccaaatctctcaaccagaagtgtacgtggctgcgccaggggagtcgctagaggtgcgctgcctgttgaaagatgccgccgtgatcagttggactaaggatggggtgcacttggggcccaacaataggacagtgcttattggggagtacttgcagataaagggcgccacgcctagagactccggcctctatgcttgtactgccagtaggactgtagacagtgaaacttggtacttcatggtgaatgtcacagatgccatctcatccggagatgatgaggatgacaccgatggtgcggaagattttgtcagtgagaacagtaacaacaagagtaagtaactgcccggctccgatggtccccgagagaggagcatggagggaagttctgcctgtcacctgtcttcttgtcgactcttctgcgccatgctgtgtcccgcggcccttgcctttccccgctgtgtctactttcctgactttcaaacctgagaataaaccagtgttgctgcacagcc

SEQ ID NO: 619 - protein, 170 aa, Homo sapiens
MGLTSTWRYGRGPGIGTVTMVSWGRFICLVVVTMATLSLARPSFSLVEDTTLEPEEPPTKYQISQPEVYVAAPGESLEVRCLLKDAAVISWTKDGVHLGPNNRTVLIGEYLQIKGATPRDSGACTASRTVDSETWYFMVNVTDAISSGDDEDDTDGAEDFVSENSNNKSK

SEQ ID NO: 620 - DNA, 3629 bp, Homo sapiens
tctctgatcctgtttccttatcagaaactgggaatagtactctgcagggtggttgggcagatgaaatagaatcacctatgtagtgtgaccctcccatagtagggcctccattaatattcagttttttcctctcatttctattgtttagaaggacagaaacatgcaatgtcctgcgaacatttccaagtggcttcctctcctccaaaagcttcagctgcctggcaaccctccccgcagtatcaagcaggcgcattttaaagtctctttagcgggagggcagggttagagccttcggtcacttgttttctaacttgacataaaacaacgtaacgcagtcactcagcgagccgttggccagcctcgctcgcccggggaggagggaggaggtggccgggcgggcggcgggtgcggagcgggcgagggagcgcgcgcggccgccacaaagctcgggcgccgcggggctgcatgcggcgtacctggcccggcgcggcgactgctctccgggctggcgggggccggccgcgagccccgggggccccgaggccgcagcttgcctgcgcgctctgagccttcgcaactcgcgagcaaagtttggtggaggcaacgccaagcctgagtcctttcttcctctcgttccccaaatccgagggcagcccgcgggcgtcatgcccgcgctcctccgcagcctggggtacgcgtgaagcccgggaggcttggcgccggcgaagacccaaggaccactcttctgcgtttggagttgctccccacaaccccgggctcgtcgctttctccatcccgacccacgcggggcgcggggacaacacaggtcgcggaggagcgttgccattcaagtgactgcagcagcagcggcagcgcctcggttcctgagcccaccgcaggctgaaggcattgcgcgtagtccatgcccgtagaggaagtgtgcagatgggattaacgtccacatggagatatggaagaggaccggggattggtaccgtaaccatggtcagctggggtcgtttcatctgcctggtcgtggtcaccatggcaaccttgtccctggcccggccctccttcagtttagttgaggataccacattagagccagaagagccaccaaccaaataccaaatctctcaaccagaagtgtacgtggctgcgccaggggagtcgctagaggtgcgctgcctgttgaaagatgccgccgtgatcagttggactaaggatggggtgcacttggggcccaacaataggacagtgcttattggggagtacttgcagataaagggcgccacgcctagagactccggcctctatgcttgtactgccagtaggactgtagacagtgaaacttggtacttcatggtgaatgtcacagatgccatctcatccggagatgatgaggatgacaccgatggtgcggaagattttgtcagtgagaacagtaacaacaagagagcaccatactggaccaacacagaaaagatggaaaagcggctccatgctgtgcctgcggccaacactgtcaagtttcgctgcccagccggggggaacccaatgccaaccatgcggtggctgaaaaacgggaaggagtttaagcaggagcatcgcattggaggctacaaggtacgaaaccagcactggagcctcattatggaaagtgtggtcccatctgacaagggaaattatacctgtgtggtggagaatgaatacgggtccatcaatcacacgtaccacctggatgttgtggagcgatcgcctcaccggcccatcctccaagccggactgccggcaaatgcctccacagtggtcggaggagacgtagagtttgtctgcaaggtttacagtgatgcccagccccacatccagtggatcaagcacgtggaaaagaacggcagtaaatacgggcccgacgggctgccctacctcaaggttctcaaggccgccggtgttaacaccacggacaaagagattgaggttctctatattcggaatgtaacttttgaggacgctggggaatatacgtgcttggcgggtaattctattgggatatcctttcactctgcatggttgacagttctgccagcgcctggaagagaaaaggagattacagcttccccagactacctggagatagccatttactgcataggggtcttcttaatcgcctgtatggtggtaacagtcatcctgtgccgaatgaagaacacgaccaagaagccagacttcagcagccagccggctgtgcacaagctgaccaaacgtatccccctgcggagacaggtaacagaaagtttcggctgagtccagctcctccatgaactccaacaccccgctggtgaggataacaacacgcctctcttcaacggcagacacccccatgctggcaggggtctccgagtatgaacttccagaggacccaaaatgggagtttccaagagataagctgacactgggcaagcccctgggagaaggttgctttgggcaagtggtcatggcggaagcagtgggaattgacaaagacaagcccaaggaggcggtcaccgtggccgtgaagatgttgaaagatgatgccacagagaaagacctttctgatctggtgtcagagatggagatgatgaagatgattgggaaacacaagaatatcataaatcttcttggagcctgcacacaggatgggcctctctatgtcatagttgagtatgcctctaaaggcaacctccgagaatacctccgagcccggaggccacccgggatggagtactcctatgacattaaccgtgttcctgaggagcagatgaccttcaaggacttggtgtcatgcacctaccagctggccagaggcatggagtacttggcttcccaaaaatgtattcatcgagatttagcagccagaaatgttttggtaacagaaaacaatgtgatgaaaatagcagactttggactcgccagagatatcaacaatatagactattacaaaaagaccaccaatgggcggcttccagtcaagtggatggctccagaagccctgtttgatagagtatacactcatcagagtgatgtctggtccttcggggtgttaatgtgggagatcttcactttagggggctcgccctacccagggattcccgtggaggaactttttaagctgctgaaggaaggacacagaatggataagccagccaactgcaccaacgaactgtacatgatgatgagggactgttggcatgcagtgccctcccagagaccaacgttcaagcagttggtagaagacttggatcgaattctcactctcacaaccaatgagatctgaaagtttatggcttcattgagaaactgggaaaagttggtcaggcgcagtggctcatgcctgtaatcccagcactttgggaggccgaggcaggcggatcatgaggtcaggagttccagaccagcctggccaacatggtgaaaccctgtctctactaaagatacaaaaaattagccgggcgtgttggtgtgcgcctgtaatcccagctactccgggaggctgaggcaggagagtcacttgaaccggggaggcggaggttgcagtgagccgagatcatgccattgcattccagccttggcgacagagcgagactccgtct

SEQ ID NO: 621 - protein, 448 aa, Homo sapiens; identical to SEQ ID NO: 565

SEQ ID NO: 622 - DNA, 4140 bp, Homo sapiens
tctctgatcctgtttccttatcagaaactgggaatagtactctgcagggtggttgggcagatgaaatagaatcacctatgtagtgtgaccctcccatagtagggcctccattaatattcagttttttcctctcatttctattgtttagaaggacagaaacatgcaatgtcctgcgaacatttccaagtggcttcctctcctccaaaagcttcagctgcctggcaaccctccccgcagtatcaagcaggcgcattttaaagtctctttagcgggagggcagggttagagccttcggtcacttgttttctaacttgacataaaacaacgtaacgcagtcactcagcgagccgttggccagcctcgctcgcccggggaggagggaggaggtggccgggcgggcggcgggtgcggagcgggcgagggagcgcgcgcggccgccacaaagctcgggcgccgcggggctgcatgcggcgtacctggcccggcgcggcgactgctctccgggctggcgggggccggccgcgagccccgggggccccgaggccgcagcttgcctgcgcgctctgagccttcgcaactcgcgagcaaagtttggtggaggcaacgccaagcctgagtcctttcttcctctcgttccccaaatccgagggcagcccgcgggcgtcatgcccgcgctcctccgcagcctggggtacgcgtgaagcccgggaggcttggcgccggcgaagacccaaggaccactcttctgcgtttggagttgctccccacaaccccgggctcgtcgctttctccatcccgacccacgcggggcgcggggacaacacaggtcgcggaggagcgttgccattcaagtgactgcagcagcagcggcagcgcctcggttcctgagcccaccgcaggctgaaggcattgcgcgtagtccatgcccgtagaggaagtgtgcagatgggattaacgtccacatggagatatggaagaggaccggggattggtaccgtaaccatggtcagctggggtcgtttcatctgcctggtcgtggtcaccatggcaaccttgtccctggcccggccctccttcagtttagttgaggataccacattagagccagaaggagcaccatactggaccaacacagaaaagatggaaaagcggctccatgctgtgcctgcggccaacactgtcaagtttcgctgcccagccggggggaacccaatgccaaccatgcggtggctgaaaaacgggaaggagtttaagcaggagcatcgcattggaggctacaaggtacgaaaccagcactggagcctcattatggaaagtgtggtcccatctgacaagggaaattatacctgtgtggtggagaatgaatacgggtccatcaatcacacgtaccacctggatgttgtggagcgatcgcctcaccggcccatcctccaagccggactgccggcaaatgcctccacagtggtcggaggagacgtagagtttgtctgcaaggtttacagtgatgcccagccccacatccagtggatcaagcacgtggaaaagaacggcagtaaatacgggcccgacgggctgccctacctcaaggttctcaagcactcggggataaatagttccaatgcagaagtgctggctctgttcaatgtgaccgaggcggatgctggggaatatatatgtaaggtctccaattatatagggcaggccaaccagtctgcctggctcactgtcctgccaaaacagcaagcgcctggaagagaaaaggagattacagcttccccagactacctggagatagccatttactgcataggggtcttcttaatcgcctgtatggtggtaacagtcatcctgtgccgaatgaagaacacgaccaagaagccagacttcagcagccagccggctgtgcacaagctgaccaaacgtatccccctgcggagacaggtaacagaaagtttcggctgagtccagctcctccatgaactccaacaccccgctggtgaggataacaacacgcctctcttcaacggcagacacccccatgctggcaggggtctccgagtatgaacttccagaggacccaaaatgggagtttccaagagataagctgacactgggcaagcccctgggagaaggttgctttgggcaagtggtcatggcggaagcagtgggaattgacaaagacaagcccaaggaggcggtcaccgtggccgtgaagatgttgaaagatgatgccacagagaaagacctttctgatctggtgtcagagatggagatgatgaagatgattgggaaacacaagaatatcataaatcttcttggagcctgcacacaggatgggcctctctatgtcatagttgagtatgcctctaaaggcaacctccgagaatacctccgagcccggaggccacccgggatggagtactcctatgacattaaccgtgttcctgaggagcagatgaccttcaaggacttggtgtcatgcacctaccagctggccagaggcatggagtacttggcttcccaaaaatgtattcatcgagatttagcagccagaaatgttttggtaacagaaaacaatgtgatgaaaatagcagactttggactcgccagagatatcaacaatatagactattacaaaaagaccaccaatgggcggcttccagtcaagtggatggctccagaagccctgtttgatagagtatacactcatcagagtgatgtctggtccttcggggtgttaatgtgggagatcttcactttagggggctcgccctacccagggattcccgtggaggaactttttaagctgctgaaggaaggacacagaatggataagccagccaactgcaccaacgaactgtacatgatgatgagggactgttggcatgcagtgccctcccagagaccaacgttcaagcagttggtagaagacttggatcgaattctcactctcacaaccaatgaggaatacttggacctcagccaacctctcgaacagtattcacctagttaccctgacacaagaagttcttgttcttcaggagatgattctgttttttctccagaccccatgccttacgaaccatgccttcctcagtatccacacataaacggcagtgttaaaacatgaatgactgtgtctgcctgtccccaaacaggacagcactgggaacctagctacactgagcagggagaccatgcctcccagagcttgttgtctccacttgtatatatggatcagaggagtaaataattggaaaagtaatcagcatatgtgtaaagatttatacatggactgccacaagccaccatgtaacccctctcacctgccgtgcgtactggctgtggaccagtaggactcaaggtggacgtgcgttctgccttccttgttaattttgtaataattggagaagatttatgtcagcacacacttacagagcacaaatgcagtatataggtgctggatgtatgtaaatatattcaaattatgtataaatatatattatatatttacaaggagttattttttgtattgattttaaatggatgtcccaatgcacctagaaaattggtctctctttttttaatagctatttgctaaatgctgttcttacacataatttcttaattttcaccgagcagaggtggaaaaatacttttgctttcagggaaaatggtataacgttaatttattaataaattggtaatatacaaaacaattaatcatttatagttttttttgtaatttaagtggcatttctatgcaggcagcacagcagactagttaatctattgcttggacttaactagttatcagatcctttgaaaagagaatatttacaatatatgactaatttggggaaaatgaagttttgatttatttgtgtttaaatgctgctgtcagacgattgttcttagacctcctaaatgccccatattaaaagaactcattcataggaaggtgtttcattttggtgtgcaaccctgtcattacgtcaacgcaacgtctaactggacttcccaagataaatggtaccagcgtcctcttaaaagatgccttaatccattccttgaggacagaccttagttgaaatgatagcagaatgtgcttctctctggcagctggccttctgcttctga

SEQ ID NO: 623 - protein, 382 aa, Homo sapiens; identical to SEQ ID NO: 589

SEQ ID NO: 624 - DNA, 4658 bp, Homo sapiens
tctctgatcctgtttccttatcagaaactgggaatagtactctgcagggtggttgggcagatgaaatagaatcacctatgtagtgtgaccctcccatagtagggcctccattaatattcagttttttcctctcatttctattgtttagaaggacagaaacatgcaatgtcctgcgaacatttccaagtggcttcctctcctccaaaagcttcagctgcctggcaaccctccccgcagtatcaagcaggcgcattttaaagtctctttagcgggagggcagggttagagccttcggtcacttgttttctaacttgacataaaacaacgtaacgcagtcactcagcgagccgttggccagcctcgctcgcccggggaggagggaggaggtggccgggcgggcggcgggtgcggagcgggcgagggagcgcgcgcggccgccacaaagctcgggcgccgcggggctgcatgcggcgtacctggcccggcgcggcgactgctctccgggctggcgggggccggccgcgagccccgggggccccgaggccgcagcttgcctgcgcgctctgagccttcgcaactcgcgagcaaagtttggtggaggcaacgccaagcctgagtcctttcttcctctcgttccccaaatccgagggcagcccgcgggcgtcatgcccgcgctcctccgcagcctggggtacgcgtgaagcccgggaggcttggcgccggcgaagacccaaggaccactcttctgcgtttggagttgctccccacaaccccgggctcgtcgctttctccatcccgacccacgcggggcgcggggacaacacaggtcgcggaggagcgttgccattcaagtgactgcagcagcagcggcagcgcctcggttcctgagcccaccgcaggctgaaggcattgcgcgtagtccatgcccgtagaggaagtgtgcagatgggattaacgtccacatggagatatggaagaggaccggggattggtaccgtaaccatggtcagctggggtcgtttcatctgcctggtcgtggtcaccatggcaaccttgtccctggcccggccctccttcagtttagttgaggataccacattagagccagaaggagcaccatactggaccaacacagaaaagatggaaaagcggctccatgctgtgcctgcggccaacactgtcaagtttcgctgcccagccggggggaacccaatgccaaccatgcggtggctgaaaaacgggaaggagtttaagcaggagcatcgcattggaggctacaaggtacgaaaccagcactggagcctcattatggaaagtgtggtcccatctgacaagggaaattatacctgtgtggtggagaatgaatacgggtccatcaatcacacgtaccacctggatgttgtggagcgatcgcctcaccggcccatcctccaagccggactgccggcaaatgcctccacagtggtcggaggagacgtagagtttgtctgcaaggtttacagtgatgcccagccccacatccagtggatcaagcacgtggaaaagaacggcagtaaatacgggcccgacgggctgccctacctcaaggttctcaagcactcggggataaatagttccaatgcagaagtgctggctctgttcaatgtgaccgaggcggatgctggggaatatatatgtaaggtctccaattatatagggcaggccaaccagtctgcctggctcactgtcctgccaaaacagcaagcgcctggaagagaaaaggagattacagcttccccagactacctggagatagccatttactgcataggggtcttcttaatcgcctgtatggtggtaacagtcatcctgtgccgaatgaagaacacgaccaagaagccagacttcagcagccagccggctgtgcacaagctgaccaaacgtatccccctgcggagacaggtaacagaaagtttcggctgagtccagctcctccatgaactccaacaccccgctggtgaggataacaacacgcctctcttcaacggcagacacccccatgctggcaggggtctccgagtatgaacttccagaggacccaaaatgggagtttccaagagataagctgacactgggcaagcccctgggagaaggttgctttgggcaagtggtcatggcggaagcagtgggaattgacaaagacaagcccaaggaggcggtcaccgtggccgtgaagatgttgaaagatgatgccacagagaaagacctttctgatctggtgtcagagatggagatgatgaagatgattgggaaacacaagaatatcataaatcttcttggagcctgcacacaggatgggcctctctatgtcatagttgagtatgcctctaaaggcaacctccgagaatacctccgagcccggaggccacccgggatggagtactcctatgacattaaccgtgttcctgaggagcagatgaccttcaaggacttggtgtcatgcacctaccagctggccagaggcatggagtacttggcttcccaaaaatgtattcatcgagatttagcagccagaaatgttttggtaacagaaaacaatgtgatgaaaatagcagactttggactcgccagagatatcaacaatatagactattacaaaaagaccaccaatgggcggcttccagtcaagtggatggctccagaagccctgtttgatagagtatacactcatcagagtgatgtctggtccttcggggtgttaatgtgggagatcttcactttagggggctcgccctacccagggattcccgtggaggaactttttaagctgctgaaggaaggacacagaatggataagccagccaactgcaccaacgaactgtacatgatgatgagggactgttggcatgcagtgccctcccagagaccaacgttcaagcagttggtagaagacttggatcgaattctcactctcacaaccaatgaggaatacttggacctcagccaacctctcgaacagtattcacctagttaccctgacacaagaagttcttgttcttcaggagatgattctgttttttctccagaccccatgccttacgaaccatgccttcctcagtatccacacataaacggcagtgttaaaacatgaatgactgtgtctgcctgtccccaaacaggacagcactgggaacctagctacactgagcagggagaccatgcctcccagagcttgttgtctccacttgtatatatggatcagaggagtaaataattggaaaagtaatcagcatatgtgtaaagatttatacagttgaaaacttgtaatcttccccaggaggagaagaaggtttctggagcagtggactgccacaagccaccatgtaacccctctcacctgccgtgcgtactggctgtggaccagtaggactcaaggtggacgtgcgttctgccttccttgttaattttgtaataattggagaagatttatgtcagcacacacttacagagcacaaatgcagtatataggtgctggatgtatgtaaatatattcaaattatgtataaatatatattatatatttacaaggagttattttttgtattgattttaaatggatgtcccaatgcacctagaaaattggtctctctttttttaatagctatttgctaaatgctgttcttacacataatttcttaattttcaccgagcagaggtggaaaaatacttttgctttcagggaaaatggtataacgttaatttattaataaattggtaatatacaaaacaattaatcatttatagttttttttgtaatttaagtggcatttctatgcaggcagcacagcagactagttaatctattgcttggacttaactagttatcagatcctttgaaaagagaatatttacaatatatgactaatttggggaaaatgaagttttgatttatttgtgtttaaatgctgctgtcagacgattgttcttagacctcctaaatgccccatattaaaagaactcattcataggaaggtgtttcattttggtgtgcaaccctgtcattacgtcaacgcaacgtctaactggacttcccaagataaatggtaccagcgtcctcttaaaagatgccttaatccattccttgaggacagaccttagttgaaatgatagcagaatgtgcttctctctggcagctggccttctgcttctgagttgcacattaatcagattagcctgtattctcttcagtgaattttgataatggcttccagactctttggcgttggagacgcctgttaggatcttcaagtcccatcatagaaaattgaaacacagagttgttctgctgatagttttggggatacgtccatctttttaagggattgctttcatctaattctggcaggacctcaccaaaagatccagcctcatacctacatcagacaaaatatcgccgttgttccttctgtactaaagtattgtgttttgctttggaaacacccactcactttgcaatagccgtgcaagatgaatgcagattacactgatcttatgtgttacaaaattggagaaagtatttaataaaacctgttaatttttatactgacaataaaaatgtttctacagatattaatgttaacaagacaaaataaatgtcacgcaacttatttttttaatac

SEQ ID NO: 625 - protein, 382 aa, Homo sapiens; identical to SEQ ID NO: 589

SEQ ID NO: 626 - DNA, 3632 bp, Homo sapiens
tctctgatcctgtttccttatcagaaactgggaatagtactctgcagggtggttgggcagatgaaatagaatcacctatgtagtgtgaccctcccatagtagggcctccattaatattcagttttttcctctcatttctattgtttagaaggacagaaacatgcaatgtcctgcgaacatttccaagtggcttcctctcctccaaaagcttcagctgcctggcaaccctccccgcagtatcaagcaggcgcattttaaagtctctttagcgggagggcagggttagagccttcggtcacttgttttctaacttgacataaaacaacgtaacgcagtcactcagcgagccgttggccagcctcgctcgcccggggaggagggaggaggtggccgggcgggcggcgggtgcggagcgggcgagggagcgcgcgcggccgccacaaagctcgggcgccgcggggctgcatgcggcgtacctggcccggcgcggcgactgctctccgggctggcgggggccggccgcgagccccgggggccccgaggccgcagcttgcctgcgcgctctgagccttcgcaactcgcgagcaaagtttggtggaggcaacgccaagcctgagtcctttcttcctctcgttccccaaatccgagggcagcccgcgggcgtcatgcccgcgctcctccgcagcctggggtacgcgtgaagcccgggaggcttggcgccggcgaagacccaaggaccactcttctgcgtttggagttgctccccacaaccccgggctcgtcgctttctccatcccgacccacgcggggcgcggggacaacacaggtcgcggaggagcgttgccattcaagtgactgcagcagcagcggcagcgcctcggttcctgagcccaccgcaggctgaaggcattgcgcgtagtccatgcccgtagaggaagtgtgcagatgggattaacgtccacatggagatatggaagaggaccggggattggtaccgtaaccatggtcagctggggtcgtttcatctgcctggtcgtggtcaccatggcaaccttgtccctggcccggccctccttcagtttagttgaggataccacattagagccagaagagccaccaaccaaataccaaatctctcaaccagaagtgtacgtggctgcgccaggggagtcgctagaggtgcgctgcctgttgaaagatgccgccgtgatcagttggactaaggatggggtgcacttggggcccaacaataggacagtgcttattggggagtacttgcagataaagggcgccacgcctagagactccggcctctatgcttgtactgccagtaggactgtagacagtgaaacttggtacttcatggtgaatgtcacagatgccatctcatccggagatgatgaggatgacaccgatggtgcggaagattttgtcagtgagaacagtaacaacaagagagcaccatactggaccaacacagaaaagatggaaaagcggctccatgctgtgcctgcggccaacactgtcaagtttcgctgcccagccggggggaacccaatgccaaccatgcggtggctgaaaaacgggaaggagtttaagcaggagcatcgcattggaggctacaaggtacgaaaccagcactggagcctcattatggaaagtgtggtcccatctgacaagggaaattatacctgtgtggtggagaatgaatacgggtccatcaatcacacgtaccacctggatgttgtggagcgatcgcctcaccggcccatcctccaagccggactgccggcaaatgcctccacagtggtcggaggagacgtagagtttgtctgcaaggtttacagtgatgcccagccccacatccagtggatcaagcacgtggaaaagaacggcagtaaatacgggcccgacgggctgccctacctcaaggttctcaagcactcggggataaatagttccaatgcagaagtgctggctctgttcaatgtgaccgaggcggatgctggggaatatatatgtaaggtctccaattatatagggcaggccaaccagtctgcctggctcactgtcctgccaaaacagcaagcgcctggaagagaaaaggagattacagcttccccagactacctggagatagccatttactgcataggggtcttcttaatcgcctgtatggtggtaacagtcatcctgtgccgaatgaagaacacgaccaagaagccagacttcagcagccagccggctgtgcacaagctgaccaaacgtatccccctgcggagacaggtaacagaaagtttcggctgagtccagctcctccatgaactccaacaccccgctggtgaggataacaacacgcctctcttcaacggcagacacccccatgctggcaggggtctccgagtatgaacttccagaggacccaaaatgggagtttccaagagataagctgacactgggcaagcccctgggagaaggttgctttgggcaagtggtcatggcggaagcagtgggaattgacaaagacaagcccaaggaggcggtcaccgtggccgtgaagatgttgaaagatgatgccacagagaaagacctttctgatctggtgtcagagatggagatgatgaagatgattgggaaacacaagaatatcataaatcttcttggagcctgcacacaggatgggcctctctatgtcatagttgagtatgcctctaaaggcaacctccgagaatacctccgagcccggaggccacccgggatggagtactcctatgacattaaccgtgttcctgaggagcagatgaccttcaaggacttggtgtcatgcacctaccagctggccagaggcatggagtacttggcttcccaaaaatgtattcatcgagatttagcagccagaaatgttttggtaacagaaaacaatgtgatgaaaatagcagactttggactcgccagagatatcaacaatatagactattacaaaaagaccaccaatgggcggcttccagtcaagtggatggctccagaagccctgtttgatagagtatacactcatcagagtgatgtctggtccttcggggtgttaatgtgggagatcttcactttagggggctcgccctacccagggattcccgtggaggaactttttaagctgctgaaggaaggacacagaatggataagccagccaactgcaccaacgaactgtacatgatgatgagggactgttggcatgcagtgccctcccagagaccaacgttcaagcagttggtagaagacttggatcgaattctcactctcacaaccaatgagatctgaaagtttatggcttcattgagaaactgggaaaagttggtcaggcgcagtggctcatgcctgtaatcccagcactttgggaggccgaggcaggcggatcatgaggtcaggagttccagaccagcctggccaacatggtgaaaccctgtctctactaaagatacaaaaaattagccgggcgtgttggtgtgcgcctgtaatcccagctactccgggaggctgaggcaggagagtcacttgaaccggggaggcggaggttgcagtgagccgagatcatgccattgcattccagccttggcgacagagcgagactccgtct

SEQ ID NO: 627 - protein, 449 aa, Homo sapiens; identical to SEQ ID NO: 567

SEQ ID NO: 628 - DNA, 4998 bp, Homo sapiens
tctctgatcctgtttccttatcagaaactgggaatagtactctgcagggtggttgggcagatgaaatagaatcacctatgtagtgtgaccctcccatagtagggcctccattaatattcagttttttcctctcatttctattgtttagaaggacagaaacatgcaatgtcctgcgaacatttccaagtggcttcctctcctccaaaagcttcagctgcctggcaaccctccccgcagtatcaagcaggcgcattttaaagtctctttagcgggagggcagggttagagccttcggtcacttgttttctaacttgacataaaacaacgtaacgcagtcactcagcgagccgttggccagcctcgctcgcccggggaggagggaggaggtggccgggcgggcggcgggtgcggagcgggcgagggagcgcgcgcggccgccacaaagctcgggcgccgcggggctgcatgcggcgtacctggcccggcgcggcgactgctctccgggctggcgggggccggccgcgagccccgggggccccgaggccgcagcttgcctgcgcgctctgagccttcgcaactcgcgagcaaagtttggtggaggcaacgccaagcctgagtcctttcttcctctcgttccccaaatccgagggcagcccgcgggcgtcatgcccgcgctcctccgcagcctggggtacgcgtgaagcccgggaggcttggcgccggcgaagacccaaggaccactcttctgcgtttggagttgctccccacaaccccgggctcgtcgctttctccatcccgacccacgcggggcgcggggacaacacaggtcgcggaggagcgttgccattcaagtgactgcagcagcagcggcagcgcctcggttcctgagcccaccgcaggctgaaggcattgcgcgtagtccatgcccgtagaggaagtgtgcagatgggattaacgtccacatggagatatggaagaggaccggggattggtaccgtaaccatggtcagctggggtcgtttcatctgcctggtcgtggtcaccatggcaaccttgtccctggcccggccctccttcagtttagttgaggataccacattagagccagaagagccaccaaccaaataccaaatctctcaaccagaagtgtacgtggctgcgccaggggagtcgctagaggtgcgctgcctgttgaaagatgccgccgtgatcagttggactaaggatggggtgcacttggggcccaacaataggacagtgcttattggggagtacttgcagataaagggcgccacgcctagagactccggcctctatgcttgtactgccagtaggactgtagacagtgaaacttggtacttcatggtgaatgtcacagatgccatctcatccggagatgatgaggatgacaccgatggtgcggaagattttgtcagtgagaacagtaacaacaagagagcaccatactggaccaacacagaaaagatggaaaagcggctccatgctgtgcctgcggccaacactgtcaagtttcgctgcccagccggggggaacccaatgccaaccatgcggtggctgaaaaacgggaaggagtttaagcaggagcatcgcattggaggctacaaggtacgaaaccagcactggagcctcattatggaaagtgtggtcccatctgacaagggaaattatacctgtgtggtggagaatgaatacgggtccatcaatcacacgtaccacctggatgttgtggagcgatcgcctcaccggcccatcctccaagccggactgccggcaaatgcctccacagtggtcggaggagacgtagagtttgtctgcaaggtttacagtgatgcccagccccacatccagtggatcaagcacgtggaaaagaacggcagtaaatacgggcccgacgggctgccctacctcaaggttctcaagttttctaggccgccggtgttaacaccacggacaaagagattgaggttctctatattcggaatgtaacttttgaggacgctggggaatatacgtgcttggcgggtaattctattgggatatcctttcactctgcatggttgacagttctgccagcgcctggaagagaaaaggagattacagcttccccagactacctggagatagccatttactgcataggggtcttcttaatcgcctgtatggtggtaacagtcatcctgtgccgaatgaagaacacgaccaagaagccagacttcagcagccagccggctgtgcacaagctgaccaaacgtatccccctgcggagacaggtttcggctgagtccagctcctccatgaactccaacaccccgctggtgaggataacaacacgcctctcttcaacggcagacacccccatgctggcaggggtctccgagtatgaacttccagaggacccaaaatgggagtttccaagagataagctgacactgggcaagcccctgggagaaggttgctttgggcaagtggtcatggcggaagcagtgggaattgacaaagacaagcccaaggaggcggtcaccgtggccgtgaagatgttgaaagatgatgccacagagaaagacctttctgatctggtgtcagagatggagatgatgaagatgattgggaaacacaagaatatcataaatcttcttggagcctgcacacaggatgggcctctctatgtcatagttgagtatgcctctaaaggcaacctccgagaatacctccgagcccggaggccacccgggatggagtactcctatgacattaaccgtgttcctgaggagcagatgaccttcaaggacttggtgtcatgcacctaccagctggccagaggcatggagtacttggcttcccaaaaatgtattcatcgagatttagcagccagaaatgttttggtaacagaaaacaatgtgatgaaaatagcagactttggactcgccagagatatcaacaatatagactattacaaaaagaccaccaatgggcggcttccagtcaagtggatggctccagaagccctgtttgatagagtatacactcatcagagtgatgtctggtccttcggggtgttaatgtgggagatcttcactttagggggctcgccctacccagggattcccgtggaggaactttttaagctgctgaaggaaggacacagaatggataagccagccaactgcaccaacgaactgtacatgatgatgagggactgttggcatgcagtgccctcccagagaccaacgttcaagcagttggtagaagacttggatcgaattctcactctcacaaccaatgaggaatacttggacctcagccaacctctcgaacagtattcacctagttaccctgacacaagaagttcttgttcttcaggagatgattctgttttttctccagaccccatgccttacgaaccatgccttcctcagtatccacacataaacggcagtgttaaaacatgaatgactgtgtctgcctgtccccaaacaggacagcactgggaacctagctacactgagcagggagaccatgcctcccagagcttgttgtctccacttgtatatatggatcagaggagtaaataattggaaaagtaatcagcatatgtgtaaagatttatacagttgaaaacttgtaatcttccccaggaggagaagaaggtttctggagcagtggactgccacaagccaccatgtaacccctctcacctgccgtgcgtactggctgtggaccagtaggactcaaggtggacgtgcgttctgccttccttgttaattttgtaataattggagaagatttatgtcagcacacacttacagagcacaaatgcagtatataggtgctggatgtatgtaaatatattcaaattatgtataaatatatattatatatttacaaggagttattttttgtattgattttaaatggatgtcccaatgcacctagaaaattggtctctctttttttaatagctatttgctaaatgctgttcttacacataatttcttaattttcaccgagcagaggtggaaaaatacttttgctttcagggaaaatggtataacgttaatttattaataaattggtaatatacaaaacaattaatcatttatagttttttttgtaatttaagtggcatttctatgcaggcagcacagcagactagttaatctattgcttggacttaactagttatcagatcctttgaaaagagaatatttacaatatatgactaatttggggaaaatgaagttttgatttatttgtgtttaaatgctgctgtcagacgattgttcttagacctcctaaatgccccatattaaaagaactcattcataggaaggtgtttcattttggtgtgcaaccctgtcattacgtcaacgcaacgtctaactggacttcccaagataaatggtaccagcgtcctcttaaaagatgccttaatccattccttgaggacagaccttagttgaaatgatagcagaatgtgcttctctctggcagctggccttctgcttctgagttgcacattaatcagattagcctgtattctcttcagtgaattttgataatggcttccagactctttggcgttggagacgcctgttaggatcttcaagtcccatcatagaaaattgaaacacagagttgttctgctgatagttttggggatacgtccatctttttaagggattgctttcatctaattctggcaggacctcaccaaaagatccagcctcatacctacatcagacaaaatatcgccgttgttccttctgtactaaagtattgtgttttgctttggaaacacccactcactttgcaatagccgtgcaagatgaatgcagattacactgatcttatgtgttacaaaattggagaaagtatttaataaaacctgttaatttttatactgacaataaaaatgtttctacagatattaatgttaacaagacaaaataaatgtcacgcaacttatttttttaatac

SEQ ID NO: 629 - protein, 427 aa, Homo sapiens; identical to SEQ ID NO: 609

SEQ ID NO: 630 - DNA, 4130 bp, Homo sapiens
tctctgatcctgtttccttatcagaaactgggaatagtactctgcagggtggttgggcagatgaaatagaatcacctatgtagtgtgaccctcccatagtagggcctccattaatattcagttttttcctctcatttctattgtttagaaggacagaaacatgcaatgtcctgcgaacatttccaagtggcttcctctcctccaaaagcttcagctgcctggcaaccctccccgcagtatcaagcaggcgcattttaaagtctctttagcgggagggcagggttagagccttcggtcacttgttttctaacttgacataaaacaacgtaacgcagtcactcagcgagccgttggccagcctcgctcgcccggggaggagggaggaggtggccgggcgggcggcgggtgcggagcgggcgagggagcgcgcgcggccgccacaaagctcgggcgccgcggggctgcatgcggcgtacctggcccggcgcggcgactgctctccgggctggcgggggccggccgcgagccccgggggccccgaggccgcagcttgcctgcgcgctctgagccttcgcaactcgcgagcaaagtttggtggaggcaacgccaagcctgagtcctttcttcctctcgttccccaaatccgagggcagcccgcgggcgtcatgcccgcgctcctccgcagcctggggtacgcgtgaagcccgggaggcttggcgccggcgaagacccaaggaccactcttctgcgtttggagttgctccccacaaccccgggctcgtcgctttctccatcccgacccacgcggggcgcggggacaacacaggtcgcggaggagcgttgccattcaagtgactgcagcagcagcggcagcgcctcggttcctgagcccaccgcaggctgaaggcattgcgcgtagtccatgcccgtagaggaagtgtgcagatgggattaacgtccacatggagatatggaagaggaccggggattggtaccgtaaccatggtcagctggggtcgtttcatctgcctggtcgtggtcaccatggcaaccttgtccctggcccggccctccttcagtttagttgaggataccacattagagccagaagagccaccaaccaaataccaaatctctcaaccagaagtgtacgtggctgcgccaggggagtcgctagaggtgcgctgcctgttgaaagatgccgccgtgatcagttggactaaggatggggtgcacttggggcccaacaataggacagtgcttattggggagtacttgcagataaagggcgccacgcctagagactccggcctctatgcttgtactgccagtaggactgtagacagtgaaacttggtacttcatggtgaatgtcacagatgccatctcatccggagatgatgaggatgacaccgatggtgcggaagattttgtcagtgagaacagtaacaacaagagagcaccatactggaccaacacagaaaagatggaaaagcggctccatgctgtgcctgcggccaacactgtcaagtttcgctgcccagccggggggaacccaatgccaaccatgcggtggctgaaaaacgggaaggagtttaagcaggagcatcgcattggaggctacaaggtacgaaaccagcactggagcctcattatggaaagtgtggtcccatctgacaagggaaattatacctgtgtggtggagaatgaatacgggtccatcaatcacacgtaccacctggatgttgtggagcgatcgcctcaccggcccatcctccaagccggactgccggcaaatgcctccacagtggtcggaggagacgtagagtttgtctgcaaggtttacagtgatgcccagccccacatccagtggatcaagcacgtggaaaagaacggcagtaaatacgggcccgacgggctgccctacctcaaggttctcaaggtttcggctgagtccagctcctccatgaactccaacaccccgctggtgaggataacaacacgcctctcttcaacggcagacacccccatgctggcaggggtctccgagtatgaacttccagaggacccaaaatgggagtttccaagagataagctgacactgggcaagcccctgggagaaggttgctttgggcaagtggtcatggcggaagcagtgggaattgacaaagacaagcccaaggaggcggtcaccgtggccgtgaagatgttgaaagatgatgccacagagaaagacctttctgatctggtgtcagagatggagatgatgaagatgattgggaaacacaagaatatcataaatcttcttggagcctgcacacaggatgggcctctctatgtcatagttgagtatgcctctaaaggcaacctccgagaatacctccgagcccggaggccacccgggatggagtactcctatgacattaaccgtgttcctgaggagcagatgaccttcaaggacttggtgtcatgcacctaccagctggccagaggcatggagtacttggcttcccaaaaatgtattcatcgagatttagcagccagaaatgttttggtaacagaaaacaatgtgatgaaaatagcagactttggactcgccagagatatcaacaatatagactattacaaaaagaccaccaatgggcggcttccagtcaagtggatggctccagaagccctgtttgatagagtatacactcatcagagtgatgtctggtccttcggggtgttaatgtgggagatcttcactttagggggctcgccctacccagggattcccgtggaggaactttttaagctgctgaaggaaggacacagaatggataagccagccaactgcaccaacgaactgtacatgatgatgagggactgttggcatgcagtgccctcccagagaccaacgttcaagcagttggtagaagacttggatcgaattctcactctcacaaccaatgaggaatacttggacctcagccaacctctcgaacagtattcacctagttaccctgacacaagaagttcttgttcttcaggagatgattctgttttttctccagaccccatgccttacgaaccatgccttcctcagtatccacacataaacggcagtgttaaaacatgaatgactgtgtctgcctgtccccaaacaggacagcactgggaacctagctacactgagcagggagaccatgcctcccagagcttgttgtctccacttgtatatatggatcagaggagtaaataattggaaaagtaatcagcatatgtgtaaagatttatacatggactgccacaagccaccatgtaacccctctcacctgccgtgcgtactggctgtggaccagtaggactcaaggtggacgtgcgttctgccttccttgttaattttgtaataattggagaagatttatgtcagcacacacttacagagcacaaatgcagtatataggtgctggatgtatgtaaatatattcaaattatgtataaatatatattatatatttacaaggagttattttttgtattgattttaaatggatgtcccaatgcacctagaaaattggtctctctttttttaatagctatttgctaaatgctgttcttacacataatttcttaattttcaccgagcagaggtggaaaaatacttttgctttcagggaaaatggtataacgttaatttattaataaattggtaatatacaaaacaattaatcatttatagttttttttgtaatttaagtggcatttctatgcaggcagcacagcagactagttaatctattgcttggacttaactagttatcagatcctttgaaaagagaatatttacaatatatgactaatttggggaaaatgaagttttgatttatttgtgtttaaatgctgctgtcagacgattgttcttagacctcctaaatgccccatattaaaagaactcattcataggaaggtgtttcattttggtgtgcaaccctgtcattacgtcaacgcaacgtctaactggacttcccaagataaatggtaccagcgtcctcttaaaagatgccttaatccattccttgaggacagaccttagttgaaatgatagcagaatgtgcttctctctggcagctggccttctgcttctga

SEQ ID NO: 631 - protein, 720 aa, Homo sapiens; identical to SEQ ID NO: 595

SEQ ID NO: 632 - DNA, 2402 bp, Homo sapiens
tctctgatcctgtttccttatcagaaactgggaatagtactctgcagggtggttgggcagatgaaatagaatcacctatgtagtgtgaccctcccatagtagggcctccattaatattcagttttttcctctcatttctattgtttagaaggacagaaacatgcaatgtcctgcgaacatttccaagtggcttcctctcctccaaaagcttcagctgcctggcaaccctccccgcagtatcaagcaggcgcattttaaagtctctttagcgggagggcagggttagagccttcggtcacttgttttctaacttgacataaaacaacgtaacgcagtcactcagcgagccgttggccagcctcgctcgcccggggaggagggaggaggtggccgggcgggcggcgggtgcggagcgggcgagggagcgcgcgcggccgccacaaagctcgggcgccgcggggctgcatgcggcgtacctggcccggcgcggcgactgctctccgggctggcgggggccggccgcgagccccgggggccccgaggccgcagcttgcctgcgcgctctgagccttcgcaactcgcgagcaaagtttggtggaggcaacgccaagcctgagtcctttcttcctctcgttccccaaatccgagggcagcccgcgggcgtcatgcccgcgctcctccgcagcctggggtacgcgtgaagcccgggaggcttggcgccggcgaagacccaaggaccactcttctgcgtttggagttgctccccacaaccccgggctcgtcgctttctccatcccgacccacgcggggcgcggggacaacacaggtcgcggaggagcgttgccattcaagtgactgcagcagcagcggcagcgcctcggttcctgagcccaccgcaggctgaaggcattgcgcgtagtccatgcccgtagaggaagtgtgcagatgggattaacgtccacatggagatatggaagaggaccggggattggtaccgtaaccatggtcagctggggtcgtttcatctgcctggtcgtggtcaccatggcaaccttgtccctggcccggccctccttcagtttagttgaggataccacattagagccagaagagccaccaaccaaataccaaatctctcaaccagaagtgtacgtggctgcgccaggggagtcgctagaggtgcgctgcctgttgaaagatgccgccgtgatcagttggactaaggatggggtgcacttggggcccaacaataggacagtgcttattggggagtacttgcagataaagggcgccacgcctagagactccggcctctatgcttgtactgccagtaggactgtagacagtgaaacttggtacttcatggtgaatgtcacagatgccatctcatccggagatgatgaggatgacaccgatggtgcggaagattttgtcagtgagaacagtaacaacaagagagcaccatactggaccaacacagaaaagatggaaaagcggctccatgctgtgcctgcggccaacactgtcaagtttcgctgcccagccggggggaacccaatgccaaccatgcggtggctgaaaaacgggaaggagtttaagcaggagcatcgcattggaggctacaaggtacgaaaccagcactggagcctcattatggaaagtgtggtcccatctgacaagggaaattatacctgtgtggtggagaatgaatacgggtccatcaatcacacgtaccacctggatgttgtgggcagccagggtttatgagctttgcatgatcctcatggttcccaagcgtcatctgtgtaaagtggacgtggtatgaaatgtctgacattttggaagctgagattactctgaaaatgttaattgggcaggtgaaaagggtacagatgtgctgtagcagacctttggttttaaaagagaagcatcatttccccaacagggcaactgtagaaggccagctgaagagtaaaggaaaaggtctgaggactgagcctgtggctggctggaaaaaggtgaatgttgagggcccttcacttccatcacaagaaagtcattagacggtaccaattcagtgtctgttcctggcatctatttcctctgtgcaaagggaaccatgtatatgagcttataaatacatttttgtcagagtgcacagataagtaggccattttaattaaacattgaagaccacctcgcctgttgtcttggaaattcaagtttcttcccaggttttgcctgtgatgatggggctttgttgtaactaatgaagaaaggaggtttctgtgtcttggaggattgctaacatatggaactctacccaagacatacttcattgttgcaggatggcaggttaagatcccttccatgtaggggccatcttttctctttcctgtcat

SEQ ID NO: 633 - protein, 271 aa, Homo sapiens; identical to SEQ ID NO: 581

SEQ ID NO: 634 - DNA, 4990 bp, Homo sapiens
tctctgatcctgtttccttatcagaaactgggaatagtactctgcagggtggttgggcagatgaaatagaatcacctatgtagtgtgaccctcccatagtagggcctccattaatattcagttttttcctctcatttctattgtttagaaggacagaaacatgcaatgtcctgcgaacatttccaagtggcttcctctcctccaaaagcttcagctgcctggcaaccctccccgcagtatcaagcaggcgcattttaaagtctctttagcgggagggcagggttagagccttcggtcacttgttttctaacttgacataaaacaacgtaacgcagtcactcagcgagccgttggccagcctcgctcgcccggggaggagggaggaggtggccgggcgggcggcgggtgcggagcgggcgagggagcgcgcgcggccgccacaaagctcgggcgccgcggggctgcatgcggcgtacctggcccggcgcggcgactgctctccgggctggcgggggccggccgcgagccccgggggccccgaggccgcagcttgcctgcgcgctctgagccttcgcaactcgcgagcaaagtttggtggaggcaacgccaagcctgagtcctttcttcctctcgttccccaaatccgagggcagcccgcgggcgtcatgcccgcgctcctccgcagcctggggtacgcgtgaagcccgggaggcttggcgccggcgaagacccaaggaccactcttctgcgtttggagttgctccccacaaccccgggctcgtcgctttctccatcccgacccacgcggggcgcggggacaacacaggtcgcggaggagcgttgccattcaagtgactgcagcagcagcggcagcgcctcggttcctgagcccaccgcaggctgaaggcattgcgcgtagtccatgcccgtagaggaagtgtgcagatgggattaacgtccacatggagatatggaagaggaccggggattggtaccgtaaccatggtcagctggggtcgtttcatctgcctggtcgtggtcaccatggcaaccttgtccctggcccggccctccttcagtttagttgaggataccacattagagccagaagagccaccaaccaaataccaaatctctcaaccagaagtgtacgtggctgcgccaggggagtcgctagaggtgcgctgcctgttgaaagatgccgccgtgatcagttggactaaggatggggtgcacttggggcccaacaataggacagtgcttattggggagtacttgcagataaagggcgccacgcctagagactccggcctctatgcttgtactgccagtaggactgtagacagtgaaacttggtacttcatggtgaatgtcacagatgccatctcatccggagatgatgaggatgacaccgatggtgcggaagattttgtcagtgagaacagtaacaacaagagagcaccatactggaccaacacagaaaagatggaaaagcggctccatgctgtgcctgcggccaacactgtcaagtttcgctgcccagccggggggaacccaatgccaaccatgcggtggctgaaaaacgggaaggagtttaagcaggagcatcgcattggaggctacaaggtacgaaaccagcactggagcctcattatggaaagtgtggtcccatctgacaagggaaattatacctgtgtggtggagaatgaatacgggtccatcaatcacacgtaccacctggatgttgtggagcgatcgcctcaccggcccatcctccaagccggactgccggcaaatgcctccacagtggtcggaggagacgtagagtttgtctgcaaggtttacagtgatgcccagccccacatccagtggatcaagcacgtggaaaagaacggcagtaaatacgggcccgacgggctgccctacctcaaggttctcaaggccgccggtgttaacaccacggacaaagagattgaggttctctatattcggaatgtaacttttgaggacgctggggaatatacgtgcttggcgggtaattctattgggatatcctttcactctgcatggttgacagttctgccagcgcctggaagagaaaaggagattacagcttccccagactacctggagatagccatttactgcataggggtcttcttaatcgcctgtatggtggtaacagtcatcctgtgccgaatgaagaacacgaccaagaagccagacttcagcagccagccggctgtgcacaagctgaccaaacgtatccccctgcggagacaggtttcggctgagtccagctcctccatgaactccaacaccccgctggtgaggataacaacacgcctctcttcaacggcagacacccccatgctggcaggggtctccgagtatgaacttccagaggacccaaaatgggagtttccaagagataagctgacactgggcaagcccctgggagaaggttgctttgggcaagtggtcatggcggaagcagtgggaattgacaaagacaagcccaaggaggcggtcaccgtggccgtgaagatgttgaaagatgatgccacagagaaagacctttctgatctggtgtcagagatggagatgatgaagatgattgggaaacacaagaatatcataaatcttcttggagcctgcacacaggatgggcctctctatgtcatagttgagtatgcctctaaaggcaacctccgagaatacctccgagcccggaggccacccgggatggagtactcctatgacattaaccgtgttcctgaggagcagatgaccttcaaggacttggtgtcatgcacctaccagctggccagaggcatggagtacttggcttcccaaaaatgtattcatcgagatttagcagccagaaatgttttggtaacagaaaacaatgtgatgaaaatagcagactttggactcgccagagatatcaacaatatagactattacaaaaagaccaccaatgggcggcttccagtcaagtggatggctccagaagccctgtttgatagagtatacactcatcagagtgatgtctggtccttcggggtgttaatgtgggagatcttcactttagggggctcgccctacccagggattcccgtggaggaactttttaagctgctgaaggaaggacacagaatggataagccagccaactgcaccaacgaactgtacatgatgatgagggactgttggcatgcagtgccctcccagagaccaacgttcaagcagttggtagaagacttggatcgaattctcactctcacaaccaatgaggaatacttggacctcagccaacctctcgaacagtattcacctagttaccctgacacaagaagttcttgttcttcaggagatgattctgttttttctccagaccccatgccttacgaaccatgccttcctcagtatccacacataaacggcagtgttaaaacatgaatgactgtgtctgcctgtccccaaacaggacagcactgggaacctagctacactgagcagggagaccatgcctcccagagcttgttgtctccacttgtatatatggatcagaggagtaaataattggaaaagtaatcagcatatgtgtaaagatttatacagttgaaaacttgtaatcttccccaggaggagaagaaggtttctggagcagtggactgccacaagccaccatgtaacccctctcacctgccgtgcgtactggctgtggaccagtaggactcaaggtggacgtgcgttctgccttccttgttaattttgtaataattggagaagatttatgtcagcacacacttacagagcacaaatgcagtatataggtgctggatgtatgtaaatatattcaaattatgtataaatatatattatatatttacaaggagttattttttgtattgattttaaatggatgtcccaatgcacctagaaaattggtctctctttttttaatagctatttgctaaatgctgttcttacacataatttcttaattttcaccgagcagaggtggaaaaatacttttgctttcagggaaaatggtataacgttaatttattaataaattggtaatatacaaaacaattaatcatttatagttttttttgtaatttaagtggcatttctatgcaggcagcacagcagactagttaatctattgcttggacttaactagttatcagatcctttgaaaagagaatatttacaatatatgactaatttggggaaaatgaagttttgatttatttgtgtttaaatgctgctgtcagacgattgttcttagacctcctaaatgccccatattaaaagaactcattcataggaaggtgtttcattttggtgtgcaaccctgtcattacgtcaacgcaacgtctaactggacttcccaagataaatggtaccagcgtcctcttaaaagatgccttaatccattccttgaggacagaccttagttgaaatgatagcagaatgtgcttctctctggcagctggccttctgcttctgagttgcacattaatcagattagcctgtattctcttcagtgaattttgataatggcttccagactctttggcgttggagacgcctgttaggatcttcaagtcccatcatagaaaattgaaacacagagttgttctgctgatagttttggggatacgtccatctttttaagggattgctttcatctaattctggcaggacctcaccaaaagatccagcctcatacctacatcagacaaaatatcgccgttgttccttctgtactaaagtattgtgttttgctttggaaacacccactcactttgcaatagccgtgcaagatgaatgcagattacactgatcttatgtgttacaaaattggagaaagtatttaataaaacctgttaatttttatactgacaataaaaatgtttctacagatattaatgttaacaagacaaaataaatgtcacgcaacttatttttttaatac

SEQ ID NO: 635 - protein, 832 aa, Homo sapiens; identical to SEQ ID NO: 591

SEQ ID NO: 636 - DNA, 241748 bp, Mus musculus
  misc_feature (1)...(241748): n = A,T,C or G
gaaatccaccctcatcaacagcttgttcctcaccaacctctacgaggatcggcaggtgccagatgccagtggtaaatctaccccgagtctccacaggcttcccatccccactgctgtcctggcttccctctgtgctgtccctggcctcttcctgtgttatcaggctgcattctttttctttctatctggggactttggtggcctctggttttctctgagatggtttcctcccctgaaaacacatgtgggaatggagccctgcttcagagccctacgcagccaattctctgtccccatagctcgcacggcacaaactctgaccattgagcgccggggtgtggagattgaggagggaggtatcaaggtgaagttgaccttggtggacacgcctggctttggggactctgtggactgctcagactggtgagaagggggaggggcaggagctaagcctttcttccattatggaaaaccagaggtcagttgtagggctggcttgtcacagccccttgacccaaaagggggcacctgtttctggtaacaatctagcccaaagtatccagtgtttcttgttttgagataaggtttttctatgtagctcagggacctcaaattcactgtgtagcccagactggcctgaaactcaaagtcctcctcctgagattacaggtatatatatgcatgcctggtttgttcgatgcttttgttgttgttgtggcttgtttttgtttttagccatggtgtcacattagccctagctggcctggaactcactatgtaggccatggtggcctcaaatgtgacaatcctcctgcctcagcttcctgagtgctgagattacaggtgtgcagccaccacattctgatgtctcatgtactgtggccagctgtccctgatggctttggttaggagcaaagaaatgacttgggactgcacagtcctggttagcttcatcttgtcccctggcctgtgatctcggactatctatctccttcccacacaccagctggctgcctgtggttcgcttcattgaggagcagtttgagcaatacctcagggatgagagtggcttgaacaggaagaacatccaggattccagagtccattgctgcctctacttcatctcaccctttggccgagggtctggagagcaccctgggggtggactggttggggaggctggagaaagctcagtacttgaagctgagtcctgaccaataaatccctgaaacaggctccggcccctagatgtggctttcctccgggcagtgcacgagaaagtcaatatcatcccggtcatcggtaaagcagacgccctgatgcctagggagactcaggccctcaagcagaaggtatggctgaggcccctaagtgacagccaaggccatgattcaaccttgtctgtctggactttttttttaatcttggggtgacctttttgggggtggggtgaggaaagggttatgatcctgccacaagcaccatggccctaagggctcaggctcagaacagaccggtcatacagccctggaactagatgcttgactaagaggaaagggggaggggcaccacaactcaactcctggggtctctttggttctgcgatagtgatggctgcctgtctcactgtcttcaaagtgctttcccacggacccacgtcctcgggtttttttttttttttgttttttttttgttttttgtttttttttttttttggttttttttttttttggtttttcgagacagggtttctctgtatagccctggctgtcctggacctcactttatagaccaggctggcctcgaactcaaaaatccggctgccgctgcctctgcctcccggagtgctgggattaaaggcgtgggccaccacgcccggccccctcgtattttgatatttgtcctatctgagtttctcaccatcatgtctctgaggtttggttttggtcatcttgtgtggccatttctcaccatttgtccttcatatcgttctttctctctgatcaccccattctatctaccccactgtttctagccatgtaatgtccgtttctccttctatctgctctgagatccgggaccagttgaaagaggaggagatcaacatctatcagttcccaaagtgtgactctgatgaggacgaagaattcaagaagcagaatgaagaaatgaaggtttgacaggtggaggtggacaggggcaaggaagcaggaagtggaggcgaaagctgagaaagaggattatgcccaggatgagccaacgtgactcctgactcccgttctataggaaaacatccctttcgcagtcgttgggtcttgtgaagtggtgagggatggaacccgaccagtgaggggaagacgctactcctggggtaccgtggagggtaaggccaggcatgctttgagagcagtagggagttcggtctgaattcatacgtgaagttggaggtgggctctagtcttgggagttcctagaggccacaagaggggtccttgggctgcaaatcctgggttcttctctagactagtgaagtactcccagagagcagagcctaagggtggcgttgaacgcaaagctatctggtccgccctctagtggagaacccacatcactgcgatttcctgaacctgaggcggatgttggtgcagacccaccttcaggacttgaaagaggtgacccacgatctgctctacgagggctaccgggctcgctgcctacagagtctggctcgacctggggcccgggatcgagccagccgcaggtgagagcagggctattttggtgcttccatggcgccgccgtttgggcaagccttcctgactggtcctgctacccttcttaactcggcttcccaaatccaactaagcctctcccacactgaccttaacctcagggacaaggccccgcctcctacactcagaattcgccccaaggctagacccacaatgtcagacgtcaacatgttttctgaacgcacacaacctttccctctactctcttagcaagctttcccggcaaagtgccacagagatcccgctgcccatgttgcctctggctgacactgaaaagttgattcgcgagaaggacgaagaggtgagcaagcacttctctttccctctaattaatgccctagaacgttttctagatcccattttggccttgccgggttccactgcctgcaatcttgctccgcacagctgcgccgcatgcaagaaatgctggagaagatgcaagcccagatgcagcagagccaggctcagggcgagcaatcagatgtgctgtgatattccccaataccgcctgtcctcgcctctgctcaccgctaatcggctatcccatccccgcgctggacagcccagcgcccaatccggggatccagagggtaggcctgcccttgcacttaaaccagatccctccaatccggaagtttaaggcccatccgacttcgtcttccgcgcggctctaagaggaccgcactccaagaaaagcctccccaccactcctcctccccccccccccaccgctcttcccgcgttccaattgggttttcctattcctccaagttctccatctaataaaaactgcttcccgccttcccccagctgccggagtcttcttcccagcaggaatggagctgcccgctgggggcctcctggccactagtcattccactgttagccactcctgtctgtctgggccgttgtttcagcctcccacctgagtttgcgcatgaacacactgaaattgccaccaataagaaacaaagaccagttgagttttattgagggccagggtgagagatggagcggctacaagcctatctaggtcttctgagaccttgggtcccctattcctggtccttagcatcaccatgtgtgatgacgtagcagatgttcttgtagtccacgttgccgcccacgtctggggggaaggctgcccacatgttcttgatctgtaggaagacaggagtagctctaggaccggttcccccactgcttccctctctcccacttccctccactcggagtcctcttccttcccgggctctccccaactcacctcctcctgggaaaatcggtcgcactgcgtggtaagcagctcctccaagctgagaaggacattcggggaggtgagattggattcatgagtacggtcccctctcatttcattcctgttcccaccaaccgttcctgaaacatgtctggcgcatctcccaagtactgtctagaatttcttcccttagttattataaaaatgtcacccagtccttactgctcatgcattctgtcaacctgtcacccctaagcagggatttttggaaaagacagtagagccactagagggagccactcacaactgctttttgatggtgcccttcccttctgggtccaggaccttgaaggctccagtgatcacatcctccgggtccgcacctgcagggacagaggacacgagtctagcgcgtccccaaaggtctggaaagagcaaccagggtcttgggtggagaaccttttactcacccttaagcttttccccaaacatggtcaggaagacagtgaagttgatgggcccactggcttccttcatcatagcgtcgagttcctcattcttcacattgagacggcctgaatggggtgagcgttaggggttggagttgggtgttggggaccagaggtgtgcttctcataagcttatattagctcattcatttttttcatctgggcagattaaggcctgaagccactggattcccctccaactccatagctttcaacatttatagataggagtaggggcctcacccatggctgcaaaggtgtcccgaagatcctctttgtcgataatgccatccctgttctgatcaattacagtgaacgcctgtggaggggtaggggtgaggacagatgaaaccaggaattggcccaaggcagatcagattctggccctgagccagctgtccccctccaccctttgaagggaggggaaggattctcctcctccctcaacaggtgcactttctgggaaggagggnnnnnnnnnnnnnnnnnnnnnnnnnnnnnnnnnnnnnnnnnnnnnnnnnnnnnnnnnnnnnnnnnnnnnnnnnnnnnnnnnnnnnnnnnnnnnnnnnnnnnnnnnnnnnnnnnnnnnnnnnnnnnnnnnnnnnnnnnnnnnnnnnnnnnnnnnnnnnnnnnnnnnnnnnnnnnnnnnnnnnnnnnnnnnnnnnnnnnnnnnnnnnnnnnnnnnnnnnnnnnnnnnnnnnnnnnnnnnnnnnnnnnnnnttggagctcccttccgctcctgcccttctcttggccttcttgggtgcctgtgagggtaaaggttgaacaggggagttacaggccagttcctgtacctctctcctgggagcagcaaaccagacttttgtttctgttaaggacagggtctcatggagccctcagacttgctacttaacagaggatgaccttggcctgctcaccgtgcctccgtctctaaccttgaccgtgcgagttccagggttagcgtcacgagcagcacatcctattttatttggttgcttgtgcatgctaggcaggctacatcctcaaccccaaccctgtccctccccacccccaccctgagacgtggtctcatgatttagccctggggcctattctatagacccagtcttcctttccttgaacccaggagatctgcctgcttcttcctgctgagaataaagatattcatcaccacacccagattctcctcctcttttctttttgtttttcttttttagactggtctcactgcataactcaggctggccttgaactcctggactcctggattcctacctcttcaggctttaaagcagttgaaattacaggcatacccattatgcctgatcagattcagattcggagttctttgagtccatttttatagaataactcttctttttcttggcacctcttggctaaggggcctcattttggctgtgtgtcttaattcccaactatagctcccagatcacttcatcctgactgacaagtgcccttctcagaatcctctgcctgccaacttggcgtccatacttgctagcttaatctactcactggccctatctgaacctctagttcccacttacaaaatgcaagcaggatcatctcattcgtctgaggactttaggaaatgatagaaaggggtggaacagactttgaacaggtctacccctacccctagacatcatggttagatatctgagcatattatccttgactgaacctttcagcccatcactctcctctggccccattctggtgctaagagagagggttcatattttgcctgtagttggaatgagaagcagcaccctttttttttttttgaagggtagggctatcctgagctaatgctaggttgggaggaatcttcactcaccatgtcttagatctcctgggggcaaggcagtagctccagatggaaaaaggaagagaatctgcttggagcagttcttctggggttatatagtcctgccccggcagcccttaacataccgtggtaaccttagccctgtggatacccaccccagatactaaaatagcccagctcaggggcctctcctttcttggaggcctgcagcagctggagcccaggaagggagggggaggaggccttgggatgcaagtctcgttaggacctaggtaggaagggatgttctttctcccaaagggggactgcagtgtgccaggattcagaggggctcagggaagcccacagttctggaagagatgaactagacttttgagcccctgagtggggtgggcacagatctaaactcagtaagcattttgtgccaatagacagtatgcttggttttgtgggttcactttagcaagcaagcaggcaagtaagcaaatgacaacagcaaaactcagcaggaagctaaggaagtgagtgaggtgaggaccagtgagcagaccgcagggcacatgggcaaaggccagcacagtgaaagtcagctgttaggattgccagaatcaggatggggcttgatgttaaggttggtgaccaaatgctgtggggtttgcaacaacaagcagagacatcatcggtgcacttgaaaagaaaggattgaagcaagagaggtttaggcttttttttttttttttttttggtttttttgagacagggtttctctatatagtcctggctgtcctggaactcactctgtacaccaggctggccttgaactcagaaatccacctgcctctgcctcccaagtgctgggattaaaggcgtgcgccaccacgccctgcaaggtttaggcttcttgctggacctcagagaaaacacagaggccccagccatcctctcccaggtagcataaccagtatcttttcctttctgggaaaatgctagcttggctgatgttgtgactttcataatgttctgggcctcagtggcccatactgatccatgcagtgggaatctagggaaaccgcagtataggaaccccaggctggcaatggtacgcatctcctcctgctccctttaggacctgatgtcctgaggaatgtgttccctcccttgccctcctccagtccatgccaatgccactaagacattttcttttctgggcactggggcccagccacctgttgtctctaagaagagagaaggagccaccctaaacttagcagctgcccttggccttcgcacagcccctcccggctttagttggcagctgttttgccttatatgggtaccacatatgggtaccacggagggggctacgtcatgcaggagcccactcattagtgcattctgggaggtgagaaagactccaaaaagggaatgggatttgtggacttctcagtaaacttgaatcaaaggggaagatggagaagttatgaaaagaagatctgacaggtcctcaccgggtccgggtcagagctggaagcgggaaagtaagctgacaagactaaggagcttcaaaagacagaaagggatagggacattgagagctaggtctcactaggattttgagagtggccttatggatttggtagtccactcatcctggggctcaagagaatgagaacagaggaagcagtgtttagaagtgggaaggttcctggttcagcggtggcctttagtctcagaactcaggagacagaggcaggcggatctctgagtttgaggccagcatggtcttcagagtgagttccaggacagacgtgcagggccacacagagacactgtcttgaaaataaataaataaataaataaataaaaaacaaaacaaaaaaagaagaatctggaaggttagaactcataacgtcaggtcttgtagttagtagctaatgagtactaagagaagtggataacaatacggcttggttcttgaatccttcaaagaggagggttcatggtattgaggattcatggatttgggttctgagatgggacctccacccacaagccgggagagtgaagtagtgctcagaggatatgggtttcagaaattgcagtgtttgcggcggcggggtggaggtggggggggggggagaagctgagtttgtacatgagaacttagagaaacctggtctgagttcctgcctgaaatagggaattgagagatgagtctttcagaggactgactatagtctaactagacacatcgaggtagagagtactgatgagggcactgggtttgtggtgcagctcaggagttgaatgaacaggggctcttttggaaacccaagaaggccagcgcggcactcttattggctaggagccgcaccgatgctccaggctcttctcagtgatgtccccagttgtcacctcctctcgcgcttgtctctggttgtcactgactattcttgctctggcaccgcctgctggcagcatccctggccctagaagcagagaatgttatctatttctactcttatgcaaagtggagaaggacagtcattggctaacaagttaatcacaagttaagcccgcctctccctggttgtcattccttcctgatcatctcaggaagtctaagaatttttcggctctttctattgactgctgatgctgtcatcacaggaatagacgtgaccgtcagtcaatttgactgcctagcccccctttttaatttggttcccttttcaccatttccattggctaacaagttcctagtccctgcctcttactgcccaacaccagcctcattccccgcccttctgcggtcactcactctcttcagttgtgtttattggcctggatgctcaggatctctcttttctattgcttgttttcttcgtcctgcctctgccttcttcacttcctctttctcgagtacccaccctcttcccgcctctaaccccacccacccttccatcgattggcaggaactcagttttctctctcctattatccgtcctggtcttatagagggggcgggagattaaaaaaaaaaaaaaaaaaaaaaaaaaggaggggtgcgggagggcctttcctcgcgcaggtgtagttcgccgggacagggnnnnnnnnnnnnnnnnnnnnnnnnnnnnnnnnnnnnnnnnnnnnnnnnnnnnnnnnnnnnnnnnnnnnnnnnnnnnnnnnnnnnnnnnnnnnnnnnnnnnnnnnnnnnnnnnnnnnnnnnnnnnnnnnnnnnnnnnnnnnnnnnnnnnnnnnnnnnnnnnnnnnnnnnnnnnnnnnnnnnnnnnnnnnnnnnnnnnnnnnnnnnnnnnnnnnnnnnnnnnnnnnggggcggcgccttctgcggcctccccggcggggggatgtgaggggccgcccgcagctatggagacgggtccggcgccccttgtggccccgccgcgccgccacggcgcccccgctgccccttcgcccccgccccggggctcccgggccggatcgcacttagtggtggaaccgggaccgccagtgactacagccacttcggccccagtcgaattggtggcccccggggaggctcggcccgcctgcgtcccaggatcatcacagacctcggcctctacacccacgacagctacgagcagcacggtagtgatgctgaccctggaggcctcacccgaagccgcgaagacgcaagagttccccgcaccagcggcagaaacaggagccgagacgtcggtggctttggctttggggacagacactcaaaagacggaagaggttcgagcctctcctgtcccaggaccagggacccccactcggacaccttccagaatggcgcctggagccctgactgccaaacccccgcttgcccccaagccggggaccacagtggcttcaggagtgactgcacggggtggagtaggacaggtggcaggtgggcatgaagctgcgacctcagcatcagcagggtcggtgcctgaggacccctcagggcctgtcacaggccctcccgggacatgcgaggctccggctccgactccggtggctgtggtgacagtgaccccagctccggagcctgttgaaaactttcaagacctgggctccacgtccagtctaggacctggcatctcggggcctcggggtcaggccccagacaccctgagctacttggactccgtgagcctcatgtcagggaccttggagtccttgccggatgatgtgagctccatgggttcagactcggagataaatgggatggccctgcgcaagacggacaagtatggtttccttgggggcagccagtactcaggcagcctgtgagtacacagtgggcaccccgtgggggctgcctggggacgcgtagggggaggggaggggcggggaggggatgcacctggccagccctggcccagggagtcattagcaggagctgcagtgcccagagcatcctggggtttctatgacttcagagctgaggaccagggatcaaggcagtcgtctcgatttaagcctagaccttgcctaggcccgtgtccttgagctagtggtgtccctgtttctatgcctcagtttcctctatgaagagagggattgaatgagctgatacctactaagcagctaagatgccagctgcttggtatgaaactattaactaaaaaggccagacattctggaaagttggttgggcgaggattctggcagaaatcttagatctctgagggcaagagggatgccttcagagtagcagtgggtgtgggggggtatctgtaggcagaatagtggggtgagaaagtctgcttgatggaggagagaccctgaaggcagggcttttgtgagagggcagttttgtattttcattgaagggaaagggtgggggaggcctcttccccatttcctcatctcccctgccctagttgagctttcctagttccttccagggaggggcctgagtcactcctaaggtgggggtgagtgtgattagcctgacttcttccttctctctctggagcctggccattgcttctgtgctccctaacctgcttgctggtctgtacctggttagctcagcctggagcatcgcctgaggacactgcagcccggctctgaactgagcactcactcaatccactaactgaaggcactcatcaggagggaatgcccaaacagtctcagtgtaattggctgggtttagcttagagatgagaggcttctgtgagcgcctgggtgtgagaatcctcctgaggatctgaaccagggggtggggtgggagaggaatacaggcagggcttgtaagctaacaaaattcaaaacttgattggggccaggcagtgatggcccatgcctttaatcccaccactcgggaggcagaggcaggaggatttctgagtttgaggccagcctggtctacagagtgagttccgggacagccagggctacacagagaaatcctgtcttgaaaaaccaaaccaaaacaaaaaacctgattgggcaccgacattcagtctgaactctaacttaagtttgaccctggacctttctccacatcttttacctcataagaaacaaaactagagttgcttccctcatataacatttatctatgtgactaggggacattcccccatactagtctgtccagaggaacttggttacaattcggttttagaatatcactcctgtgtcaggcactctgctgggtgctatttttctgctttataactttaacacttaagaatctatcttcctgagcctgggcagtggtggcccatgcctttaatcccagcacttgggaggcagaggcagggggatttctgagtttgaggccagcctggtctacaaagtgagttccaggccagccagggctacacagagaaaccctgtctcgaaaaacaaaacaaaacaaaacaaaatttaaaaaagaatctatcttccataccagaggaattacctctgaggcacttctttctcctacagggtcaagtccgaactcttttgcccacacattggctccacactgcccagctgtgcttgttgctttggtctcagcagcagtctgagactgtattgcattagtagggttatttgggcctgtccacctgccaggagtgctctgccccttctttcctctgtctctcgtcattccttgtggtgcacttctgatatctttttttccaggaagccttccctgatacttactgtccttgtagtaatgtccctgatactcactgtccttgtagtaatggctctgtgtgaatgttttgcctttgcatctcttcccatagctggcatcctccctttctgtctgtatttttattttatgtgcatgggtgttttgcctgcactcatgtctatgcgctgtgtgcatatagtgctcggggaagcaagaagagagctccagaccctctggacctggaattacagaccattgttagctgccacacgggtgctgggaactgagccctggtcctctacaagagcatccagtgtttttatagctgagccatctctcttgcccttcccttcctttgtaagctgtaatgttccttgagacaggaaaagtaccttaatcttttcagccctgagagtatagaactgacattaatgtaataagagacgatgtctctgtttaaggagttgctagcacagaataaattaacatcatgttgcgtgcttattaaatagtcttttcgtgtattttcttactagtccttatgactgtaggtagctacgttctttatagctgaggaagagactcaagttacccacatgtctttttggttttgtttttttgtttttttttttttttttttttggttttcaagacagggtttctctgtatagctctggctgtcctggaactcattttgtagaccaggctggcctcgaactcagaaatccacctgcctctgcctaccaaatgctgggattaagggcgtgcaccaccactgcccagcaagactttgtagcttcttagggacagaactgggctttgagcttagtctggaatttttaaatccatggtctttcttccatttcattctcctgtaactggctcctgcaagtaaccaaccatttccagacagatggagcaccttgagcatggagccgtcagaatagcatcagggcagaaaaactcatttgcttgggaatctggagaggttgcgaggaggaggaggacgaggacgaggaggaggagagaaagccacagatggtccaagaagtctcatgtctcataggataaaatgacacatctaaggtcattcatatgagcttctgctacaggctgtttataggttctttcaggtctatattgttattctatcgaccttacaaatgaggaaagtgaggcttagaaaaattaagtgacttgttcaaggtcacataatgaatggtaaaactaggacttagatccagatttaataagcttatagttacttatttttttgcagtgctgggactcaattcggagcccttcacatgccagagagaagcacagtaccagtgaagtacgtcctcagccacaatgtgtcttttcattatgaccaaaatcggacgtgccagaagtgggatttaaatgacctgtgtagaaattcagtagtgaaggaagcctttaaagtgtggtagactaggctttggatggtcaagggttcagacattttgatctcacacaatgtttagtgtctcagttgcgcctgagggaactggctggctatgtttccccagcagcctggggctctgcactactgcatctgacctcttccatacatactcccattctgcagagagagctctattccggtggatgtggctcgccagcgggagctcaagtggctggagatgttcagtaactgggataagtggctgtcacggcgtttccagaaggtttgagagctgtacagtgggctgggcaatgcacaggggtggggagtggaaactactaacatctgccctcctagcgcattgaggatcagtggtacttgggcattgggaagaggagcttttaaactgtagccaggccaggtccaacgttgtcacatctggcatgtgggaggaatgtctctgggagcctgatggctggtggggaaagcttagagaatgttccaggcctgaagctgtcaccctagatgttactctgccttaggtaaagctgcgctgccggaaaggaatcccctcctctctgagagccaaggcctggcagtacctgtctaatagcaaggaactcctggagcagaaccctggcaagtttgaggtttgtgcaactcgagggtgggcgatatgtggcactgtctctgcaggagaagtcagttctcccagaccccgaggtaaccccgctgtcccctgcaggagctggagcgggctgctggggaccccaagtggctcgatgtgattgagaaggacctgcatcgccagttccctttccatgagatgtttgctgctcgaggagggcatgggtaagagcctggctgggggtcggttggcaaacgtctgctgaaggtgccaggtagatataaggctcagtccaagcaattcatgccctctagggctcttagaagagtgagtgtaatcagttgaaagtcaagcagtgttaagtgtctggtgagggagagtcttatgtgggccttcttataggtacatcaaggactatgaggttgtatttgtgctgggttttataagctagtcggggctgaggcaaggcagggttttccttcctgggaggttgtataagcagggtctgggcagtgggtctttacagagctgagtctggaaagttcaggctcggtcaccaaggaccaaggcacttgggtttgtattctgtaggttaggcttccttcagatgaagcccgtgcaccactcctagtatgtaaggtgatcctaggtagttacacggacttttgttgttggattggagcttatacctgggaccgctaacatgctaggcaagtaggtgttcgaccactcagctagttctaagccctagatgaccatttttcatgaaatatatatttactttatgcaatataagaaaacagtatgtatatttttttctttgagatagggtctgactaggtagatcacactggcttcaaattcagatctatccctgcctcccaaatgctaggattaaaggctgtgccaccatagccataggcagctaatttatttattattttaatgagtgactttgaacttgctaggtagcccagagtatcttgaactcagtgttctgctgtagcctaagtgttagaattatagataagtactatgtgtagcttaaataaacatatttatcaatatgttcatcttttttttggttatttttggttttttcaagacagggtttctctttatagccctggctgtcctggaactcactctgtagaccaggctggcctcgaactcagaaatccgcctacctctgcctcccgagtgctgggattaaaggcgtgcaccaccatgcccggcttgttcaacttctaacaaatagttattgagtacctacttctcctaggtactgttctagtcacagatgacagcaatgaaccgaaacccaaaagttgtcttcctgagggatggacaatccttgatggaggaaagtttgtgaaatatgtgtagtagtggtcagcactggtgagggtttagacagtaaaggaggatggagagcatgtggggacaggattcaagaacacgaaataaaaagagacttgcgagttaataataaagaccagagaactggaggaaatgtaggtttgggatatgtcaaaagttttagagtcagacatggtagctcatgcctatagtctcaggtacttaggtggactttggtagtgaggctgtggatcagaccagctcttaggaagctgtcgcaggaggagtgacatgcgtttaaagccagcctgacatacttttttttttttttttttttttttttttggttctttgtagaccaggctggcctcgaactcagaaacccgccttcctctgcctcctgagtgctgggattaaaggcatgtgccaccatgcccggctttgcctgacatacatcttgagttgtagaacaatttggctagagtatgactctgtctcaaactaggtgggggttgtgaatggaaatctaggggatgtaggcaggttgggaacccagtacattataagtctggatttcaagaaagaagagtgtttgtttatttgtttgagacagggtttctctgtgtagctttggctattttggaactcactctgtagatcaggctgaccttgaacatggagatccacctgcctctgctgggattaaagatgtgtgctaccattgcctgactcaggaaagaagtttaaattggcaatacattggaaattggaagtatgcttatgaagggattaggctcactcattggacaagatattgccaagcagcacgtatagatacaaaaggaagatgtgacctggtgtgacagcacacatcgttcaatcccagcctggggaggcagaagcagggggagcctggtgttagataaagtaatcaacaccatcaggtgtgttccctcttcaggactcttgcaaagtaagcaagcaggtggtgatgtagctcactcagtagagtgtttgtccagcatgcaggaagctctggatttgatttccagcaccacagaaagcagagtgtgatagtgcatgcctttaattctgttactggagaggtgaaggcaggaggatcagattcagggtcactttgggcggttggaggttggaattcagcaagcgctgcatgaaaccccatctcagtaatttgtaagtaacagtgaagtagttgggtgcagatataagcgatcacatctgagtgactggatcggggtggtgctaggataagcagtgttagcagtgtgactgcaggcagggagattgggaggctaagaggtcagagatggaagtaactgtgagtggggaaaaagagattagaggattgagttcaggaaggaatgaccatgattgctttgcggctggttgcaggtgaaagaagaaatgtataggaagtctatggtatatgcagctaagggtgaaaggccaggacatagactgcttccagtgctgagcctctagtagccagggctaggaaggtagatggctgtctggtagtaaagcttttgaggttagtttggaacttgatgtgagagtactgatccagggttaggggcagatttgatgattgccatcttctgtactccccttaggcaacaggacctgtaccgaatcctgaaggcctataccatctacaggcctgacgagggctactgtcaggcccaggccccagtggctgcggtgttgctaatgcacatgcctgctgaggtcagcataagtggacctgtttggggtgggggtgagaagatatagacataccatggtgaagggagagctgcatactccctgcttctcaggccccatccctgcctcttgttcttgcccttcttagcaagcgttttggtgcctggtacagatctgcgacaagtacctcccaggttactacagtgcagggctggtgagtgtctggaagctgggtgcactggggctgccttaggaccttgccctgcctcatttgtccttctgtccctcgaccattgaggttaagacagcctcttaggtttgattgtaccctgaggggaccacagcaaaccagacccacttcttatagctcttcccaccgcctctaggaagccattcagttggatggagaaatcttttttgcactcctgcgccgggtctctccgctggcacatcgtcaccttcggcggcagcgcattgaccctgtgctctacatgacagagtggttcatgtgcatctttgcccgcaccctcccctgggcttcagtgctgcgtgtctgggacatgtttttctgtgaaggtatttcagtggctggccaggctgaggggggaggctaggatttgttacttactggtatcccatagacaagtattgttgggcctaggcttcataataaactctgcagtttggaaaaacagggcctatcttggtttggccaccagcctagagtctgcttgccctccaagaaatcttcagctgtaaggctggcaggcatcagcagcagcagggctgtttgcctccataagacagcggaggtcctggacctgatttctctttgcattcttctctgaccctgtaggcgttaagatcatcttccgagtggctctggttttactgcggcacacactgggttctgtggaaaagctgcgctcatgtcaaggcatgtatgaaaccatggagcagcttcgaaacctaccacaacagtgtatgcaggaggacttcctggtgcatgaggtaggccatgagcctcagcacaccctgacctgcttcagcccattcccacacaggtctacactctggcttccatgtctctgtctaggtaaccaacctcccagtgacagaagcatggattgagcgggagaatgcagcccaactgaagaagtggcgagaaactagaggagagctgcagtatcggccctcacggcgactacacggctcccgagccatccatgaggaacgcaggcggcagcagccacccctgggcccttcctctagcctcctcagcctccctagtctcaagagcagaggctcccgggcagttggaggggctccttccccaccacctcctgtccgcagggctagtgctgggcccgtccctggggctgtcgtcattgctgagggactgcatccatcccttccttcacctactggtaacagcaccccactaggcaccagcaaggagatcaggcggcaggagaaagagcggcagaaacaggagaaagatcgagagaaggagcggcagagacaagagaaggagcgggaaaggcaggagaaggagcggcagaagtgggaaaaggagcaagagaaggaacagcagaagcaggagaaggagcggcagaagctggagaagaaaggccaaggccggaaactgtccttgcgtcgaagggcagatgggcccccggcatcccatgatggtggggacaggtcagcagctgaggcccggcaggatgcttacttttgacctctggttggatctggatggcatggccctcctccttcccctcatcgagagcagccctggcaggctctcccagctccccttggcaggctcttcctttttctgaggaaagtggcttgattcccctgactccttgccagctgctgatccgtacatggccaggacagccacagtgcaagggacagctgcattacctagggtaacagtgaccaagtctggagacccttttgtccagttaggctcagcttgggtctctgtcacacctatgaaatccttctggggtgctgtcttacactccggtggcttcccttagatggtggagctaggttccttttcctgtcttggggccctgcctgtcaccccactgcctactgggggccaaggctgttttctctcctggatatccttgtgttgtaattatgtacagaaggtcaggttggcctggggtgggtgctgtcctttcccctctccacagcgctgcttcactccagtttatttaagaggatatgctaggaagtgtcctccgtctccttcccacccgtgccctgctctctcctaactcacttgctttgtatgctcaggcctctctgctgcagtcacaaagtctgtcttcgattttgttcctttctagccatcaagcccctctctgaataagggtcttcccttgagtccaggggtggaacccaatgtttacattctcttctgtcttggtcccacctcagtggcagttttgtggcgctttgaggaaccggaaaatgaacctgctgttatatctgtctcccgccttgttatttgaagagtgctgtagagtaaggggagtgggggaggcaggcacaaagtctgactttccataggttcagtctgcaggtcttggcaggaacatctggaccactggttctcaatcttcctaatgctgtgaccctttaatacagttctttatattgtggtgactccaaccataaaattattttcattattacttaataacagtatactactgctatgaatcataatgtacgtctctgttttctgatagtcttaggcaacctctgtgaatagtattcgacccccaaaaggagtcacagtaaacgctcacttcatctctcatcaacaaacatagtggtccagctccttcctcctcagctttgcctggattctgctgctcccactctcactggcctcctgggatcctctgcacagcttgcaggactgggatcgcctttccaatggcttcagccccctggaagctgaaggaggggcctgagagtgtgtgcaaaaccaccatctttagattgggctgggttcttggtcagcagcttggtgcagttccctgggcgtctagggtagactaactgcctggggttcatcccagcaggtacacacaaccaaactgcgcagctcttgttttctgtggctagatctttgccacacaccctctactccgggtcaggatgataaaggtgtgggcttctgtggccgtaaagctccacttggcacttctcagcagaaaggggatcagggtgtgtggtctccaggtagagaaaaccccctccggatgaaccagcagtgctgagagctgctttcttcagggtcctgtctgtagcaagatgccctcctggtctagaacttgtgttctgtacccacagaagtgaagtttcatgattcacaatgggagaaaaccctggaggagaaaggcgtggtccatctggctgccctcttccaactctagtaggatcaccggagctatttagccgagggtggggacgggggtggaggcgttgaggtttgagttgttccccagagctccagatctaaacctcactattggggaagatctcacctggccccagctttgcaggagctggatcccagccctttggcagtttgctaagggatgaggtaggcttcgtgtaactgatgggcttctgcctggttacaggccacggacggaagccagtggcacctcctgtgatggttgtcccgctacagaaactaggaattaagtgggagaatagacatggtgcaaatgactcctgggttctaaaagggcttggtttggaaggtgcccgagcgcttataatcagaagcaggactcagagagaagagcaagactttctttaaaaatagacggtctcatgttgtatcccagactgtcgtcaatctcgcgacaatcaatcctgtttcaatttcccgagtgttgggactgcgttaagatcggaagcccgggtgtctactgaaggccactaggcgtacagaaccctatccatacatgcaaacggaagcccgaagcctctgttcggcctgtgcctctccatccaggccttgggaacctcttagcacaccacgtccttatcctcactgtagcctccatcgtagaggaataataaaacatttcccgccatcctcaagtcccgtgaggcaaggacgtagttcacgcgagtctttgcaggtcttgcgtcacttcctgccgcgagtcggccttggctaatggtatgcatccgccctttttgaatagaagtgaagccacttccgggtcctatgccggtctccacggtttttttccgggtgatgaaggcgggtgccccggatgtaataccggcgaaagcatctttccttttcttccccgcctgaccctgggttcctaggtgagcaccggcgggtaagattgtttgaatccccgcgggtttgcttcgcctttagtttgtacgccaaggacatggccgagcaggtcgctacgtggtattcggggatctaggcagctccagctcttgggtccgaccggcctctgtgagcactcgggtgggagaggtggttgagttcggtagctccggactggtaggggagtggtgacgtaggggaacctgactccccatccccgggtgggaatacccgcagggtccacgcgggggcggagatccttcccatcgcctctcctccgggcctcagaattgcccaaccaaccccggacgtcgtgcctgctagttctctcagatgctttagcgatctgtcctcgctcacatttaccaggaaaaatgttggtggcccctgcactcccccgcggtcctctctccttacctcacttcctcactacatatctttttccgaggtccagctggaggaaatccacagccaatcatgccaaagaggaaagtgacttttcagggtgttggagatgaggatggtgaagatgaaatcagtgtgcccaaaaagaaggtgagatggccagatttcgaatttccgtggaggactgagaggaaagaagaaggagaaatctgatgggaggaaagccgggaagccaaggaagtgttagttttccccggcgcactgggtttggaaagatttgtgtacagatcctggagtatctggggaactacccagttggctgcatttctcatttgcttcggcctcctcacagctggtggaccctgtggctgcagcaggtggtcctgggagccgcttcaaaggcaagcactctttagacagtgatgaagaggatgatgatgaggaagggtccagcaaatatgatatcctggcctcagaggatgtagaaggtgagctatgtccgaagcgttaactgagttggggggacaagccttcaggatggaggtgggaggtgtgcctgcttcccttttgcgtgtctagcatgccccacccccaatgtcttcggtgcaggtcaggaagcagctactctccctagtgagggcggtgtgaggatcacacccttcaacctgcaggaagagatggaggaaggccactttgatgctgatggcaactacttcctgaaccaggatgcgcagatccgagacagctggctggacaacattgactgggtgtggcccagggactattctggctgaggcctgggagtgcaggtgcagggcctgggccctggtggaagtttgtaagaaattctaattatcttttccttgtaggtgaggatcaaggaacggccccctgataagcaccaggtttcagactcggaggaggaagacagcctgggtcagactccaatgagcgcccaagcactcctggagggacttttggagttgttgttgccaagagagacagtggctggggcccttaggcggctgggggcccgaggaggaggcaaagggagcaacagcaaggggactggacggcccaattccccccagcggctagaccggctgtctgggttagctgaccaaatggtggcacgaggcaaccttggtgtgtaccaggaaacaagggaacggttggctatgcgactgaagggtttggggtgtcgggcccagggatcccatgaccccacacctccaccctccctggacatgtttgctgaggaagtagcagagggtgaactggaaaccccaacccctacccaaagagagggtaagtttggagggcacgggtggggggcagtgtgggctggagactgagtgcttgaggcccaagtatcgttcattgtgttagaggcagagtcagcaggagatggcctgatggatgtgatgtgggagtataaatgggagaacacgggggacgccgagctgtatggacccttcaccagtgcccagatgcaggtgagctgccccctgccgcgtctgtcccatctgtccagcccaccttctgtcagcttgcctgagttctgtcctctgttcttacagacgtgggtgagtgaaggttacttcccggatggtgtttattgtcggaagctggaccctccgggcggccagttctacaactccaagcgcattgattttgagctgtacacgtgagcccgctaagggccccatgcggcacggcagccccttctttcttgaacttggcagaggaagccccagctgctctgggcagtgaggatattggaggccactttaaagccattgtttcccaataaaagccttgactgtgcgatggccaagagccagggcttctccatagctccttttggcttcacctggtaggtccctgagcgtttcttcccgagagacttcctcacttgcttctctctggtgtcttggaccacctcagttttttttcccacccttggaggcagaggtagggcccatcagatgtcctgtgactttcctacgtagacaacttctacttgctgtgtaaaattccctccatcactcttttctccagtctcccttgcaagtccctgttctgctgatctttgacttttaggacctcaaatgctctgtcctggcagctcccttgtagctgggacattgggaagaccttgaaatcctattgagagattctcttaaacatgcattctcttcttccatagtctgatttttctacccctcgcccccctgcagtagcttctgtagcttttaggtgaagtataaacttggtagcacttcaaggttgcttgagccaccatgtgacacagaggggggcaaagtgcagtggcttattggagatgccacagtaatagagagctggccatggagctaagtctcctgaccttttttggcataaagctttttcttgcttggcctttcaggcattgtagtgtacgtttcctgggctcccacatctcgggcatggggctggtgcctcgaggaaacagtcggtctggcccttccaggaatctggagtgcagtagagggctgtgggaggcaggcagggcctaagttttcaccccaccatgctgctctgctcgcctcatctgtctccaggaggcgccccaggagctacaaactgagaacttgggaagtagttcctaggctcagctcgggcttggtggtgggtatttgatgcagagacctccaacacatctaacaactagactggttcctgccagtctagactgcagttgccttgacttcaagaagcccattagtagtagtaggacatctgatgcagtgagtcactgagacagcagaaaccctccaggcattggtaaggtgttaactgttacagaggaactggctttctgaggtacctggcatcttgggacgagtgaaatctagtcaggtggcctgagtgttcacaggtgttgggggatagatacccaggtgtcactcagttccctcacgcttggcgagttctccccttctctgataacaccaaggagggggcagaatagtgatccctgaagatacccacatcctgagctgtgtgaataccactttatgagttatgtggcagagggaaagggtaaagtgacattgaggttttgttttgttttaattttttgaaatggggaagggggtcctcactgtgtagccctgactggcctgctgcctcccaagtgttgagactaacgtcatgcaccatggcgctgggcaaaattaagaaattttgagactgggagattgattacctttgattatttgggccattgtagtcatgggtccttgctgatccctaatgagagcagaggactctgaaagctggaagtgaggcgtatgtctcagggtgcaggtgcctggagagacgggaaaagcagaagacagattcttctcagacaggtgcagtcccacagtgataacccagttaacccactttgtactgtaccctctagagtggtaagataataaatttgtgtcaagctgcttacattgtggtaatttaataaagcaccggtcggaagtgagtctgcgcccagctacgctctggagagccaccagagttccttgtcttcccggccaagcactcacctgacccaaccctgcttaggttcggaactgggtctattctgggtggtaagaccatggactttgttaagcacaaagccagtaattgtttggatgggtttttgttgttttgagacagagtctctcttggaccctggctggcctggaattgattatgtagaccaggctggtcttgaatttagagagacccatctgcctctgcctcccaagtgctgggtaaactgccttcctctccacttcctctccagtaataaaactacaatgtgctttttttgttgttgtttttttgagacagggtttctctgtgtagccctggctatcctggaactcactttgtagaccaggctggcctcgaactcagaagctgcctctgcctcccgagtgttgggattaaaggcgtgcgccaccaccgcccggctacaatgtgctcttctaataagggggccggagaaatacctgagcagttaaaagggcccaggcttgattctcagtaattacatggaggctcacaatcagtctcacaattgtcgccaggtaactgtgggggagtctaatgctttctagctccaggcactagactaccaggtggttagacaatacaaaggcaagcactcatacacatgtaaaaaattggttttagnnnnnnnnnnnnnnnnnnnnnnnnnnnnnnnnnnnnnnnnnnnnnnnnnnnnnnnnnnnnnnnnnnnnnnnnnnnnnnnnnnnnnnnnnnnnnnnnnnnnnnntttttcgagacagggtttctctgtgtagccctggctgtcctggcactcactttgtagaccaggctggcctcgaactcagaaatccgcctgcctctgcctcccaagtgctgggattaaaggtgtgcgccaccatgcccggcttgttgtttaattacattcatttctgttctccagcagcttatatccagccttatctcccactcgcccaaagttgagtggttattcccccactgagtccactttgtgttgtgcagctacttctcttgggagtgcagtggaactcgggcttgcatctgctggacaggcactctagcactgaggaatagcccagcccagttctcggttttgttttgtgtgtgtttatggtagggggagggtttgagagaattagcttggtggttgtttctcccactgagtctgtagcccagactctgaccagcacctaaactacctccccacagtgttagccttagaggcagagcgctgaagacaaaggaagcgagccagcttttccctgtccagttgacaggggcagccttctcaaggagactaaaagtgagggtgccatggttaggtggctcacgtctgatctcagcaggagcatcagaagttcaaagatgtcataaactgaagttctctgggtgctgtttgaatactggaatacaggtgtctgaacccagagtctcttagagggcaatgaagtgtgtcttaatgttttccttgctgggataacgtaggacccaagtaacctaagtaagatatgagttaaggtggaggcgcacacctttgatcccaaccagaggcaggagaatctctcgagttcaagatcagcctggtttatggagtgagttccaggatagccaaaaacatacagagaaaccctgtctcaactaaaacaaaaaactagaaaaccaccatgaccaaaagcatcatgggaaagaagtttagttcattgttaagctgacgggagccagctggcagaagcagaggcaaagaccgtgggagaacgtggtttactggcctgcccggcttgctttctgatggcacccaggaccaccagctcatacatgggatacagtgagctgagccctatagacttgcctacaggcacatctacagaggctttttaatcgagagtacctcttcccagacgacttaacataaaactaacagcagccatttttactctgtggagtatccttgtatcttggacaaacacacaagaaagccttaagatcaaagctataggtgacaatgtcacattcagtacattgacttgactgctgtctgtttccaaggaggtaacaggagccaggcgaggcagggagtctggaccctctgggtgaggtaactcatgaggacaaggagtagtagagtgatgtccaaacgctgctaaaataagccaaatggggtgtggtgggacacactggttgcagcacttgagggaaagcctgagttgcatagtcacaggtgtggtggcacatgcttgtgatcccagcacacaggaccaggaattcagtctcagtttacctagcaagtttaaggatagcctgggctacatgagctgtcttaacccctcaaacaacaaaaacccaactagacaaaaatggttttattgaagaatgtctgacacaccctccattccttcccacaggaagaggtcttagcctcacagcattcatctgctggttttggtttgtttgtgtatatgtgtgtgtagggggttgttgtcttttaagattttacttgttttcatgtttgcttgcatgtatgtgtactgtgtctgtgtaccatgccagacttggaggccaggagacttgattgacagatgtgaggcacctgtgagtggagagcgaacccagggcctcctctggagaagcaattgctccttactgctgagctatctctcaggccgttttttcttgacaaaaaactggcctcaaactttccaccctcgcatttcctttgaagttctagtatctttagatgtgtgacagtgtctgactccatctgttgactagatgagcctttttgctttgccgctgatcctagattgcaggctgtggctgtctacatgaagtcaaaaccaagctgtgtatctgaaagtacccaacttctcatgatcctgaaacccgatgactgtctcaggtctgggttataaacaggtgtgtgcaaaatgggaggtgttgatgctctggggagtgtgaagtcatttctgaactccccctggaggacaggctgtccttggtccttttggggatcaaggttatggtgttaaacagggtttcagcaaccccaggccaccaccaatactttggggccctatatacagtctacctacactcagctaattccagctactgccggcctctccctaccaagtctctgttcttcaggggcttgtcaggcctagactatctctaaggtaggactccagctgccatactgcaggtgctggggctgtagaagccagcagcctgggggttgccccgggggatgccttgagcagtttctgttttcctgttctgatgcgatcagtcttgctctgactttccggttcccaccctctcctctgccggcctctgccctgcagtttgcagtggcttcaggatccctggctccagtgtcctgctctgagcacatttatttctgccgctccatgcttgccaagtagctgagtttctcacccagtccacactgtccttgttccgagtatcaagccatcgtttggcaaggaagactggcattgaggcatccctacacatattagtcccaactctttatttaataccgaatttgcccattgtgctgaggaagcagatgagatgcggagcggagcactgaggtgaagccgcaagcccggtgcccctcagcctgtgagtgttcaaggacctcagtcactctgcctgtccctaaagattagtcacgagattcagtgatttttttttttaatatttatttacttacttacttacttacttattctatgtaagtacactgtagctgtcttcagacactccagaagagggcatcagattttgttacggatggttgtgagccaccatgtggttgctgggatttgaactcgggacctttggaagagcagttggcgctcttaaccgttgagccatctcaccagcctgtgattttttttttctttatatttttgcccattttttaaaagctgtagttgggactggcgacatatgcttataatccaggtgctcagattgaagcaagaggaggctcatgagttcaagtctggactggggtgtagcatgagagacatggctgtgtctcaaattaactataattcttagaattaggttatcttcctctcactgagatatgagagacatttttatatcccagacacaaggcatggtcagatgctgctgttaagtgttctcaggcagtaacttctctttcctcttcttttctgagacaagtttatgtctcctagactgggctccagcttgcgttcctcttaggtccatcttcagataccgagtttacaggcgtgtgttattacactcagtttatgtggtactgaggtactcagggctctatggatgctggggaaacactttgctgtaacacaccccagcccgctcctggaacttacagagatctgcctggctctgagtgctgggatttaagcgtgcaccctgcagtttcttttcaggtttaaaaaccagtacctcagctgggtgtggtggcgcacgcctttaatcccagcactcgggaggcagaggtaggcggatttctgagttcgaggccagcctggtctacaaagtgagtgccaggacagccagggctacacagagaaaccctgtctcgaaaaacccacaaaaaaaaaaaaaaaaaaaaaccaaaaccagtacctcctgttttgattcatgtctgtccctctcagccccaacctgattcttcccctgctgggaagcccaggaccttcagcatactgaggcaacaggcaagctgcacctgcaaccctgtccaatttctaccatcacatggtgcttgagaataggaggtgtagccaggcgtggtggcgcacacttttaatcccagcacttgggaggcagaggcaggcagatttctgagttcgaggccagcctggtctacaaagtgagttccaagacagccaaggctacacagaaaaaccctgtctcaaaaaacaaaacaaaaaagagaataggaggtgtcaggggctggagagttggtgcaatggttagagccctggatgaccttagagagggtctgagttcaattcctgcactcacatacaggttcacagccatccataactttggctctgggcacaagtaacctggcctccccaggcagcaggcatacatgtacaacacagacatacgttacagacaaagcacacacacacacaaagtaaaagagagagagtgggggcgccatctgagcaacaggttactaggtgattgctttttccatttatacagttgctatgccaacagtatagggtgttactgcacagacctaaatagtgtataacctgttacacagctgccggctggatcctgggctgtagccctgtgtatgtgagtgactcaatgtcatggacaagggtaagggtgtgggaatatttatccctaaacatagagcaggaccagtaaagaggccaggcaagctcctagagaaacatgaatgacctccaggacattttcaggacagtccgagacaaagcccactctttaggctgtgtctctccacaggcgaactcgccctctgcatggattgacccagacaagctggtgacaaggcagtttcagtcacagtcactcccgtgctttttgttgttgttttcccatttatttatttatttattgagacatgctttttctgtgtggccctggctgtcctgaaacttgccctgtagaccaagcaggcctcagactcagagatccacctgcctctacctcttaagtgctggattaaaggcctgcaaatctatgcctggcatttgttactgttttggttggttgggtgtttgtttgtttgtttgtttgtttttgagacaaggtttcactagccttggttgacctagaacttgctgtgtaaaccaggctggccttgaactcacagagattcacctgcctccttttgagtgctgagattaaaggtgtaagttaccaggcttgacctgtcaagtttgttgttactttaaaatgtaatcttccgtgttcaaccctgtccccaagttgtatcctcagtcagtgacagctgacatgggcttggaggaatccttgggtttcccactgacatctctgaagttctctctggaggtcagcagggggctctattctctgtgaatactcatgcagtgtatgctagagacagatggagggagcaaggcagttttgggagactggatgtgaccactatggtagacttggctggagcccctctgccaccgactcttctgggtccatctagatgcggagcttttgaccccctccctcctgggggtatgaagtctgtggagtggactataggccctggagatacagccaactgtgaactgccatgtaagttctaggcatccaacttgggtcctctgtaagaacaagaactcttaaccactgagccaactctcttgacaggattgttccagaaatttccctagtgctcatgtatgtagacctattaatgtgcacttagacacatctgtacacttttcacgcacatctgttctggtgatgaggagaaatgtcaccctcttagtagttggagcgtaggacctgcagggtgcttcctgagggaatgacagggtaactgaagaaagggggtggatctaggggttgcttgggccaatagttatgcagcaagaggcatagacctatttcagtttctctgttgtttgagacatggctggcttccattacaggcaggtgtcatcctttcagcctaaatcaggaaattcaaccccccaccaccaccccccttttaccagtgttacacatggaactcaaggccttgttcatgatccgaccttagctagaatattatcatctatcaacaaaaaagtctatttgaggaagatgacaagaatgaaggggttttccatggtgtctgctccttcctcccccccccccccccccggttaactagagaagtcctttgttcaggaagtattaataacataaaatactagcattgggttattttttcacattttttgagattacaatacaattacatcatttctcctttttgtttcctctctccaaattcccccacataccctccccttgctctctttcaaattcatggctgtgttttcctgtaattcttgttatgtatataacagatattcctaaatacataaatataacccactcagtctgtacacattacttgtgtgtatgttttcaaggctgaccatttgggactggataaccagttgtgctctacccagggtaaggctgttgctctgctctctgcatccttactgttctttgtctagggttgaggtctcctgagcgctccttcatccacattagcatgtctgttggtgtccttgttcagatcaggtttaggaagtcatttagaggaggaaggcaaaataacaatctaaaaaaggtcataaggaaccagcctattaagtgcccagctaggggctggagagatggctttcccaggacattccaagcctgattcattttaggagctgtgaattggagatgttttcctccagaagtcccttcttcctaatcccccatggctggctccctttctctgtcaggtctcaccttctcaggtcagcctatgagaaagagcatttcctatcagccccagtgctctacggtgtctgcagcataagcttgtttagaatttgtctcaggagaagtcagtttagagactcaccagcccaggtctaagttcatcccacaggggagaatgtccacaggacagttgtccaggatatgagtgagaattctgggaaagaaactgtgtccgcaaagaccgactaactgattagaactgctgtggttgcagctgtatagcaccggctgcgcttcctgtggactttggcttgatttccagcaccatcaggcacagcagtacatagcacattaggtccaggagatctgatgcctcctgctggcctcctcaggcacggcacatacgtggtgcatgttcatacaagcaggcaaaacacccatacacataaaatttggaggggaaaaaaagtagcacatatctttagttccagaactcagaaagcagaggcaggcaggtatctgtgagtttgagtcttgtctgcatagtgagttccaatacatacaggtacacttgctggtttggggggtggggatggggggttggaagggctgcagcaaggtgaaaagatgagatttgttttgtttgttttgttttgtttgagacagggtttctcattcactctgtagagcaggctagcctcgaactcagaaatccacctgcctcccaagtgctgggattaaaggcgtgcgccaccactgcctggtgagagatggaatctttagcgccttaaacagtgacctttgcccaactctgtaccagactaacatcctgcgactaatagataaaaaccttgggtatctattaactcagaacaccaacgtccacaaacccaaaagctaagaatggcatcagatagcgtctagggcttcccccttctgtaactgcctctttgatgtttccacccatgcattttaaacttgcttggatttgactttctttgacatgtcactataaatgccacgaatctgcttccattggggacctggaacttgaggtaatctagtcccatgttcctccagccacactcactcaatcaaattcagctgtcgaaaaactatcatttactctcctagaggtgagagctatgtttttttttttcttcttcttcttcttcttctgaagacatgaagaaaacttgcttccagtgtccaggacggatgaagagctgggcctatggatcagtagtcccagacgcaggcctcaggagtggcagacaggcaggaaaaggggaggttgttcatgctctttcttgggttaggtggaggagttccagtcgggaggaatgccaccttccaatcctctgatggtctggaggtccggccatgtggctggtaagtgcctttatccttgaaggccaaagagagcagacacttactgggcaagtctaggtcacgttccagacaggacactgctcagggatcaacaggtctaaagctgaagagaatccgacctaaagacaaaggcaatgaaagagacagacctgttacttagacagagaggccaagtctgttcatctcttccacttcacagcaaggaagcatttctagtaaaagtagccttcagatccctggaaactgcttcagatccctggaaaccgacccaggccactgttggcaccacaggccacagcagggattgtcactacaacaacgctaataagctgattaggtattgcctggctctgcgatgtccaaaattagtacttaaaaattacttttagacttgtttaccttatttttatatgtatgggagctttgccagaatatgtgtacatgcgccacatgcatgtctggtacttgtgaggtcagaagaaggggtcagatgccctgaaactagagttatggatggttgtgagccatcatgtgggtgctgggatttgaaccagagtcttctacaagagcagtggttacaataagatgggagaagcttttacactgagcccagctacttcagttggtggagcaagagtctcttaatctcagggtcatgggttcaagccccatgttgggtaccatttatagaagtttggtctggttcttccagccccatgctcccagaaataagactcagattcaaaatatatttacaaataccttggtgatatagctaggcttttctctgactagatcataacttaaaagaacccacttattttaacctgcattctgcatgtggctggttacctgtgctcaggtaccatgtgtctgtctcatcaaatcttggttgactcttctgtacctggctctgtcccagaattttttttaaattttttttaaagatttatttattatatgtaagtacactgtagctgttttcagacacactagaagaggtcaccagatctcattacagatggttgtgagctaccacgtggttgctgggatttaaactcaggatcttcagaagaagcagtcagtgctcttaacccctgagccagctctctgttgttgtcttcagatgcaccagaagagggcgtcagatctcattactcaggacctttggaagagcagtcagtgctcttaaccactgagccatctctccagcccctcaccccccccccccgcctctcagatgtcctttaattctatccttttctatagcccatagagtttgatttttaatttttttcaatttattttatgtatgagtacactgtaactgtatttagacacaccagagaagggcattggatcccattacagatgattgtgagccatgtgggtactgggaattgaactcagcacctctggaagagcagtcagtgcccttaactgctgagccatctccctacccccaaccatgtttttaattgacaaatgatgcacccatacaatatgcacagtactctctctccatcatctctccatcatctctcctgctctcccaccccctaattagtgattcttaagtcatctgaaataaagtgaaactggagatttatttagtaacaagatcatcttccctcctcctcgtcaccccccccccctttcttttttttcctgacacaggatttctctgtagccctcactgtcctggaactggctcagtagaccagactggccttgaactcacagagctctcttcctctctggagttgggattaaaggcatgcaccaccaccacacagccagtttcttcgtttttgacttgataactcacaccagtctcccttctgaagccagtctcaggaaactggaggttgagcatagagccaaggactactgagagtgcttcctcaggcttggttgtgcatctgtgactctgagagtgcttcctcaggcttgggtgtgcatctgtgactctgagagtgctttctcaggcttgggtgtgtatctgtgaatgtgtgtatttttgtttatgtcaactctgtcaccagctgtttcctgtgggtgctaaattacaaatgacacttttgtggttttgctggcttggggtgtggttcttgcattgggctggcactaactcgatgtttagaccagagatgaaagcatttggcctagtgagcatcttctaggatgtgtctcccatcctttctccttccatttcctcggttctctcttgctagtacatttataagttggttcttggcctgatctgctgtgactctgtagagaagaactcagaacttcaggaatggattctttcctcccactggaatcctgggatggaactcaggttgtaagacttgcgtgaattccaggcttaggcttggagagattcagccatccttgtgcccacacttcccttcccgctagtagaacagatccattcagacgactacaggaccctgtcgggtagcagaggaattactacagagcgattggagcccatgaatgacacaggagttgcttctttgccaccacataacatgttcatcaagagaagtagtctgaaggtggacatggtagcacacgcccttcatcccagacctgctgaggcaggcgcaggcctgtgaagtagaggtcagcctggtctgtagagcaagttccaggatagctacggagagactatttccaaaaacctacaccaaacacaagagtgtgtgcagggaggaatctgggttgttttcaaggctataactattggagctttgttaggtcttgacagtgcagattcacctaagataatagagttctctctctctctctctctctctctctctctctctctctctctctctctctttctctcattggttttttgagagagggtttcttatgtagccctggctgtcctggacctagctctgtaaaccaggttggtctcaaacttagaggtctgactgcctctgcctcccaagtgtgatttaaggcatgccatgatggcctgcctatctgtctgtctatctatctatctatctatctatctatctatctatctatctatctattttgtcttccattcttacttgtgtgtgggggggttctatttttgggtagttccttgactttttgtattaacgctttgagtaattagtattatatttttgatttctaacaatccaatctactattctttttaaaactttgtttatttatgtatttatttaatgtgtgtgtgtgtgtgtgtgtgtgtgtgtgcgcgcgcacactcttatatgcatgtgtacctaagtggggacagaggctgaggtagttggagtgagaatggtcttcatgggctcatatatttgaatgtattgtctgcagttggtggcactgttttggaaggattaggagatgtgactttgtaagaggaggtgtgacactagggccagcctttgagattttaaaggactcagaccatttcctctgtgttttctcctcttcccaaccagttccatacctgttgcttgaaaatcaagatgtgagctctcagctaatcctgcaccatgccttgctctaccattatggattctacacctttgaaaccatgagcccagttaaaccctttgttgtgtaagttgccttggtcatggtgttcagtcacagcaatagaaagatgactagtgcacagccaaccttgagtactattcctcagggcacccacctggctttttaaaaatataatattttattaattctctttaaatctcataatgcacacaatgtatttttaaaaaatatttatattaatttcaaaatatatgagtgtttttctgtgtaccatatgcatgcaatgctcatggaggccagaagagaggcagtgtagcccctgaaagtggagttgaagatggttattaaccaccatatagattgctgggaattgaacccaagacctttggaggaacaaatactcttaaccactgagccctctcttcaggtcctcacaatatattttgaccaatttcttcttcccccacagctcttccaatatccatacctaccctctcccaagtttgtctcctcattttttcttctctttctttctttatttctttttttttttttttttggttttccgagacagggtttctctgtatagccctggctgtcctggaactcactttgtagaccaggctggcctcaaactcagaaatccgcctgcctctgcctcccaagtgctaggatcaaaggcgtgtgccaccacgcccagctttctttcttttttcttttccttccttccttccttcctttttctttttttgagacagggtttctctgtgtagacctggctgtcctgaaacttcctctgtcaaccaggctgggcttcaactcagagatccacctgcctctgcttcctgagtgctgggattaaaggcgtgtactaccaccaccaccaaagctatggcctcagttttgaaaacccactgattccaatttctgctgctcatatacttgtggttgtggggccatccatcatgagtgcatgcccaccctgtttgttgaggtggagtccctcactggcttggaattctctgagtagtctaggctggctggctgagagagcttcctgtccctgccccctcccccctgctgtgatttcaggtgacactctatctagctctcttatgtgcattccagagatgagtccagtcacccaagaatccatctggggccagttcctctcagagtttcaggatgtggctttagtcatgtctggtgggagaaggcgtccctctttcattctcttcaaagtagacagacttggcaagaagtgtctcttcctctgtcccaggggctggagctggggatcgtgtcatgggggatgtgctactgtggcagcagagtgccagatagagtcagccttcatccggggtttgacggtatacattccttatcagtcccaactcttaagaggtggagccagaaagcttaggagttcaaggctagcctctgcagcactggttatatgggaccttgggtcaaagagaaggaatgacacaaaatgaaacaaagcccttcaaaatgcagaagacaaaatatttatttggctcattgttttagcccatggtttcttggtcttggtgctttgggcctgggatgaggctaattgttgtggaaggttgctgccttgtgtctgctcctccctcagggtaggggtagtcaggcccattgtacaccagactagaggaagagaagcacagtggggcagggggtgcaggcagggtcttggtccacagtgagtggtgagtatgtagggaaggaacacacaccctggaacagcttggagaactcattcagtttattggaggtgggggcagcaaaggctatttaaacctttgcggggtgagtagggactattggagtgagtgtacatcactggtgggggggccagcgtgctcaatgggggggccatgcctcaatcccatgagggggaatttcaggtgctgctggacatgatattttaaggggagaggaagtttaacttggctacatggcctcctctggtgaggcaaagatgggagcacagggctacctgtgcaaggacatgcatgcctgggacagtgggggagcaagcctactcctgcccttctcaggaggggatttccagatttccaaggtgtggacgcaccttgacccgactcttgctctaggcctgcttctccctgttccatggttccacggccccacagacttctatggtgggaagggtttggcagggaagaacttcacctcacagcagtctgaaaacaggggaccaggaggagctggagatggggctacagatctaagagacgcccactggcctatttccttcaatcaggtcgcatcctgtagatgagtcagccattgtgtcagctgctttcacatcactgatggaagccctgaaaaacagcccaagcgaggaaagcatattggttcaggtttcactccatcatgccaggcagaaaatccatccctggcagcaggagtagagggtgaggctgctcacatggtggtagaccaggaggcagccagctgggccagagctaggggctgaactaaaactttcaaaggctttcccctagtaatctacataatgattcctaaatattccacagtggattgcattgtcgccatcgtctggagaacaaccttaaaacacgggagctggaatccaaacctgtaacaggcctaggcttggattccatcaataaattaacctattagtataggaacgggcggggggggacgtgggggggtgaactgacccttcagtacagagacagacagccgaaccgacccctcagtgcagggacaggcgaatggcccagctgcattttaagtatgtcaccagctgcagactacacttcacatgtcagccttttgggttcatacacaagtagattaatcaaacttcaccattcctagtgctgtggaggcacacaatcgggggctctgtcagcaaggagagagattgtgagagctgcttactcggtgctcttggttcacatttaggatctttggatgcctgcacctctgttttaggtggtgatggtgttgccattggcttttgtttgtttgttttgttttgttgagatagagcttgctgtatagcccaggctagcctccatccacctcataggcttgtgctagagctcattttccaaagaaagccactgaagtgcgatctgggctttagtttttacgtttacacagtctgggacttagtgtatttattcgtttctgtttgttgttgttcggttggtttttgtctccccccccccccttcggtggtggttgttttttgtttgtttgtttggttggttggttggttggtttttcgagacagggtttggcggttgttttttttgtttttttttaagacagatgttctctgtgtagccctggctgtcctggaattctctgtagatcaggttggtcactgacagagatccacctgcctctgcctcttgagagctggggttaaagatttatttatttatttattctatgtatatgtatgtatgtatgtatgtatgtatgtattttatgtacctgtacagatggttgtgagccatcatgtagttgctagaaattgaacttaggacctctgcttgctccagctctgcttgccctggcccaaagatttgtttataattataaataaatacactgtagctgtcttcagacacaccagaagagggagtcagatggttgtgagccactatgtggttgctgggatttgaactcaggaccttcggaagagcagtcagcgctcttactcactgagccatctcaccaggcctttctcttttttctttttcttttctttttttggtttttcgagacagggtttctctgtgtagtcctggctgtactggaactcactttgtagaccaggctggccttgaactcagaaatccgcctgcctctgcctcccaagtgctgggattaaaggcctgcaccaccacgctcagctcttttctcttttttcttagagaacaattcttttccaacatcagacttttcaccagccaacctatatccaaattctagtaggagtgaaatagtgcctctaggtttccaggaactgctcattccacctagacttcctgtcaggtagtggtgagggtgagataaaggcacatttgaacaagtctcttggaaggctcaccaacttctgaagaagtcactgtcttaggaagggccttggagatgagctgtagcaaagttaaggaaaggagtcctgattgaaagaggaaggtgtggggaccgggagacaggatctcattcaggccatgagcaataattgccagcaccaaggggacactctcagagatcccagtacccggaaagctgaggtgattctgaggccagcctgggccacagtgagaccccatgtcaaaaaaaaaaaaaaagcactcatgtgtgtttgtccaactggcagacaaaggcatgaagagcgggttagcctaaactttatatccccaaatttattgttcagtatcattctttttttgtttttaagatgttttgttttgttttgttttgtttttggttctttttgaggcaggttttctctgtataacagccttgattctccaggaactcactcagtagaccaggctggccttgaagtcacagagatctatctgcctctgcctcccgagtgctggaattaaaggagtgtgcctctggtggtacctggtaagatttatctttattgtttaaatgcagtgtatttgtgttggatgcatctgtttaaggggatgtacacatgagtactggtgtccattagaggctagaggtattgaatcctcctagagctagagtcacagtgttggggtctggggagagtgcaccaaatgttggggtttgggaattaccacacaaaccatacctacaccaatctcagttaagcaagaatagtttatcgaacacactccataatactggacgtccaggtccacaagaaggaaacacctaattgtggcagcagtctgtcctcagagcaagctttttatagggaaaaccaggttcaaaagttcgaaggcaagcagtgaagccatacaatgtatttgcctgactagacaaagtatcatcatgaagcggtacaatgtatttgtctaacgtgacaaagtatcgtcagctcacctttccgctgattggtcctgagtgaggtaagaaaggtggaggacaggtgcagagcagggggatttcagagcactgaggtaacagggaacaagtgattcaaccgtaacttcttggcttattagtaacaatctttagtgtcagctatggataattacttctgggaagtggagtctgagaacctaaacttaatttcatcttatgagcaaaacggagactgaatacaaactggctgtacttatgctaaaaggagcaagctcaagaacaggcaccagacatgggtggtaggatgtaaaagtaactttttattctccacatctgagacttattgcttctgtctgctaacctacgcctagtcctggaagcttctagtccatatgatcttatctatgccttgaatgttttcaacttctgagacttgctgctataataggctcactctgtcctggctctttctgagctctggctatctggttcaactcagctgttctggctcaaactcttctccaagatgactgcttccctctggcttctctctcataccctttcctgaactgctctgcttggcctcaaactaactctggcaatctgttctaatcttctggctccttctcattctctgacttattctgtctttacatatgtgtagctttttctctctttgtaagctgtgtctatacaactctcctcctcctctcctcctcttcctcctcctctttctcctcctcctcctcctcctcctcctcctcctcctcctccttcttcttctctctctctctctctctctctctctctctctctctctctctctcactcctctcttaaatagcctccctttcctctctcttctagtgagagttggacatatcttcttcacatctgatttgtcactttgctgccactcagacatcactttcaaatatggctgcttccttctatgaactaactttaccttcattgtttggcattaaaaatgtgtgggctggtgagatggctcagtgggtaagagcacctgactgctcttcccgaaggtccggagttcaaatccccagcaaccacatggtggctcacaaccacccataattagatctgatgccctcttctggtgcgtctcaagacagctacagtgtacttacatataataaataaataaatcttaaaaaaaaatgtgtactaagggtatgtctgtattctagacagagggattaaaggtgtgtgctaaggctgagccataccacaaccagtaacagggtttttcatcaaacaacacaatctcagggttcacagtatgaacagatatcctgcaccagtaggaaccgaacttgggccctatggtggtttgaatatgcttgtcccggggaatggtacactattataaggtatggcaatgttggagtaggtatggccttgttgagaccgtgtgtcactgtgagggtgtgctttgaggctcctatgtttaatctccaagcctatgtggagtgaccctcctcctggctgcttgcaaaggagaatacccttctggctgcctttaggtcaaaatgtagagaactctcgactcttccagcttcacttctgcctgcatgctgccatattttctgccatgatgataatggactatacccctgaaactgtaagccagccccaattaaatgttttcctttataagagttgtcttggtcatggtgtctcttcatggcaatggaaaccctaagacagaagttggtaccaggagttgggtattgatgtgataggcctatccacatttttgtttgaaggaatatggattttagaactttggattattaaagcaatggagtgctttactgggacttaatggcccaaattagtagaagcatggaagacagtggtcctaagggtaattggaactgtgtgaccttggctcaagagttttcagaggagaagaattttagaatatggtctatattatgtagaattagaattctagattagaattttagatagttcttgtgatattttggggaagaccttgtctgtggctgttttttgcctttgtcagaagaatctgcctgaggctatgataaagggatttagattaattgcattgacaaaagaagtctcaaaaaaggctagtttagactttactcctgtggttcattcttttttttttttttaaataagcattattattttttgatttatttatttattaatatgtaagtacactgtagctgacttcagacactctagaaaagggcatcagatctcgttatggatggttgtgagccaccatatggttgctgagatttgaactcataacctttggaagagtagttagtgctcttacctgctgagccatcacaccagcccactgtggttcattcttatgaagagcattttgatcaagtgtaacaagcttagaaagaaaaaaaatatgaaatacatggtttgaatattgaagggataccaggaaatggaatggagctaaatcctgcatttaaggatgttaaatggaattaagggaatgatgacttcaggggaagatcccacccggctaagcttatcatttaatgtgtttgcagttgaaccagagagagttatatcatgttaggcattactatgacctggttattcctttcatttgaacagaaggagatacaattattgacaatgaatggattgtgaccgctattctcagttgtcaacttttactatatctggaatgaactacaatctagaacttattaaagatcttgtgaaaaggtaaagaaaatcttagacccaggcatggtggtacacttctgtcttaattagggttttactgctgtgaacagataccatgaccaaggcaactcttataaggacaacatttaataggggctagcttacaggttcagaggttcaggccattatcatcaaggcgggaacatccaagcaggcatggtgcaagaggagatgagagttctacatcttcatcatcttcatctgaaggctgctaaaagaagactgacttccaggcagctaggactagggtattaaaggccacacctacagtgacacacctactccaacaaggccacaccttctaatagttccattccctggtccaagcatatacaaaccatcacaacgcctttaattctaggagacagaggcaagcaaatctctgagttcaagtccagcctggtatagagcaaactctagataatgaaaagctagagtccaggcatgttgatacacacctttaatcccagaactcaggagacagagacatacagagttcaaggtcagcctggtctacagagcaaggtctacaactgccaaacttaggcagtaaagaagagcatggaaaacagaaagctggtgatgatgtaatagaacaagggggccatgttccagccccagcaagcagcagaattcagcagcctcagccttatagctctggctttaaagtcaagaatagaaaggagtttccttggacaattgatgctgcttagaaattagctaagtgccgggcgtggtggtgcacgcttttaatccctgtttcgaaaaaccccccacgaaaaaaaaaaaaaaaaaaaaaaaaagtaattagctaagaaattagcagcgattaagaagcgacagcgtgcatggaggtgaaatcttctggaaggtgctttctgagagcacaaagaagctgtgttccagagactgacatcatgatggcagccaaacttgataacatgtaagaatcaggtggtactgggtttgaaggcatcatggagagcagctgaggcctggcactgtgagaggctaggaaagtcctttggttaagttgcagcctcagttgcagctgacgctccaagaccgaaggggtctcataaaaaaaaaattgaggcttggcatctataagatgctattggtaaagcctggttgcaacagaagaccccaccatattgaggataccagtaccatgggttgatcaccaagaatatcagcagcagtggagtggagtcaaccagagtctagagagctacagaaggcagagctggaaatgtgaccgaggctatttgaaggggcccagaagatcatgtgcagattctagctattggaacaagaagctgtgaagttgaagttgccttggagactccaatatgttagagagagcagaatcatgggatgcctgctgaggaaagctgctaacagggagtggaaacagatcaagagaaagaatgtgttgaagtcaacacagctgataggggttggacatcagatatggaggtgcagagtttagagtttgcccacctgttttttggtcttagtttggttcagtattttttcactatgtcattttggaatggtaatgtattgttgtggtattgaaagtatacaatctgccttttgattttggttttgattttataagggcttatagttaagagatggcatgaatcccggaagagactttgaacttgaacttttaaacattgttgagactgtgatagactatgaagacttttgaagttggactaaatgtattttgcattatgctatggctgggtatggcccctatagtctcatgtgcttgaacaagcctatgggggccaggaatggaatatgatgatttgaggagcctctccctggcaacctgaaaaagaatccttctggctgccttcaggtctagatgtagaactctccactcttctacatctgcctgcatattgccatgcttcctgccatgatgataatggactgaacctctgaaactgtaagccggtccccaattaaatgttgtcctttataagagataccttggtcatggtccttgctcttcacagcaatggaaaccctaaggcaggtccactgcaaagcagtgcattttcttctctgttaaattatctctctggctcccagtatgagtttcgatgcatgtaagtaagagtgtgatacacaagagcattgaagttgccaattccaattaatctcttctctaattgacccagtgacagctacgagttccccaatgttctggcacacacacagccttatattttaatatgacttaaacagcttaatggctgagccactcccaagcctccacatggctaacacctgccctctaatattatattcctgagttattacttactaaaatctacattccatcatagttgccctcagcccagttggggcctccctggggcctctcttcctcagctcttacatgttggctgtctgtcctgccttcctcagctcttacatgtcggctgtctgtccgtcccaccttctcaggcatggtagctactcctttcccagcacggcagataccctcttcctcctccctcggtcccttgcctgagagtcctaaagtcccacctctgtctccctgcccagtcactggctgctggaaactttatttaccaatcaaaaccaactgcgggcagggtccctcagtatcttatgtgcagatgtgcagattctcctgtagttttggtgaccaaattaacacaggtagcattagaccaaatccacaacacaagacagctcaaagtgatgatggtattaagaatgtggttggttctgacaataaagtcagaaaaagaaaaaaaaaaaggaagttttataaaaaagaaaaaggggacatggggtggagtgtgggagctggaaagatgattcatcatttaagaggactggctgcttttccagaggacctaagttcaattcccagcaaccacatgatggctcacaaccctctatactgggatctgatgccctcttctgtcctgcaggcatagatgcaaatacagcactaacatgtataaatgaataaatcttgaaaaaaaatttggaggagatggcttggttgctaagttgctagatgcacaagcatatgagttccatccccagaaccaagtaagcaaaactgagcctggaggctcgagagatggcttggtgtttaaaacatgggaccgccgggcgtggtggcgcacgcctttaatcccaacactcgggaggcagaggcaggcggatttctgagttcgaggccagcctggtctacaaagtgagttccaggacagccagggctatacagagaaaccctgtctcgaaaaaccaaaaacaaaaaaaaaccccaaaaaaacatgggaccaagttcagtcttagcaccacaccaagtgccgcacaactgcctatcactcgagctcccagagatcttatgcccttttctgccttcacacacacacacacacacacacacacacacacacagagagagagagagagagagagagagagagagagagagagagagagatacaaacatacagacacacagatgtacaagacacacacacacacagaattaattaagcaaccagaaaaacatacacatacttatacacacatgcatacactcatgcacatatgctcagaattagaaccatctataatgggatctgatgcacacacacacacacacacacacacacatgcacagagagaatcagtgaaagcaaccagaaacttaagggaaaaagaaatgatgaaatcccaaatcatagaacctacgggttttccagccctgaccctgacaggccagcagaggcccctgcctttcccttccctgagaaggagatcctaccagggaaagatacctaaaggatgctgcctgtcctcgaggctcgaggttcgtcctcccctggcctcattccccaagcattacacaggatcccaaggtgaaataaaggccctgggctctgacctggagcactgagccctctgagtcctgatatggagacccttactgcctgctcaggggcagctcatgatggctggctgcagggaccctggatgccaaactcaaccaggaaaaatgctttgtgagtttattttttgtttgaaacagggtctcactatgtagccctccccaccctggaacttgctatgtagaccaggacaattttattttattttatttatttttttaccagaacaattttaaacccacagagatctacctgcctctgcctctccagggctgggatcacagacacgcaccaccaccacagcagtggtattttacagaaacagaaacttcatagatcagtttttctgttgtggaatattagcaactggaaaatagaattccaagagcctcagtatacagacaaatgcccagcaacaagccaataggcagagctgggtcaaatcctggttgttctattgctgtgataaacagcatgactaaaaacatcgtgggaaggaaaaggatcatttcatgcagtctaccctgagggaagtcagggcaggaactcaaggcaggaactggagtagaggttggggggtggggggaagcagggagatggctgctgcttactggcttgctctgcatagcttgctcagtctgctttcttctggaacccagtctcccttgttcaggggtagcaccacccacaggaggatgggccattccagaacaatctttaatcaagaaagtgccctactgggaggatggacagaataaaagagatgaaattctctgcagcagggggatcagcctagcaaggactgaacactgacagctccctagatgctctttattgttacctaaaaggcaccttatcaagtcaatttccacataccaaaacttcttatctgatctcccggttgtcttgaaagacccgccacctaagcaattctcagtcactccacacttcctggtttgtcaggcatgcccctagactaagttatgcaaaggctctgagaatagttcaaaagaacaaccttataaagtcccagatgataattaccaacaaaaggctacttcaaagcttacacgcgccatcactccagattcatgtgcaatacgagaattctaaaatcctgtcacagatatgcctacagtctaaaggaggtattttctcaattgaggttcctttttccagaaaactctagcctgtgtcaagttgatacaaaactaaccaggccccaaggctgctaggcatttggagaaggcaaaccccttcgtctgtgacagttgtgacaatgtgacagtgcagatagctcttggacacaggcttccctccctgtccatttacccagtagctggattgctggatcaaatggttctgtttgcttttcgtggttttggttttggacaatgtcacacgtggtttctcgtatctcacatgaatctggagtgatggcgcgtgtaagctttgaagtagcctttcgttggtaattatcatctgggactttataaggttgttcttttgaactattctcagagcctttgcataacttagtctggggacatgcctgacaagccaggaagtgtggggtgactgagaattgcctaggtgatggctctttcatgactgtactggaactttccatgtaagctaggccaggctggctttgaacgccccccccccttcttctccagtgctggggttgcaggtgtgtgccgctgtgcctgactctcatttcatatcatttcagcgttatgatatcccaagacctttcaaacgatacttctctttttctctagggattaaaccctctcatgtgatgcacattgtctgccatggagctacttcccagcccggtttctagcattttgaggaacctttgtactgttttccataatggttatactaatttgcattctcaccaagaatgtctgagtgttcccttctcctcctcctctcaagcacttcttgttgctgttagctttgctttttgaagcacagggtctcaatttatagcccaggctggcctcaaacctgtgggtttcctgcctcagcctcttgggtgataggattaaacatacaagccaccaaacctaactcctggttttctttgctagtttctttatttttttgagatagggtttttctgtgttacatccttttctgtgttacatactttctgtgtagaccatgctggcctcaaactcacagagatcctcctgcctctacctcccggaattgctgggatagaaggcatgcaccattacacccagcttctaattccatattttaaaaggttttatttttttgtatatgtgtgtgtgtctgtgtgcaggtatgtatatgcacgtaagtggaggcaaagatcaaccttgtgttagacggggtctctcactaggccctggacctggctgttgagtgagccccagggactcccctgcagtcagctccccagaactgagattatgagcaacaccagtgctcccagatgttttgtgactttggttgcatgagcccacatacctgcgtccttttgagaaatgtctactcacaagagcctctcattctttagcttgttttctactgttttattgtttgaatatctggtctacctatcttttctatctgatgggtagtttgccccccccctttttttgtctcactttgtaacccaggcttccctgaatctaccaggctggcctcaaactcttgatcctcctatctcagtctcttaatgctggattacaaatatatcccaccataccctatatatatattttttcactttctttgttctaaacattgcacatggggactgtaaaggctaatcccatttgcccaaggacaggtaactccctgggctgctgttcacgtcagataacaaggcctgtgttttcccttcagtacacaagcttggttgcccatgctgcacaggaagaccttgatcgccagtaggcagaagacacatgggcaggaagtagtacatcaggatgtatggaagcagaaagtaccagagcctgtgggtttgacctttgtaggcacccgtctgacctaattgggggccaatcttcatggatcctgggtatggatctggccagggtccattgtcctagccagtattacataaagcttgctttaataggtcagttgtcgatttggtctttctcttagaaattttcagctttaacactccctgcatgctagcatgtgcacagggacgcagctgctggggttgtttctcactttctcctgcagcttgcagttggagtggagacatgtcactggcttgttcatgctgacttagcgcctgctacatgatgccattcatttaccaatcctaacatttttggtggagtctttttggtttttctagagacagccatttgcaagcaaaatatacttcctctttccctatggggtgccccctttttttttctcttgcctaactggtctggctagaacacccagtgctatgctgagttaaggtggtggagttggcaacttcttatgccagagctccgagctctcctctcctcttgtcctcatttttgaagctagctgtgggtttgacttgtgtggcgtttactgtgtcaaagaaccagaccttcttcacacggttctcttttatctgagtgtaagacctcgaccccgaccttcagtcagtggtccttacttcgagatgcccctgtgtgagacacagagatgcagatcgatgtgaaagcaagaggtttatttccttggcatgtcgggtcgaccttcaattagcccctcaaggtgagttactaagaaggcgaccgagaatggctattacaagcagtttgtatactttttaggggcacaggttacatcagcaacgttacagttcaaacttattggccaagtgtattgacctttcagtctattggctagcaagcatgacacacatttgaactctacctgggactttccagagggtcaggtaactatcagtcagaaatttttactcaagaatgctcctgtgggtggagaatgaaacttggcctagccttgactccgggcaggagggggaagctacaaggagggtgtgggactagaaaacctcttagtgtccctcatgagtacggtcttttgaagtgaccatattattgttcttcaagtagttactgtgctgtttctcatttgttgatttgtggaagccacttcatccttgggcaaatcccacctggtctggagtgtggtccatcgggaatgaacctttttgtgcatcattgtctggtttgggtatcggggtgatgctgatctcactgaatggattcggaatcccttccccttaggtttttggttttgttttgtttttttggatgttagaagacttgacatttgctcctggaaccttctaggctggcctaggaggttaaaaaaaaaaaagctcctgctgtcagtctgaggacctgggctggagcatcaagacctaaaggaggagagagctcaccacacagcattctccaatgccctgcacacggcactgtgcgtcaccaccagcattgctggtgcacacacaattaagttgaattaagaatgaactgggggcgtggtggcacacacctttaatcccagcacttggatgtagaggcaggtggatnnnnnnnnnnnnnnnnnnnnnnnnnnnnnnnnnnnnnnnnnnnnnnnnnnnnnnnnnnnnnnnnnnnnnnnnnnnnnnnnnnnnnnnnnnnnnnnnnnnnnnnnnnnnnnnnnnnnnnnnnnnnnnnnnnnnnnnnnnnnnnnnnnnnnnnnnnnnnnnnnnnnnnnnnnnnnnnnnnnnnnnnnnnnnnnnnnnnnnnnnnnnnnnnnnnnnnnnnnnnnnnnnnnnnnnnnnnnnnnnnnnnnnnnnnnnnnnnnnnnnnnnnnnnnnnnnnnnnnnnnnnnnnnnnnnnnnnnnnnnnnnnnnnnnnnnnnnnnnnnnnnnnnnnnnnnnnnnnnnnnnnnnnnnnnnnnnnnnnnnnnnnnnnnnnnnnnnnnnnnnnnnnnnnnnnnnnnnnnnnnnnnnnnnnnnnnnnnnnnnnnnnnnnnnnnnnnnnnnnnnnnnnnnnnnnnnnnnnnnnnnnnnnnnnnnnnnnnnnnnnnnnnnnnnnnnnnnnnnnnnnnnnnnnnnnnnnnnnnnnnnnnnnnnnnnnnnnnnnnnnnnnnnnnnnnnnnnnnnnnnnnnnnnnnnnnnnnnnnnnnnnnnnnnnnnnnnnnnnnnnnnnnnnnnnnnnnnnnnnnnnnnnnnnnnnnnnnnnnnnnnnnnnnnnnnnnnnnnnnnnnnnnnnnnnnnnnnnnnnnnnnnnnnnnnnnnnnnnnnnnnnnnnnnnnnnnnnnnnnnnnnnnnnnnnnnnnnnnnnnnnnnnnnnnnnnnnnnnnnnnnnnnnnnnnnnnnnnnnnnnnnnnnnnnnnnnnnnnnnnnnnnnnnnnnnnnnnnnnnnnnnnnnnnnnnnnnnnnnnnnnnnnnnnnnnnnnnnnnnnnnnnnnnnnnnnnnnnnnnnnnnnnnnnnnnnnnnnnnnnnnnnnnnnnnnnnnnnnnnnnnnnnnnnnnnnnnnnnnnnnnnnnnnnnnnnnnnnnnnnnnnnnnnnnnnnnnnnnnnnnnnnnnnnnnnnnnnnnnnnnnnnnnnnnnnnnnnnnnnnnnnnnnnnnnnnnnnnnnnnnnnnnnnnnnnnnnnnnnnnnnnnnnnnnnnnnnnnnnnnnnnnnnnnnnnnnnnnnnnnnnnnnnnnnnnnnnnntcctccttcttcctcttccccttccccttcccctttccctcctcctcctccttctccatcctagttaaattgtcctccagcttcagtttgagtctgtttgagtagataaagagtgtccacttccatccacactaacatcatggaagcccatgtataggacacaaactgcccttataccagcactttgctttgtttagatagggttttatatatcccaggttagcctctaacttactatgtaaccaaggatgactgtaaacttcaccatctctgtgtcacttgaccctcaccttgtcaatgccaggcagagattgtccttatcttttctgtgattaaaccttggacccaagctaggtctggccacccacccttaataagtcaaagaagggctggtgagatggctcagtgggtaagagcacccgactgcccttccgaaggaaggtccagagttcaaatcccagcaaccacatggtggctcacaaccatctgtaacaagatctgactccctcttctggtgtgtctgaagacagctacagtgtacttacatatagtaataaataaatctttaaaaaaaaataagtcaaagaaaaaaatcaaatttataacacattgacccaaaagccacagctctcatcctgaagggaatgagagagtttattctggagccattctgtgtgactttggctggaacacagatttagataaacccaaattctttgttctaacatggaagcactttcatgaagttttatagttttacagaacaaagaaagtcatacatccaggcaagtttaaaatgcatggatgggaacatcaggaaggcaggtatagcaagattcgggaagccactatactatctgatgacattcttagctttgggttagtggaagctagttaatatatcccaaaggtttctattagtcacaggatgttagttccaacgcaggcgggtaaggtgtgactgttcctgagagcgagaacttgcccaaggtgaggtagttagcctctggatctgcaacattccaacctcttccacagtactgcagtttgatcaatcagactctacagacagcttctttccagaagttctcattcacaagcagagcacagaaaaggagatttattcaatatggctactttggaaaggatgacagagagatccagtgtgtccctcaaatctgtctttggggtcctgaagtaagatcgatgtttaaatagtgggccaaagacgtgcacgtctaagcagttggggtcaaggtatggttccgcccaccaccatcactgttaggattcagtcttacttgtaagtgattggatgagcagttagaactgtgtggaatccctttcggggagacaagtttcccctgtccttaccttctctcaaaatgagactcctggcaaaattggctgtcctggaactcactctgtagagttccaggacaaactcagaaatctgcctcaaactcagaaatctgcctatctctgcctcccaagtgctgagactaaaggcacgcgccaccactacccggcctaaaaaaaagattttttgcctggcgtaggaggtgggacatggtaagtagcatggtcaatgggtcaaatgtgcatctggaatgaacaggcaaaatcgaggtatcaggatgcatggaatctcactggtcttgatgtgacctgtgatgcagagaagcttgaagtaataaaactgatgctatagagagtctactaacaaacttgcttaggaaatattaagttacacaaaataaaatttagctgaaggagctctgtgtccaatacagctggagtcaagctgtacactaagcaagcttgtcagaaattgtagggacaaagccaggcgtggggacatgtgcatttaatcccagcgcgtgggggcagaagcaggtggacctctgtgagtgtaaggctagcctggtctacattgacttaaggctagcctggtctacattgacgctctagaacagccagagctgcagagtgagactgtctcaagagacgaacaaaaaccccaaacaaaagaaattgtagataccaaaattttggatcatgactgaagtttagagttgctgagaaagtttctgctaaggtttgcttgcggggactgaactcattgtcataacaaaaggagacaatctccgtttaaaaccgttaggctctcggatttctgagttcgaggccagcctgggctacacagagaaaccctgtctcgaaaaacaaaaaacaaaacgaaacaaaacaaagaaacccattaggggggctggtgagatggctcagtgggtaagagcacccgactgctcttctgaaggtccggagttcaaatcccagcacccacatggtggctcacaaccatccgtcacgagatctgactccctcttctggagtgtttgaagacagctacagtgtacttacatataatgaataaataagtcttgaaaaaaaaaaagaaaaaagaaacccattaggctcatccccatatcaagtctgcgttaagctccctgtgctcttataaggagaaacattctcttataaaaaataaaataaaataaagtctgcctttgggcagggtgatcctaggcaacagctatttaaaggaacaacactggtatgtttgagaaataatctgccaggtggcagtggcgcatgcctttaattccagcagttgggaagcagaggcagggggatagctcagtctaaggccagcctggtctccaggatgagttccaggatggccagagctacatagagaaagcctacctaaaaaaacaaaacaaaacaaacaaacaaacaaacaaacaaaccaggcaaacaaacaaacaaaaacaaagaacaaaaaaggaaccgtggcaatatttctgttgtgtaaatctcccatctgcccaagtggccagacttagtcccctgtgtctgtgcattctcatgtggaatgcatatgcctgcatggtatataagttagccagctcttctaactaagaggagttggtgtcttctctttgggcatcagccagagccggtgcccagtttctccttttttccctgagtgtgtggagtgaatttccatggagcaaggaggcatagtttcctgtgataggttatttttccactgctcgtgaaatgagccagtttaagccagataatataatataatataatataatataatataatataatataatataatatgagggcatcagatgcccactacagatggttgtgagccatcatgtggttgctgggaattgaactcagggcctctggaaaagcagtcagtgctcttaactgctgtgccatctctccagcccccagattagattatattaaaggcaggtttattgggaaaccatactcaggcgagttcactggtctcttgtctgaggtccaaagccaaacaccctgtgttatcttggagatcccagtaagattccttccacgccagccccttgtgctgttggaaaggatgcccggccagcctgagaggaggaatccgaggaaggcaaatgaagagtgctcccgggtggtgctcccgggtggtgctcctggtgcttcctctgaatggatttctgtattgctaaaggacagtctaaactctgaggcaaggggaaaagaaaaagaaacaaagaacctgcaggttaaggtaagttaccaagactggtccccagttctcaatcagatcccagcctgtggggtaagagggctcttctcaagtcctcagggaacttcctagtaaagctaacgttggggtaggactgtctgcccacccaggacccaggatcctttctcgggagactttttctacactttaggaaaacaatggaagggtctgttgaaatcgtttcgtgactctgtagtgaatgtggtgtttgtgtgtcttctgtctaggatgtttagaaagaacctcctctggggaaactcagcagcaggtcagctggattgagcagggtgaactggatcgcaaactcacttttcctactgaagcctgcctcatctgtgcctcagggccaagctgctggcccatagatctcttttgatgcaggaggtttaattaagacctaggccctcattcataggatgaaggagtttcagctcttgctcagaacaagacaatggctctggtagctctaaaaagaatgagtgagcgatgtagccccgtccactgagccctgcgtgataaggtcccggcatgagtgggacagctgtggtggctgtggtgaaggggcaacatgaaccccatttgtctgatttcacaaaaggccacaaggcaccagcttcaggaagagaccgtaagtcccagaaactaagtcataaggcaccaggaacaaactctaggaacagaccatacagaacaagatcataaaaccctctcctgggaacagcctgggggtaaccgcaaggatggggaaatagcttatctcaggatgggccagctgtgctgggctgccctatttcatcacatggttgaacattcatgacacaggaatgcagaccactgaccacctatgactccccacccccagcaaccgccaatgaaatgttagattacttaatgcttctagagagttctcctggttccctataagaaggcctgtgtgcctttgtctggggtcgccattttagagaatggttgatcttgcatgctggatgtttctgcagagtaaacgctctttgtttttgcaaactatctgagtctggggtctcccttcagtgattttcttacccttacagtgggagccccaggagcaggagctgtgcttttgggagaagcacagcatcctctccccttctcaccaaggagactcgaggcatctcagcagcctcaccagccagggaagccaggcctctacctgaggagccggagtccatggccagtttttctgtgcggaagaaccactgagatgtgggtgaattttagcagagcccgtgtatctggcatggattccggagtgctggcacccaggcttggaagtagcctttgtcagtgattattctctgagatttcgtgggtttgttctcttgaaggattctcagagcctttgcatatcttagtctcaagagaggcctggcaagccaggaagtctcggatgactgagaattgcttagatgatggttctttcaagacaaccccgacatcatataagaggttttggtgccgggcatggtagcacacacctttaatcccagcacttgggaggcagaggcaggcagatttctgagttcaaggccagcctggtctacaaagtgagttccaggacagccagggctacatggagaaaccctgtcttgaaaaacaaaacaaaacaaaacaaaacaaaacaaaacaaaacaaaagaggttttggtatgtggaaattgatttgctaaaagtgccttttgtgcaaaaagtgtttgggggcgtccttgagggatccccctgctgctgagaagtttaaattcatcctgtagtgtctttctttctttgataaaccatcccaagtaaccagaacactgaacttactggtgtggctcccaaggaaaactggagacagaattgatttgagtccaaagtctgttctctctctgaggtctccaagcctgctcctccagctgagccaggacactccttcgccttacaccgtatggtctgccttggtttctgcacccccaagcctggaggctcctgctcctgttcctacttctcagttatagggacatggacaaacaacgggggcacctgatgatactattttctgagctcccttaagtgccttgggttttgttgtttttctgagaaagggtttctctgtgtagccctggctgccctagactcactctgtagaccaggctggcctcaaaaccagagatccacctacctctgccaagttttgggattaaaggcatgtgccaccattacctggcaggtgtctcttcccccccccccatgtttatcccttacaccttcatgacccagggccagagagagcagggtgtaggaagccaaagagcagcatttattctggactccaatagattcatcatccacggaatgagggcaaatcctgtgctggctggggccctgtggttcatggctccttgcttgcctgtgccttcctcagtctcaaggcagacaggctgtgccagaggtagagatggcacctctggaggtaccagagctaggtggatacatggacccgggtgagcaacatcacctcgggctgccttcctgatggttgcagaaccataacacacagtggctggctgggtggacagttccactaggcactggcagagcccactcaggctcagttcctctggaaaccaagaaagaggagggaggcactggtggggagggggcaccaaacagtgtacgcatcacccatctcccaactcctttttacttgctttgatccagtcccctccatccccagtctctagttggccataccaatatccagataactgatatggaaagcctgctcctcagagagttcactgaggacactgcagcaggcagagcccctagagagcccacagagcaactgcgaagggacaggatcttttctcccacagaattccgcaaggaatcccaggcacagcctggctcacgattcctcagtccatccaggcgggagctcacacaaatggaaaaatggaaaatcaggctctgcctcgttgccatccccggcatccagaggtatggtgtgcacttgaaggagcatcttagctgctttgttacgctttgccagctttttggaagtgtcactgacaatctcaatgaaacgctctacccggcaagtcatggtgaactctttgcgctgagcaggcccagactcctgggtcaccatgtactctggcaaacgccagcctttttgcaccaccagctcctgtttagtacagcagatggaacagggacagcagcttctgcagcaacgacaggagtgtcctcaggcagtgaagagtctaggagagaaaaagaactgctgtcctccagggctggttccagcatgctcccctctttgaggtgtttgagggccacctcagctgccttgtgcttgactgccttcttgctgggggcctgacctgggcagcctgcagcctgtagtactgctggagccctgatcctcttcactcattccctcctctgtccccgcaggtgccactgtgactacagcctccacgcaccccagtacagcctccacgcaccccagtacaccgccgacgagcttgggccagggtcaagcccggagtctctggcaggtgtcttttaaaaatgatttcctatttattgatctctaggttacagatacttattgtaccagccaaaattatgtttttaagttttaaatattgtgcctaagagatccataagacaaaaatgcctctaacctgtgtgccccggcctaaggacagatagttcctgaaatgctggatgctattgttaaattagattagataacaaagcattcatttgtcccctaaacaagtttgtttgacccaactcctccatgtgcttgatcacgtgtaagtgggaggtaggtaggtaggtaggaactacatcaggatatatgcttggccctgattggacctagtgggaagtgtttgcctttgtaagcctctgccaaatgtaacttgtcgacattttctaagaacccagataagaatctagccagatgagatagctcagcgggtaagagaactgactgctcttcagaaggtcctgagttcaagtcccagcaaccacctgtaatgagatctgacgccctcttctggtatgtctgaagtcagctatagtgtacttacatataataaataaatctttgggcccgagcaagcagaggtcctaaattcaatacccaacaaccacatgaaggctcataaccatctgtacagctacagtgtactcacatacattaaataaataaataaatctaaaaaaaaaaaagaatctagccagagaccataattctcgtgtttttttttttttttttttgggggggggggagtttgtttgttttttcgaaacaaggtttctctgtgtagccctggctgtcctggaactcactctgtagaccaggctggcctcgaactcagaaatctgcctgcctctgccccaagtgctgggactaaaggcttgtgccaccaccacctggctgaccctagcatttatataccctcagcaactggcaaaaccacacttctgctagagcacgaggcaaatcatagtcagctgctgcagacagtcccaagcagccccatatcgtatacctggagttaaaatgaaagcatattctgatagtgtttctctgttctttaaagaaactaaaactccagaattctcaaaaaaaatgtcattacagaaaatacttaccaagcttttcagatgttttgcctccatctgcagacacatacacactgactatgaatatgtccatctgtccatccatgtgctcagtcttatagaaaaacagatgcctttttgcatatgggtaatgttggaaaattgccacaagttatttttagtcatgagaaactggctctagacctgggatttgaccttctcacttatgactcaagcatgtttgtctcaaagtttccttcttggtgcctgtcctgagtcagactggtgtctcggttctctgacagggagaaggagaagagcagagcaggccaggaaagaggcatcgtgcacacgagaacagccaagtggtaaactgtgtccagtagacgctcctactgcttatcatggtacaaggatgtctgtactaaatctagctagtaggatgttcatacgtggaaagataagagggacagcgtgcctaaaaatatctctataataacataatatttttcattgaaaaacattttcgggctggtgagatggctcagtgggtaagagcacccgactgctcttccgaaggtccagagttcaaatcccagcaaccacatggtggctcacaacaatctgtaacaagatctgactccctcttctggagtgtctgaagacagctacagtgtacttacatatattaataaaataaatcttaaaaaaaaaaaaagaaaaacattttcaccaggcagtggtggcgcatcccaggcagggaggcagaggcagacagatctctgagttcgagaccagtgtggtctacagagctagtttagggcagccaaagctacacagagaaaccctgtcttgaaaaccaaaaaaaacccaatgtttttttcatacaatatgtgttgatgtttccttcagtctttcccagctcccctcatctttccctctcaaccttatgttcttctctctctcattcctaaaaaagtaaaagtcaaaactgaaaccaataaacatattgttttcatgaccccatgtgcgtgcacacacacatcaaaagaccccaaaaaattagacaaaaattccaaaataaagaaacaaaaagtctattaaaataccattgaggtgtttttgtgttagccaactgttcctggccatggggcctgccgtgaagtgtgcttagtaggtccactgagattctgatgtgaagtgtgcttagtaggtccactgagattctgatgaagaagcgtggctttcctttggcagtagccatcagctgcagtgccttggttagggttggcagctcttgcccacacccccattcagtgctaggacccggtctgagctgaacctgtgtagggctttcgcgtgttgacacagttcaagtgtgcatctgtcctcttgggtctcagaggccctgtccccttggtgttgtccctcaccccagctcttgcaatccttctaccttctcttctacatcagcagacattattgaggatggagtgctataaccctccagcatcatagctttaacaatgctctctcagctctgtctcttcgatgctgtaaacataagtttaataaagattatgataaataactctatatgctgtgtaagtcataaaggctcccttgggctttctctaaggtttacctggaaacttacaaggtgtaatgtttcatcagtgtgattcactgcactgactaccctatgtgtgtaatttcaattcactcttcctttattaaggcaatgttgcacagtatcttctaagtagaataattgctgcctctagaactccagctgtgcctgtttaaatcatcacagctggacttgacaaatgcttatattctttccaaagaaagaacatagcaagaccatcagccccctcacctggatatccaacctccttcaagctggttgtttgcagttaggccccagttgcataagaccttaaggttttttggagaaacaatggcatgaaggctagaaaacagaatggagaaggcagtctacccatgcagtgactggaaagctgttatatatactgggtacgggccagacctgggatttgaccttctcactatgactcaagtatgtttgtctcaaagtatcagagtgaacataaatattgccatctgggcatgtggtgcatgcctttaataccagcactcaggagcagagatcatggatctgtgagttcaagatcaatttagtataccaagcagatttcaagaccaccaggatgattcagagaatccctgtattgaaagaaaggaggaggatgaaaaagaagaaagaagaagactttcttacaacaaatagtaaatttatttgctaatattgtatctcatgatattaaaactcttttaaattgtccaactaaaggaatttatatgtaaagtttaagatagctggatttttttttcctggactaaaaaagaaaagaaaagaaaaaaagacagaaaaaactttgttatctaaaactccaattacatgtttagctctcttagtgtcaggtccaaaggaaactccatttccccaaactccaaaagctgaacaaatatccaaaaatagccacagcctgaactacagggggatttctaacaattgtataaaagccagcattcctcagaaatgtgtgaagcaggttttcctctactgaaaggagtcactggcagagggaacatggctgcttgtcaggatgtcaaagcccatgctggcctccaggctccctcagtgtcacaagtacctgttacacattccaaggaccatgctggcatcctggctcttctcttctcaccacagctcctaccctgaaagtccccagcttccttttgcccactactcattctccttataacctaactactatgctatgctatgctatcctcttcctctctctctctgtctctctctctctctctctccctccctccctccctccttctctccctctcctatgctccccccccccctgcttgtctcatggccagatcaagtctgctggccatgctccatgttccgtctacttctctctctctctgctctggactgttcctgacgcctctgattgttctctctctctttctctaattgcttccccttaaccaaattgtggagtggctggtcatgtcatcagtgtatatacccattaccccctaaccctgtctgtcctttgttggggtccaggaattgcctcacaaaccacagaaatactggtctcagtcagacagagatagtttattgagcacatgcccagaaccagtaggtcaggatcatggtccagattcgggaactgaatcatgaccccaagttaagatcctacagggtttttagccccaaatccacaacatctgtgccaagttactccaccaatcaggatttagggataggggatttccttaggaacatgtctttgttatatacttatcctgctcccattggttggggtattcaactatggcaggggacttaacttgtctaacatccagttttaaatttgtctaccaggatgggacttattttaacttgacaaccaggatgtcagtcacccatgcacatgtctctttctgctaaatagtgtagtctcccctcccccagcctgaaacctgcttgctcaggggtggagcttcccgctcaatcgttctgccatgcccactgctggaacctgccgctttgctgttcggagccgtgcacgtggtcaccctgctattggattccaagattaattggcgggaattgggccccttcccctgcttcataactgcgtgcagaacagtaaaattgagctttgatcagaatgcctgtcttagctgcatttctttatctcgccacctagctcctcttctcttccaggtttccaaaatgcctttccaggctagaacccaggctgtggtctgctggctggacacaacaaaataggatgtcagattcctgggaggtcttgggaacttaagctctattagaccactactcaaaacggaagtcgtattccaaataatttcttatattggtgcagatgtctctcttatgttgggatctatcccaggagcatttatagagcaaataaataccgtaaaagcttatgcataggtacaggaagtgttgtgtggttggttctggatcaagcttattgtgggtaactatacaaaaaacagttctactggcttctattgtgattggtttccaaggacacagaatataacagaatatgtaatcaatcttggcattagaaagtttcctagtaacagcagaaacatatgagaacattgacttataatggcaggccagccaggtgacagttacctagatcttaacgttttacctaggccttaacattccttctaggccttaatattttacccagcttctaatactccttttttgttgttgttgttttgtttcgagacagggtttctctgtatagccctggctgtcctggaactcactttgtagaccaggctggtctcgaactcagaaatctgcctgcctctgcctcccaagtgctgggattaaaggcgtgcgccaccacgcccggctctaacactcttattaaggaaaaatgctttctcactcaaggttattgctttctctcaaattcttggtgagtagtaatctctctcagggtcagtgagatcattggaaaagaaatcagaggtgatggtgcatggtgcatgtttttaatcctggcgctcaagaggtagaggcaggaggattctgtgagttccaggataacctgtgctacatagggagaccctgtctcaaaaaaaagaaagaaagagagaaagaaagaaagaaagaaagagaacgaaggaaggaaagagagagagagaaaggaagaaagaaagaaagagagagagagagaaagaaagaaagaaagaaagaaagaaaggaaggaaggaaggaagaaagaaaggaagaaaaagagagaaagaaagagagaaagaaacaaacaaaaacaaaaaaaagttccgtatcatagggaactgagcactcaggatgctatttaccatttgataagttgcctctggggtcagaccatttgtagttcagtggcctctacctgagtgttaacgaactgggttaaaacatttcagaatgttcattttgaatgatagacctaggaagatcaaaagaaaatgaagtggaaacttaagggttctttggaaagtcaattgtgtgggatgctgttttgctggggcaaacacatgaagaaacatttagctgaagtggacacaggggaaaggctaaggcagactcatgaagggacgtttaacaagcagacaccagagacaggatgttctgctaaaagcaagcatgtgaaaggacacatgatgaaggattcttccctaacaacaggtatgcattggtctgccttacattgcgtagttgagctgcattgtcaggacttcatagagagaaacacaccaaaaaacttctggtgatgcgctgtggcttcttgctgtttccgcagactaggctggctggaagagtgatgtcagccgggacagacaaatatgctgaggctagacccacggaggacacgtgttgtttggagggaggctgagcttggcttacttacagagttagatgttcaatggcttgctggtcttcactgatcttcacttccctgagagaggcacagctgagaacttctggcgttcctgctggtccctcctgctgacttgtgccaaggctgggggcctggctgtctctgctaagtgtcacctctgtgctaatctgtctgctgaactagatggctagtgtgtttgtgaaatgtttgtgagtggattgagctgccactgcagacctgtgaactgacctgctgatttcccaacaacacagatgggatctgcgccaaagaaccatttgtaaacaggtccacttcccccatatcctttctttcccactacctctggtgggtgttgggctaaagcgtaggttgaaaaaattaaagctatgggaaaaggccctgtcagagtctggccgagcttccaattccagcagctgctcaaagactattgggagctggtgagggtctccctatgcttatgaattctcactgggaaggcatagtaattctagaactgtgtgtttatgtatatgcattttcaaatgtttgtgtgatgcagaactatgccacctcccctgtaataatccattcaataccctcaggggaaaacaaaaaataaaaaccctctgtaactatagtgcactccagttctggctgatgcccaaggaggagccactaacagaagagttcactaactcagggccacgctaggtgtgtgaattccacacacaccccatcatccttaaatctctctcaggtacagccctgagttgtattttgaactttatttatttatttttgagagcttttttttttttttttttttttttttttgtagccctggttttcctagtacgctctctgtagaccaggctagcctagaattcaaagctttacctgcttctgtctcttgagtgctgggattaagtgtgtaccaccactgccctgtgactttaagcaatttaaacagagacaggagactgcaattctgaccgcttgggcagatggaagacttatacagcaaaaatattgtcaggattatttttctttcctggctgtcctggaactagatttatagaccaaactggccttgaatgcagatcctgcctctgcctttaagtgctaggattaaagcatgtgtcacaatacctggctgcaggattatttaagtgcccctgggctgttcctttggagtgcttgctacccaggtccattctacccaccaggcaggattatgcttttcttggtaggagggcaggggacttaaaagattgaccaggacttaatggaggctgtgaccctgtgctgccccccttgagctgccccctagaggactgttctttgaactgggatagttgtattctactttgtgtaccttaatgtttcctaaaggagtttattagtaggtcctctataacatcggttttcctgaatcttgtgcccgtgtatataggttcctgtggagacctggtgttgacggcctctgtcctctcaatcacctccctcccataaggccatcctccccctccccaccccccatacataaggcgtatgtgggcaaagccatcttggagagggtgacaattgaatcaccctgtgagatgggggaccatccagacatctgagtgaaaggcctttcgataggccaagcaggcagtgcaaatcccctgaggctcctgcacttccccaggaacaaagtggaggtctgtggtggttacccttcgttgtcagcttgctgggagatggagtcacctaggaaacaagcctttggacacacaggagagctatccaggtcaggcaaatttctgacctctcctgttgggttatgctaagtagggcaagtgagcatagcggaccagaaccctaagggagggatgcatcataccctgggtgacaggtatagaatgacctgctgcagttggaactcccctgccacagtggactgtgtcatgcatgacctgtgagccagcttggttttgtcaggccattaaaacaaaacaaaacaaaaaacaaaataagaaaaccaggcatgcatgtgcctttaagcccaggattaaaggatagagttgtgtcatgttttagacaaaaagagggaagaagttaggtgacgggctgcagtcggtcattatgacttgagggaagatgaggtcagccaagggaggccagattaggtccaagtgacagaagccggaagctggggataagtggtcagattattatctttgcattttaaaaaacatcatattttatttttaaaaacccagacttactgagaagtctacagcagatgcccagagcctcttcatgtgtttccctactgaatgaaaatgaggacattgtagctatgagggagaaaacagccagaggcgactgcaaaggtccagactggagagggccatgagggaagaagaagagaagagagtggggccaaagagaagggaccaagagagaacacgtggcagaatgactggttctataggaaggagctgggggaggggagccctggaggcccaggggctagagaggtcgggtaggggcttgggtgatcagtgctgggaggagccaggtctctactagggacttgcaatgcagggaaagcccagactgccgccgtccagtttgatatgttattaggcacctcagccttctgttctaagtttctttgggacaaatgcccccactggcctcacttttagctctcacattagtattcttagtgtttttttttttttttttttttttttttttttatttttttttttagttaaaacccttagtgtgtgcctgtgctgtgtgaaccttcaagtgcatgtgtctgccatgtgtatgtacaggccagagaagcgtgctgtaatatcttcttttctctcccccactatatccttgagacagggtctctcactgtacattttgctgtttttttggctaggctgactgaccagaaaaccccctcaacccttctgtctctgtcccacccctagctccgagaggacggccatgtgcacccatgtctgtcattttctgtgtgtactgaggagccaacctctcgggcctttacgctggcacaggaagcacattgtgccatcttctccagccagtattaattaattatctataggaacaatttaagaggaaatgtgccaatactgcgattattcactcctttatactaaaattagtatttccaaaggacaaagatgttccctttcataacccattaacatattggtcaaaatcaggaaggctaataccaattcaatactattttctaccttataatctatattaaaattttgctagttattcagatgatatcctcaacagcttatttgtctgtttatgtagtagtgatgcgattgagctacggcctcgcctgtgggggtaggtactctcctgaggcacttctatgcctgcttgataacagtttttacttcatctaagctatatggcagtcagctgtctctgctttaagacctggaagaatatccatgtccccccttttcctctctgacttgaagagtaccagctgggtgttttgtgaagtgtttttcgcatcgtgtaccatgttggttttttcttttcctttgtatgcgcgagtggtgggtggggtggagtgggtggatgtgcacacgtatgcagacagctagaaggaccacagacttcctgctccattactggcctgctctatgccgggagataaagtctctgactgtaatgagtactgtagtgtgtcagcttgatgggatctagagtcccctagaaaacagcctctggcacacatcttgattaaggtgaggtggaaaggcctaccctggaagcaagcttcaacagttccgttgccttgggtcctgagctgtacaaaaggcagaaggaaggaaggaaggaaggaaggaaggaaggaaggaaggaaggaagagagcaggaaccctgggccttcagcttcctgcctatggattcaaggtgagcagtgctctcaagctccagctgtcaagacccccaccacagtggacccagctgtaagtagggaacagccttttctcccttgggatggtgctttgctttggttggggaatggtgctttggctgggggatggtgttttggttgggggaatggtgctttggctgggggtcatgacaagaaaagtaactgatgctcactcagccagagcttcttccactaacccccctctgtcccctctacctctgtctctctccctttcttaagagatgtgttcttgccaggcagtggtggcgcacgcctttaatcccagcacttgggaggcagaggcaggtggatttctgagttcgaggccagcctggtctacacagtgagttccaggacagccagggctacacagagaaaccctgtctcaaaaaacgagagagagagagagagagagagagagagagagagagagagagagagatgcttttagtccaggttgggctcaagtgaccatgctgctccagccttgaaagtggctaggaccataggtctgagccactgcacctgacacacatgtatgtggaggtcagaggacaacctcaggtgtcattcttcaggtaccatccaccttttgtttgatgcagggtctctcactggcccggagcttgctggagtaggttaggctggcaggtatcagaatgtcttgctgtgcccagggctggggttgtaggcataccctctcactccttgcttggtttttgttgtgttttgtttttaatgcatggattctgaggatgaacttagggcctgatgtttgtaaggcaagcaagctgtcctctgaactcatgcctgacacttcatttgttttctcttctttctttcttgtttttagattcacttttctacttgtttcttttttgagacagggtctcaagtatgtaaccttggctggtctgaatcgagttcactgtgcagaccaagctgatcttaaactcatagatatctgcctgcccagcctcccaagcactgggattaaaggcatgtatcaccatgcctgatctcactttattttaaagtatgtgtctgtgcctatgtgtgcatgtgagcagaggtgcccacagaggccagaggcatcagatcagctgacgctggagttacaggcctccagatagggatgctggggccaaactcaagcacaaagtcttaactgcagaggcatctttccaatcccacttcctatgttttaatggttgacctaatacacagctttgagtccttatggcatttctatcagaggtcgttgatataagtttgtcctattattgttaagtttggatatttggttaaggtggtatctgctagatatttttccaccctaaagttcctagcttccctttttaaaatcagtctgtttaggactggagagatagcttaaagataaaaagtgcctgctgttcttgcacaggaccctgttcagttcccagtgccatatctagcagctcacaacagcctgcgattctgatctcagaggacccgaagcctctctgctcttcgggtgtctgcactggtgtgcacacacctgcatatagacacacactcatcatacacatagcttttgttttgttttgtttttaaagatttgtttgtttactttatgagtacactgtagctgtcttcatgcacaccaaaagagggcatcagatcccgtttcagaaggttgtgagtcaccgtgtggttcctgggaattgaactcaggacctctgaaagagcagtcagtgctcttaactgctgagccatctctccagccccttgttttgttttttgagatagggtttctctgtgtagccctggctgtcctggaacttgcccaaatgcagtggcagctcgttaacttctccttgtgccttgtttagtgtagctaggcttgctgcagggtgttggggaaggaggcagactgctctgggcctggctgatgggtgtggccctgcccccacatctcagtctcctcatggtctccctactgtgagccttgcctcctgatgccagctttctcagccaggccatgtctgtcagagcctggattcactcttttcctctctgctgtccccagagtcaagggtgactgatattcaacagacattgataatgccctcgttcaactccatcagccccagtttgtttgaaatgactattttgccaaacataattttttgccttagtaatttttttctctctaaagttgggtacctttgttatcttcgaacattttcccctatattctacacattttgtaaaaaaaaaaaaatattttatatgtatgagtgttttccttgtatatgtaccaggtgcatgcctggtgccagaggtcagaagagggtcccacctcataggatttataaatggtcttgagctaccacatgtacgctgggaatggaacccgaatcctctgcaagagtagccagtgctcttggtctctgagccatctctccacccctgtattttatccccttattaaaaaaaaaagacaaaaaactgtaaaagatttgttttgtgttgctggtgtgtatgtacatgcacaactggcagatgttagaaaggggcaggcgggctgccgtgtgagctcaagcgactgaaccagggtctgtccaagagcagcaactgcctcactctctaagccttctcaggcctagtcctacagtcttaaaacattttttccatctctaattaacagttgctaattctttgcagctggttgattttctgttgacagtggtataagaaacacacacccaacagtggggtgctatccccccatcttcccatacttccattctatcccttctttcctccccccattcttcactccattctctccctcctttcctcctcccccatctcttttttctttgtttgtttttgttgtgttttgttctgtttttttcgagacttgtttctctgtatagctctggatgttctggaactcactctgtagaccaggctggcctcgaactcagaaatctgcctgcctctgcctcctgagtgctgggataaaaggcgtgtgccaccacgcctggccccatctcttcatctctttcctgtttgctctctctgacccctccccacttcccccacctctactcctggctgccccaccctgctcccccacaccctgccccacccacttcctcccatccccactccttttgctcccctgcctcccacccccattctctctcttctttttgagacagggtctcatgcattacaccatggccttgaagttactatgtagttaagattgacttgaactcttgattctccgacctttccccccaccccccgaccccatgggaggactatagtttcctccatcacccccagtcttccttgttgaaacaatacatggctggagagatgtctctgtggttaagagcactggctgtccttctggaggacccaggtttaatcccaccacaaacatctaaagttccagggacatctgatgccctcttctggcctccttcagccagcaccacgtgcacacagcacacagacattcatgtcagcaggacacccagacatattttaaaaaaacaaaacaacataatcacagagaaataatcagggctgggctggggatatagctgagctggctgagaaggtctgggttccatccccagcaccacttaaactggggtaggtgactgccacccccaaaatgccagagccaaaggcaggagactcaggtcatcctcagatacagattgagcctggaatacacaaaccttatgtaaacaaacaaacaaacaaacaaacaaatgcccccaaatacagaacataaaaatatggaggaaagaaaaccaagagcatttcctgagctttgttttaatcaggaaacttgggatactacgtgaacactgttcctcaagagagatgacttctgctgcgatgcgtgccatgacctatcaggcagttgtgcagagatgctctgaactaacattccgtcagtgcacagtgggatgcggagcctgcacacccagccacagggacaggagtctcagctgctgctgagtatgtcactggttttgttgttgttttattgagacaggatttctctgtagagcccaggctgtcctgggtctcactctgtagaccaggctggctcacacacaaagcacccacatagatctactcccacttacttgggaaagtgctgggattaaaagtgtgtgctgctaggcttaaattttttatttttatttttaaagtttcagcctctatagggctgagatcacagcatgtgctgctatgcctggttgctataggtaacctttcttattatgtgagcctctctgttgactgttggaagaggcaacccagggggtcgaagcaacccccacccatgcttgctgggtgtgtctagaatgccaggcccccatcgctgtcccccaagccatttctagcatgggttacagtatacaagctgtactttgctaaagggacacagagtagcttgcttacttgtgctataaatgaagcaccttactgcaagcctggtattcctgggtggacctactgtgtgcaggatggaaatccgggccatttagtgtttcccaggactctgaagtaaagaatgaccaggcaaacgaatgtgtgtgctgcctgctggcctgtgagctatgccctgcttctgacctggatctatagctagattaactcagtactcgatggctacagtccaagtccagactctgtcagcaacctgctttagtccttttgttgttgttatagaatttgggcttattgagagattttaagatactttaaatttctttcctgttttggagatttaaaaatatagatctgcaggatctagggttaagagaaagaaaagtgttcagaaataaagacacgcctgcgagtgtgggtgtgggcccctcaaaggagagtcaccctgcttctctttctttatcattcacaaagctgtttttacagataaaaaccagttatgaatttttaaaaggaaaagctctgaaacagacatataccataagaatccgtttccttaatcaagtcaggtgacaagttattcagagaaggatcacatagatctccttacttggggcttggggatggctccgtgcggctctgtgaggttccatgcggctcggtgtagagcacttactcaagcagcactgaggccctgggataaatctgcataaaacaccccactcagctaaagactttttgttactttctttcttaaagatttattttatttatatgagtacacggtagcagttttcacacacacccagaagagggcatcagatcccattacagatggttgtgagtcaccatgtggttgctgggaattgaactcagaacctctagaggaacagtcagtgctcttaaccactgagccatctctccagcccatggttaattttttaatataggtctttctagaagttttcttttcttttttttttaatatttatttatttattgtatgtaagtacactgtagctgtcttcagacactccagaagagggcatcagatttcgttagggatggttgtgagtcaccatgtggttgctgggatttgaactcgggaccttcggaagagcagtcggcgctcttaaccactgagccaccatctcaccagccctagaagttttcttttttaaataaatctattattattattattattattattattattattattatgaacaactctgtagaccaggctggcctcgaactcacagagatccacatacctctgcttcctgagtcctgggattaaaggtgtgctccaccacacctggccgttaagtaaatcttaatttattttcatatttgtatatgagtacctgtctgtacctatgtgggttggtgcccttggaggccagaagaggacgttggatcctctggattatggggtggtcgtgagccaccaagctggaactgaacaggtctccttcaagggctccaaacctttcagccatcgctctagctctcctagttctctaagaccatagcatgtgcaatgttagtactagcttaaactgggggccacaggagtgacctcaattccctgtggctctggcagggttcagcagccctaaaaacctttcaggaccacgagcagagttgagaggttttccccggccctgcagctttcttggagctcttcggcaggaagtgcacccacagtctcagggtctcaggttctggccaaacagcttgaggagcaagggagggaaaggaaacggttctcccctccatatcttccactccacccctactccccatcactcatctctgacacttggactccagtgaaaacctaagaattcccgtctggaccccgagcatcctttcatgcctccactgaacccttgggtccccacaagcaactatgggagtaggaatgggtggggcaggatgcaggggtggagtgggtggagccaagacccacttcctttccccctggggctcagtctgccccagtcctgaccaagcctcaggaagaactggaggtacttgccctggccctgtgccttaaccattaatctggtaagagggtatgatcttgctgggtacgggggtggggatgctcagaggatgaaggaatgtacctatagtttgaaaagatgaatagggtgagggggtaagggagtccagagccacgggctggaacaatgaatgaaggccagggggacatggctgctctggagtctgagctgccaaggccagggtgggagtcactggcgccatctgttcccctgttgtctctgataatagtgaaagcaagaatggaaaaacaaaacaaaacaaaaaaaaaacgttaaaccacaagatgggcttggcagttggcagggaagtgggcagaaggagtggggctggccaagtttccctccccaaccgcgttcttctgtaacttccctacattcaggtcccaactcctgctcctgcctgtccctctggagatggccttgcaccttctcctcctctttggggcatgctgggtccaggtggcgagcccagacagtctgcagaggacgacgatgctaccatctaccccacatatcacagctccaagtacctctgaagcccagaatgccagcccatcagtttctgtggggtcagggacagtggactcgaaggagaccatcagcccctgggggcagaccacaatcccagtttctttgacccccttggaaactactgaattgtcttctttggagacttctgctggtgccagcatgagcacccctgtacctgagcctactgcctctcaggaagtttccagcaagacatcagcactgcttccagaaccatcaaatgtagccagtgaccctcctgtcactgcagccaatcctgtgacagacggacctgcagccaatcctgtgacagacggaactgcagcatctacatctatctctaaaggaaccagtgcaccccccaccactgtgacaacaagctctaacgagaccagtggaccctctgtggctacaacagtaagctccaagaccagtggtccccctgtcaccacagctactgggtctctggggccctcgagtgagatgcatggactccctgctaccacagcaaccagttctgtggagagttccagtgtggcccgtggcacctcagtttccagcagaaaaacatccacgacgtctacccaagatcccataaccaccaggtcaccaagccaagaatcaagtggcatgttactggtgcccatgcttattgccttggtggtggttttggccctcgtggcgctactgctgttgtggcgccagaggcaaaagcggaggactggggccctgaccctgagcggaggaggaaaacgaaatggggtggtggatgcctgggctgggccagcccgggttcctgatgaagaggccacaaccacatcaggggcagggggcaacaagggctctgaggtactggagacagaaggctccgggcagagacccacgctcactacgttcttcagcagacggaagtctcgccagggctctttagtactagaagagctgaagcctgggtcgggtcccaacctgaagggggaggaagagccgcttgtgggcagtgaggatgaagctgtggaaaccccaacttctgacggtccacaagccaaagatgaggccgcacctcaatctctatgagcaacaggtattcatccaatctgctccttagccccggatcctgctgttagctgccgcacactctgcatttgtgaatatttgtggaccaaatccgtccatccatccatccatacattcatttccttcccccccaccccccgcaaccccccagccccgctgtctcccacctccccttcctctgtgctttctttggaaccaattgctgaatcaccatgaggatgatcttagtggacccacattttccccgaggatcccccttggaattctgggatcccaacaggccagaaaactccctaggatgaagctgtgaagcccatgcactcacatccttctcagcaggggccccttcaggaatgcctctcaactaccatttgctttggggccagcttagagcctggatggcaacatccagcttgctcttgggtgaactgtgacctgtgacttttcccagagcactctgatttggggctggctggaagctgctggtgggagcctgccagagatccatcacttctccttgggttagggatgcggagagttcctggctggtggtgtaggtgtaggtggtatagtcccgcacctactgtgtccactcagaagtatggtttgtgtgcaagataggacaatttaggtgatggctgcaaacagtactggtgaatatagaccatgggagaaagcagggcaggtgctggtgagttccaaaaggagggacccaggagctgtaccctgtctgctgaagacctaagtgtgtctgcagcccccagaagaatgcaaatgtgatggggactaaatgtgccatcaagtgtgcgttcttcagctaagctgccatatccttccctcagaggctccctcacaccagctctcaccacgcccacaccgtgcacacaccagtaggcacacatgcaagatcgggagaggagtcagccaagtgcggtgactgggtggcacaaacccctggtgttgatgcttttctctacaggctcagttgtctgtttcctcttccaccccaaggctgaagtctttcccttgtcgcagggtaataagagagagttaaatgaaagacaggcccaaggggtgggacatggttgccagagagtccctaagggtctgaggtacagagaggggacaggtcacaattgtgctgcctctgaccccgccagcccaggcacgtggtccaaaggtggttgctggaggagatgtgcaagaggaagctgttgagtcagagggcgctgcccttgagaacagactgacctacagaaagagatgtgtgcgtgcgattgtgtgtgacctggatgggaaaggggaaggtgggagggaggggatgaggaatggaaagggacatggaccagttgctaccacatcaagctgccatcgttccctcctcgagtctgtggggaagagggaaggactgagctgggcacacctgggccacactgaacccatttctactgctcactaggcgctgtgtgggccagctacaacagagatggctcgagtgagttgccagtggcccttaagggacacagcaactgttgtggttgtttttgccaaactgtgtgtcctgatttcaggctcagaagaaaatatcgctaagttgagaggtcaatggcttgtttcactgccacttctaaggtgtttcaggctgtcaggtgcatggaggaagacaaggaaatggggtagagatggtggctagcacccaacaggacctcagcccagacagggtcagatgttctgggtgctaagtggaatgacagacaaaagtgtccacaagaggaacaaaactaggaagtggttggtattctacctctgaaggaagacaaggaagctgaacgcttgtcccggatcttggccacatctctcttcccagtgactccggtgcctggcaggcagcaagcactcagtgcatgtccccatgaatgaatgtatgtatgtatgtatggatggatggatggatggatgaatgaatgaggcattggcagatagcaggggaaggcacttaacacaaagactagtaatgcaaagtatgtaagtggagcagagatcatggtggacacagacaggtggacaggtgtccttcagctcgggagagagaaagcccagtgagtaacagatacggaaaaggcaaaaatagaagaaggaggaggaggaggagaaaaagcaggcaaacagaaaacagggagatgtaaaacagtttcaactccatcagttatgaaaccatagcttgtgtttgtgacatcctggcctcgtcttcagaaatgtgtaatgacctcagaaatgcctgtggctgacgtggggtcgggaaaattaaatgatctgtaaatacatctgtaagaagctacatcctgcgtgtttagtgtggtcctcctaaacgtggggaatttaagtgtgatttttcaccttagttttctgtgttttacacaataaatgtctctaatttcacagttatgaaaaacattggtgagggggctgggaaatggcttcttgattagagcactgctgttcttccaggctctgttcccagcaccttaagcggcagctcccaactgtctgcagctccagttccaggagatccaatggcctcttacgaccttcaagggcaccaggtattcatgtggttacaaatacatacatgtgggcaagatacccatacgcataaaaataagtaaatcttttaaaaattggtaaacagatgtttcttagagagccacggagggtatggttggaagagagctgtggagacagtgtcagaaggcttgagttgtcttctgagtgttgggatggaatgggtggggcatcccatctgtcccacagagccactgtggagagtcagtgccattcttcctcccgttgccaggcaacatgtctaaagacatcctcaaacttcccagtgcttgcttgcttctctggtcctaagtccgtgactctcccactagtcggtcccttctccccatggtcctttcttcaggtctcattttgcctgtgctttcctgagatccttgcataaccccacccccatgttctgttttatttctgtttgttctcctcctcctccccctttctcctctttctcttcttctagttttggtcttttgttttgcagtttttcttcttgttgtttgtttgtttgttcatttttttattttaagacatgaagcctgggatgtccaactgacctggaactgctggcctgtctccctctggctcccaagtgctgggattacaggtgtgcaccaccatagccagctattatttcctttgttttaagaaggaaaggtttattctggattacttatttttctttgtttgagacaggcagggtcttaccattagcccagatgtcttgagactcactctcctccaatgtcagccttctaagtgttgggagtacaggagtattcagctatgcctggacaaatttttattctattttgcactggtatgcattaattattcagttttgtgaggtacatatatatcattgatatcagtatatgcacaacgctgagtaatcacatcagaatgattaacttgcctgtccactcagatacttatttgtgacaaagtgttcaaaattttttctttgagtcattttaaaacataaaccatgagccagccctggtaacacaagcctgttgctcctggaacttgggaagtgttacagaagggtcaggagcttgaggccatcctgggctacatgagaacctgtctcaatatcaacatctgaaacccaaatagttcaacagctaaatagtcacagggctgaaagatggctcagccagccaggtggtgggggcacctgcctttaatcccagcactcagaggcagagacaggcaactctctgagttcaaggacaaccaggtctacagaatgagttccagagcagccagggttgttacaaagacaaagcccatctcaaaaaaaaaaaaaaaggatggcggggtaaggggggaggaaatggctcagtgcttgagagcactggctgctcttcagaggtcctgagttcaattctcagcaaccacatggtggctcacaaccatctgtaatgggattcggataccctcttctggaatgtctgaagacagcgacaatgtactcacatatataaaataaagttaataaaaaaacaaaacaaaacacctaaaaatcctggggtgcgtggcgctggaaagatgactcactggtaaatgcagtggctgctcctccaggacgtgggttcaattcccagaagctcagaacctcacaactgtgtgtaacgccaggtccaggggatcggacaccctcacacatgcatgcagacaaaacaccattgcacataaaatacaaattaatatactaaaaccatcttggtctacacagcaagttccagggtgggaagggctacatagtgagaccctgtttcaaacaaaaaacaaactcacaaagcatttttcctggttgagtttggcatccagggtccctgcagccagccatcatgagctgcccctgagcaggcagtaagggtctccatatcaggactcagagggcccagtgctccaggtcagagcaccttgggatcctgtgtaatgcttggggaatgaggccaggctggggtgagcctcgagcctcgaggacaggcagcatcctttaggtatctttccctggtaggatctccttctcagggaagggaaaggcaggggcctctgctggcctgtcagggtcagggctggaaaacccgtgggttctgtgatttgggatttcatcatttctttttcccttaagtttctggttgctttaactgattccatgtgtgtgtgtgtgtgtgtgtgtgtgtgtgtgtgtgtgtgtgtgtgtgtatctggttgctttaactaattctctctgtatgtgcatgtgatgagtgtgtgtctggttgctttaattaattttctgtttgtgcatgtgtgtgagtgtgtaggtctgtgtgtgtctgtatgtctatatatctgtatgtatagaatagaaaagggcataagatctcttggggctcgagtgataggcagttgtgaggtactccacgtgggcgctaagacctgaactctggtcccaagtcttcaccaccgagccatctctctggctttccaagctcagcttatttcatgtggtcctggggatggaactcaggtcccctcatgcctatgcatctagaaccttagcacccaagccatctcctcctacttttaaatttcttttaacctataaactttatcgtcagaactgactacattcatgatatcatcatcgctttgagctgtcctgtggatcgcattcttacatgcatcaaaactcacactgtgagctagagagatggttcagccgttaagaacatattctgctctgcagaggacccaagttcggttcctacacccatgtcaggtgactacaaccatctgtgactctagcccatggggactcaatacctggaacctcttatgggcacagcactcgtatacactccctaacacagatgcacacaacacaaatacactgcattttaaataatgaaaataaatcttaccaggcatggtagtgcatacctttaaccctagcacttgggagtcagagacaggtagatctctgagtttgagcctggtgtacagagtcagttccaggacatccatggctgttacacagaataactcatctttttgagatgcaaaaaaaccaaacacaaccaaccagacaaaaagatcatggttatgggacttgggagcacttgcctagtatctgcattctggattctactgtcagctctgagaatgaagggaagagtgggagggagagggagggaatcacagcttcaaataagctttattctccagagagaagatctggataggaggttttacaaaattccacacgagaagctgccagtgcgtagctatgagagctccattctcctaacaatgagtatagttatttctctttttgctcccattggtgatcctgagtgtttattcagtgggggtaggcaaagcctaggatggagacagggctccctgggacagggatggagggtctctgtcagctctgacccaccatgctcagactgtatggcgggggacagatctcccactgttaacaagcaagaaaggaatgtgatcacattattctaaaataccaaagtagaaactaagttaggagaaactggttctttaggactgcacagtgggtaggagcctgaggtgagccacctagtgttctcaacagcgagttacaagtaggcctgtgtttccagctctcttcctatggtttgtgacatcaagacaggctggctgcaccttggccaagatcccagtgaaaacagaaccaatcgttagccaagagagccacctgcttgcctttgcgtttgtacaggctctgcccaaaaccagcccactgccagttgtccccacagtacactcgtgtgacttctcaccagactcctcctcaaccatgaagctctgactcaaatgtcagtccttagtgaagttgtccctttgccctgccccctcctcagacagactgtctacactcctacagcaccttctgtgatggcgcaaatgactaggctgtatggttttttggtttttaatttgttggtttgttttgggggacagtttaatatgaccaaggaatggctttgaactcactatatagcaagggatgaccttaaaatctctctctctctctctctctctctctctctctctctctctctctctctctctctgtatgtgtgtgtgttcctgtggagaacagacgacactatgttcatatatgctatacagacaactctgcaatatttccttgagacagggtttcttactgaacttggagctgtcaggcattggggccaggggaggcgaggctagtggccagaaagcaccagtgaccctgtatcttcacttcctcctcttcccaaggcactagggttacaggagagcatggccacacccaactttttcacatgggtgctgtgggtccagactcaggtcctcaagtctgcacagccagtgctcttatacacagagccatctcccgagtctgtgaccttgacctgctgatccccctgcctccacctcctgagtgctggcattacaggtgagtgccaccatacctggcatgtgcagtgctggggactgcagatgctcagggcactgagcaagcgagcccccgactgagttccaaggccaggctgtgtggctgtgagggtgtcagagcagggagccttccaacgttgcgctgcatcgtctttacagagagcccaacacccaggctgccgaatacagggttgctgcccagaggtgtaagcacaggagtgaattccaaaatactctctggagatgattagaggcctaacaatgagggctgcagggttggaaagaggtttctagttgtttgttgttttgttctgggtcatctccatctgtggcccaggctgggctcaagtgcccctctggagtagctggaattacaggcatgaactatggtgatccatttatgatcagctgtaataacggtgtggtggataaatagagaagttatatcatttactgcatacagctatgcgctgtgccagcagaaatgccccttgagtcagaatgctgacatttggggtctgtaggctataatggttagcctgccccgtaagcccagaaatcaggaggctgaggcatgaacccagcttgagctatgtgcatatcaagactctcactttttttaatgtctggaggctgggtcctgccatgagcatgctttaagtccaacactctggaggcagaggcaggtagatttctatgagcttgagcccagtctggtctgcatagtgaattcaagagtagctaggactatgtagagagagagggggagaccctgtctcaaaatagacaatttaattaattaaaaaaattgaaagggccaaggctggagagatggcacagtggttaacagcactggctataattccagagaacccagttcgattcccagcatccacgtgacaattcacaactgtgacttcagtcccaggagatctgacaccctcttctggcctccttgggcaccatgcgtgcaggtgacacacagaggtacattcaggtcaaatacccatatacatttttttttattttaaaaataaatgctgggctggtgagatggcttagtgggtaagagcacccgactgctcttccgaaggtccagagttcaaatcccagcaaccacatggtggctcacaaccatccgtaacgagatctgactccctcttctggtgtgtctgaagacagctacaatgtacttacatataataataaataaatatttaaaataaacaaataaatgtttacatttttttaaataaggaagaggaggcaaagggaaggaagggagaaaaggtatttctgtttatgtaacaatttactgctggcatttggggcatttgacgacttaacctccttccatttgtactcttgttattctgctagggtcagaacatgctctgctttctgccagcttgtaggagagaagagaaggatgcctgatggcttgtatgatccaaatctggaagaaggtgtagcacttgtacacacactctgtttaaccagaattcagtcctgtgttggcctcagcaccaaggatcctgggaaatgtagtttagatggaaaaaaacaagcaatcccaaccacagggagggaataccaaatggaagatttgctgtagaaaacaactgcagccgggcgtggtggcgcacgcctttaatcccagcactcgggaggcagaggcaggcagatttctgagttcgaggccagcctggtctacaaagtgagttccaggacagccagggctacacagagaaaccctgtcttgaaaaaccaaaaaaaaaaaaaaaaagaaagaaagaaagaaaacaactgaaagatgcaaagaagaaaaacttcaaaggtgacccagaacctagtatagtagcacctgtgatcccagcacttgggagactgaggcaagaagattgccctaaattagcgggcagcctggactacatagtaagttccaggctagcctgatctacacaacaagatcttgtttctcaaatcaaaccgaaacataacagaagaccagccaggagagaacgggtgacagtggctgggagaacaggaaacagcagtgggaaggacggtgggaagcacttccgggatccaaagcgaggcaagcaaggggctggggcgaaaaggcctgcgtgagggtcccttaacttctaagcctggtttgcctcaccttactccccagtgaaggggcacaggaagtgggggcggaggggctgggagaggctttggtaatcagtccccagaagactgtagcaagaatggtttccagtgaagaaatggagaccctgctggcccttggcaggagctcctgtctcaggatggtgaaagcttcctgggcctacctctctccctcatcttcttccctcctcccctccctccttcattttctttaaaaacagttttacaactatttatttatttaatgtttgatgctcttccagaggtcctgagttcaattcccaagaacccacatggtggttcacaactatccacaataggatctgagaacctcttctggcatgcagacacacatggagataaagcactcatatacataaaatacataaacacatcagtcttttttaaagatttatttatgtattttatgtatatgagtacactgtagctgtatggatggtagtgagccttcatgttgttgttgggaattgaatttaggacctctgctcactccagtcatctcctctcacttactccttgctcgttctggctcaaagattgatttattattatatataagtacactgtagctgacttcagatgcaccagaagagggcatcagatctcatggtggttgtgagccaccatgttgttgctgggatttgaactcaggacctgcggaagagcagtcagtgagctgttgagccatctcgccagccaacatcagtctttatttaatatttgacacatatgggagctttgactgcatgtctatgtgtgcatcacatgtgtgcttggtgccggaggaggtcagaagtcaggggaggtcannnnnnnnnnnnnnnnnnnnacagagcacagagcatgcaagcacagagcatgcaagctctgttcctcctcctctttcttcttaaaaatttaaagataagattaaatcaatttttaaacataaacataatgttaagatttactattgcatacatatctaatcatcaactttttttaaagatttattttatgtgtatgcgttttgcctgtgtgagtgtatgcatgcatatcatgtgtgcctgatgcctgccttgtttagaggttagaagaaggtgtcagagatgtttgtgagccaccatgtggagctgagaatggaaaggcggtcactgaaaaagcaacaagtgcctttggatcattaaacatttacgtattttagtgaacaatctattaacaaggaaaaaacactaagttttttctgtaggcataaattttttgcaacctatttttttttttttttaaagatttataagcccggcagtggtggcacacgcctttaatcccagcacttgggaggcagagacaggcagatttctgagtttgaggccagcttggtctacagagtgagttctaggacagccaagggctacacagagagaacctgtctcgaaaaacaaacaaacaaacaaataaataaaaattaaaaaatatttatttgcagtgctggagagatggctcagcggttaagagcgccgactgctcttccagaggtcgtgagtttaaatcccagcaaccacatgatggctcacaaccatccataatgagatctgatgccctcttctggggtgtctgaagacagctacagcgagcaagcgagccagcagggccagagtgagaagaaaatgtgtctgaagacagctacagtgtgtttacatataataaataaataaataaataaataaataaataaatctttaaaaaaaagatttatttgcttcatgtatatgggtattctgtagctgtcttcagacacaccagaaggtggcatcagatgcccattacagatggttgtgagtcaccacatgatttctgggaattgaactcaggacctctggaagagcagtcagtgttcttaactgctgagccatctctccagcccattgcaacctacttttaataagggttcaaccacccagcagaagtagtggaagagaaaatttattaggatatggaggaagtggatctgttcagctatagctctttgggggcaagctcgatcttcttaggcagcagttcagtcctgtagcaaacaccaaacacgaccagcagctgcagactggtcctctaggcaggcagacaccagacatgaaccagcagctgcagtccagtcctttcagcaagcagacaccaggcagctgtagttcaatcctgaagaaaccgccaggctcatcagctggcctgaggcaaggctgtggcatcagcaagctgccacaggaacctcatgagcagttcttgggtgagtttctctcaatggttgccatatgacaaagtgagctcaacaacactgtaaggcgaaccaatacatgcgaagaaaattgaggtggagcaaaccaaactcctcccactgtctgtgggccatatttctatgccttcatcacaggtccttccacctgtctgctatatccaagcatcctttcacttgtgtctactccagcaaaacatcacttgacataactaactttccaaaacaaaacaaaacaaaacctagatgtttccatttcatctttctgcccagatctttttgtttttgagatgggagggtcttactatgtagaccaagctgacctccaactcagagatccacctgcctacctctgctctctgggtatggggtttaaagctgtgtagttccatatctggctcacagacttttttaaaaaaagattttttaaagatgctccttctgcctgccttgggatcaagatgtagaactctcagttccttctccagcactatgtctgcctgggtactgccatgctcctgccttaatgataatggactaatctttgaaagtgcaagccagtcccaattaaatgatgttctttataagagttgccttgatcatgctgtctcttcacagcaaaggaaaccctgactaagacacactataacatcagaggtcatatcttatccacagggcagtgttactgctggcaaacagctgatcccactggccggtcccagggacctactggctgcttacatcattacctgccaccaccaggtgtgccaggtatgagctcccagacaccccagatccttctctgtgtcttctttctgctctctctgccttgtctcatgtttctttctcctattccctttccttgtctgtctgcctgtcagtttgcctctatctccttcatgttctctcctccccaataaacctcttatactagatctgttttgtggagtaatttctcatgggaaccttggcatgagtcaagggtaccctaccactctcgcttgcatctatcctgtcagttacagcgtgatgggtccagcactaggtaagatacatgtctttcccctcccagaagcctgtatggcattgtgcaggctagccaacagggagaaagtttcctggtcagctcaaggttaattttgttatgttctgcattaggagtggtattctcagcaatcgagtctcaccctgtagttacggtgcacagccaagagcaatagcagtagtgtgctgttttcggagcatctggagccttactgaccagtaactcacagggagagggctcaccccggcactgaggttctcatttaataattcatgtcttctgggaagcactcatgcagggtacttctgctcaactccctatttaaaaaatattatatatttaaaaatagctttcagaacagtgggttcctgcaatgcttcctcatatacgcttagtttgggcttcccttccccccacccttttctgaatctcttttcttcactttaaccctgagtctctctctctctctctctctctctctctctctctctcactctctctctctctctctctctctcgtttcacatctcagtgttctactatcttcactaatagttttttcttgggttggaagatggtttccctatagctttttcatataccttttattttggctaaccttgctccctcccccaggtttgacccttccccattccatccttctctactttatttccctgacccagcccttaggtatccaccccttgtggtccatctctagttttctggctcccacgtgtactccaggttaaacatacatgaccaaagatttagagctaggagccacatatgatccagaacatgcaatatttctcagtctgctacaaagtcactgatgctacagtctcctccgtcacccttagggcctcatccaaaacccctcctccaaatttctataaatttgggggggtaagttttcaacacactgactttgggggagcacattcagactgcagctctcaggaaaagtgggagggatgaggggatatttgtggggttcctactctgtccctcagaaaatttgagataaaaagagaatgggccgcatgtgcttgtgcgcgctttaatcctagcacgggctggggacacaggaggtggatctatacagtgagagcctctctctggtggggttagggagaacggaattggggcttgagtgcaggtctgggatccacgattttcccagcacaccactaacaaggctttccggccctcataggagagtgaggtccggcattcatggccctgcactccgagggagctccagcagggctggaagtggagaaaacagggcctgtttggtgccagaggagtcagaatttctaagtgctcacagctgagcacttcccactgattctggggttcgcagtggggctggctcagcgagggtccaaagaggtgtaccgtgagggctcttaggaaggactgacccagctcggcccctccctcccctctctctggcagccccacccccagcctcagcttctgggaacattcgacctgaactgtggtgaacacactgacccgctggctgctccaagtcaccatggaccctgaaggtgacctaagtctctgctctgtgttcctgttttctatgtcccctactgcccgtccctcttcctatttcagccatctgcctccctctctcttctctaaagaaccccttgtggcctctccttggatcttgttcccaagtccgcttctctctgtcttgtttgaacctccaaaatcctcctcttgcttcgcggttctttctgtgttgagccctacggaagggcagaagcttgggaacagaatggatggggttgctctgctggggtcagatggactggtagtgggagtttggaaaggggagcagccctggactctgtcccttgttagcagccaagagaagcggaggcaaagtccggtctcatccctgtagagtgtggggggcggggaggggatgaagtcggagactgcgctcaggccgcagagtctggcttgggactcacagcacctgcttgagcctagagtgcatcaaggacaggctgcagggccatcggaagacttctacagcctcacagcctctttttcttgcagtagcattgggtctggggtgtagctcagtggtcgacacttgcgcagcatgcttaagaccttccaccctagtaggtttgccgctcttatttaaatcttttgtgtttccctttcctccctggggcctcctcccccatcctccccactttcctgccggtttgcatgcaactcctctggcctgcctgtggagcctgctctggatttgtaggtctggctagaatctggggagttgcctgtgctgatcgggctggcctcaaacttaccgaaatttgccgccggccgcctgccaagtgctgggatcaaacccgtgtgttctgcctggtctgcctttccctcctaacattaacactgccctggatttgaggccaggggattcacagctgtgggaaccctgggaagttacccagaaggattctaggtttctgcatctggaagatgcttcagggtggtagggaaactcaaccacctttgcaagtgtcccggttcctgagttctttactgaggaactgtgggtgggtgttcagggagggcatggatgcccaacatgaatatgaaattctgagaaaatagccatggattcccttttctgagaaagggggttcaataatggcatttttcatccaacccgggtttctgaatttttaaacttattattgtatgtgagtgcatggtggtgggggtgtcaggtgtcacagtgtggaggtcagaggacatcttttcagaggttgttctcttcttctttccacctttgtacgtctctggggatggagcttggggcctcctgaactgtctttcccctctgattattcatttagttttgagacaggtcctcactgtggagccctagctgggctggaacactcagcaatcttcctgcctatgcctcccgggtgccgagattaaaggggtgtgcctggttttgtttattcctaagacagagtatttttttaatattttaaattctgtttatgcatggcaggagttatgcacacatgtgtggggttgccagatgccataggcattgggtctccctacagttacaggcggttgtgagccacctgatgtgtgtgctaggaacagaacttggatcttctgcaagaacagtgtggacttaacctttgagcctcagtgatatgcagggccacatctccagggtcttgattcacagcccaacatggcttgcaactcatgtagctcagagtgaccttgaacttacgatgagccccagcctcccaagtgctgacattactggtgtgtgatccaccacaggctccagacccaaattcttaataagaataaattaaaaacctcacatactcaaggatggggtctcgagagagggctcagtgggtaaagtaccagccttaccagcatgagttcagattccccaggactcacacaaaagttagcctgcaatgctcacactcggtgtgttgaagaggcggaggggtgggagttgtaggcagatcctgagttgagctcaggaatgatagaaaaacacagtagacattagccaggtgtgagtttgaggccagcctggtctacatagtgagtttcaagaggatcagagctacacactgaggtcttgtcttgaaaaagaaaagcacactggtcattagtctctggcctctatacacaggctcaaatgtgtgtgcgtgcacacacgtgcacatacacactcacacacactcccctcatggacatctctgtggcctcccaagcacagagcttagaggggaccccagagtcacctacataaaatcccatttctgacacttgacagctatgccacctagaccccatacttcaccttgctgtgctcagctttcttgttggtaaattaaaaatagtgtctttcccagaggattgtgggattaaacaccttcacaaagggctggtagccagaaacagggtagagagggagccttcaactttgtccctgttctttgttgtttgagtcaggatttctctgggtagccatggctatcctagaactcactctgtagatcaggctgaccttgaactccgagctccacttctggaaccctgactctccatgtttggcgagtcagactctcttcctgtttcttcatgagctggagatggaggttcctcccactcaccctattggcctctcggagccaatgctcacatcgcaggactcacctcccagcatctggtcctttctcttttgcttccctctgcccttaaggttctggtccacactgctgcctcaagcatgtgacatctgatgtttgactctggctcaggcagaaggctggcgaggaccagtgacctgcataacataagccaggacacggtagacaaggaaagggctcgacacccaggctggggagtcagggaaacaaagggtcagccagtctagagtgccacagaagtccctgggagccagtagacacagtgggcatactgggcaaggactgagccctggagctgtgaccttgatgtgacctttagaagcacaccctgttgtcacagttcactctggttcaccgcctctcgccaaagctctttcaatagcttcctaaccaagaaccctagacacggtttaaatgtatacatgtgtgcaggcaagcatgcgccatagagtggaggtcagagggcaacttcctggagtcagttctctccttccaccacgtgggttctgggaataaactaagtcatcagacttgaaggcaagtgactttgcacactgagccggctcactggcccctaaatattaaaaccgcaatcttcattgtttttatcctctgacttccaatcaaaattctatagtgactctatagagcctggctctgcctggctctgcctggctcttttcactacgcatctttttctctctttcctttctctctttcctttctcagaacctgaaccacatttgccagtatccaccacatctccagggtgcctgcagcctctctctaccattgagcagtctctctggaggaggtctaacttgtgttcagagccagccctttgcagcctctccttcgccctcacactctcagcaaatcatccccccgccacccctccaagtgtgtgcgccgctccagccctcggtcatagggggtctctactgggtcctatttggaagtcatttctgttccctaggaaatgagggtatttggaaaggacgcatcagggaggagctgtgttgactagcctctatctccacctgctgtttgtccaatgaatcaacaaagaaagccgagggaagagctgagctgggagacagactcctgagccctgacactggtggctaggctggactcagatgtgagtgtccctctgcctcacaacaggcagtcctgtgactcctgtgacaatcaccttcagagagcccaagggaacatgggcggagtcaggatagcagtccagatgtttctgactcatacctcccaccattctcattaggccaggagccagcccggctttatgaccgagcctgaacttcccagtagtgtggacttaccctatttttcttacccagtatcagactgaagttaccctaaggagatgtttgcttgtgccttctctttggctgagacattactgaactaatggtctccaaaactttagaatttcctgggaacctcatgctgaagcccaggggcagccagctggggagggtgtgtccagtaggaggctacacacaggctactggtcacaccgccttgtcagaggagcgctaggatgggcagaagcatccctggtcaggacggcttagtttattcatgcttcttgccctgtatctaatctagacctcaggtgaagatcccagtgatggctcaggcaggccttgaatttgaaattctcctgtcccagtgtcttttgtagttaaagttacaggctcataccaccactcctgaaacactttttttttctttttttaggatttatttatttattttatgtatatgggtacactgtagttgtcttcagacacaccagaagagggcgtcagatcacattgcaggtggttgtgagccaccatgtggttgttgggaattgaactcaagacctttggaagagcagtcagtgctcctaaccactgagccatctctccagcccccaaacacctttttttgttgttcatttaaaacaaaaatttaaagaaaaggtctcatttgaccaaggctggcttcaaaccatctattttgctaagggtgaccttgaacttctgatccttgtctccatctccaaatgctggaattacaggtgtgcgggagatggcacccagggcttcctgcatgccaggtaagcactccagcagattagctatatatcatggctgccaagccaattttatcagagttttattctcccccagataaaaaggtatcccgtggggcccaagagagggctcagccattaagatcattggctgctcttccagannnnnnnnnnnnnnnnnnnnnnnnnnnnnnnnnnnnnnnnnnnnnnnnnnnnnnnnnnnnnnnnnnnnnnnnnnnnnnnnnnnnnnnnnnnnnnnnnnnnnnnnnnnnnnnnnnnnnnnnnnnnnnnnnnnnnnnnnnnnnnnnnnnnnnnnnnnnnnnnnnnnnnnnnnnnnnnnnnnnnnnnnnnnnnnnnnnnnnnnnnnnnnnnnnnnnnnnnnnnnnnnnnnnnnnnnnnnnnnnnnnnnnnnnnnnnnnnnnnnnnnnnnnnnnnnnnnnnnnnnnnnnnnnnnnnnnnnataaggtctcccatgagagatcaggtttaccgccacgtgagattatcctctccacagtccaggtgcctaggagaaacttctccacagatgacgtggcaagggctctagtcagtggcggctgacagctgtcccccccaggcagctcactgcaccagccgggttcctcctccgcctgcagctcagtgaagcttcccgctgcagttagtgccttccaggggcagctgctggttagtaaaggctgcttattcagaacctgctctcagagatcccttttgttggacatgttagccggtgggccttaaagaacaccagaggtgtttgtttattccctcaagtggaaacagtgtgaacagtgtgccctacaccaggcaaccagggtagcttgtcttggagacgtctgtgtcggggaagtctgggggctgaagcagctgggttgtcctgaaagtcctcactgtggagaggaagaacagtcaagctgcaagcctcaccactctagctctgcgcttgaggaagcttccctttccatttccagccaaggttttccatctataaatactgtgtgtatcgtgagggactgtgggtaatgactgttgtgcaccatgggagactgtgggcaatgactgctgtgcaccatgggggactgtgggtaacaacttctgtgtactgtagggactgtaggtaggatctatgacagcacacaaccagcgccctggtatggcaggcccaagtgtgtggtggccatcgatcttccctgactgagaagctctgctagcaattagattcacgctcctccttccacatggtacccgactcccctgctggggcccagggaccaacatttgcacagatctccactacttctgctgttcaagaaagttcacagagactggggagacagctcaagagttagagctctgctgcaaaggactgaggttcgggctctagcacccacacagtggctcgccatcatctgtgactccggttccaggggctccaacaacttctggtcttcaagggtacacatgtagtgaatacatatacggacgtgaaacactcatacacaaaaaataagtaaatctaaaaaaattggaacaagaaatttgttttggttcccagccattgtattcttccaaccctgagcaatagaagaactagaaaaatcttttgttctaatattcacagcgcagctccctaaccgtctgaatttcccggcacgaggacagtcttttgggaggggttgacagagagaagctgaaaactcattgttctcagatcctgaagaatgagttaataacccatcaggtgtgtgtgtgtgtgtgtgtgtgtgtgtgtgtgtgtgtgtgtgtgtgtgtgtgtgtgtgtgtgtgtgagagagagagagagagagagagagaggaagccactttcaaaaatgccctgtggttgccaggcggtggtacacctgaaggcagaggcaggcgnnnnnnnnnnnnnnnnnnnnnnnnnnnnnnnnnnnnnnnnnnnnnnnnnnnnnnnnnnnnnnnnnnnnnnnnnnnnnnnnnnnnnnnnnnnnnnnnnnnnnnnnnnnnnnnnnnnnnnnnnnnnnnnnnnnnnnnnnnnnnnnnnnnnnnnnnnnnnnnnnnnnnnnnnnnnnnnnnnnnnnnnnnnnnnnnnnnnnnnnnnnnnnnnnnnnnnnnnnnnnnnnnnnnnnnnnnnnnnnnnnnnnnnnnnnnnnnnnnnnnnnnnnnnnnnnnnnnnnnnnnnnnnnnnnnnnnnnnnnnnnnnnnnnnnnnnnnnnnnnnnnnnnnnnnnnnnnnnnnnnnnnnnnnnnnnnnnnnnnnnnnnnnnnnnnnnnnnnnnnnnnnnnnnnnnnnnnnnnnnnnnnnnnnnnnnnnnnnnnnnnnnnnnnnnnnnnnnnnnnnnnnnnnnnnnnnnnnnnnnnnnnnnnnnnnnnnnnnnnnnnnnnnnnnnnnnnnnnnnnnnnnnnnnnnnnnnnnnnnnnnnnnnnnnnnnnnnnnnnnnnnnnnnnnnnnnnnnnnnnnnnnnnnnnnnnnnnnnnnnnnnnnnnnnnnnnnnnnnnnnnnnnnnnnnnnnnnnnnnnnnnnnnnnnnnnnnnnnnnnnnnnnnnnnnnnnnnnnnnnnnnnnnnnnnnnnnnnnnnnnnnnnnnnnnnnnnnnnnnnnnnnnnnnnnnnnnnnnnnnnnnnnnnnnnnnnnnnnnnnnnnnnnnnnnnnnnnnnnnnnnnnnnnnnnnnnnnnnnnnnnnnnnnnnnnnnnnnnnnnnnnnnnnnnnnnnnnnnnnnnnnnnnnnnnnnnnnnnnnnnnnnnnnnnnnnnnnnnnnnnnnnnnnnnnnnnnnnnnnnnnnnnnnnnnnnnnnnnnnnnnnnnnnnnnnnnnnnnnnnnnnnnnnnnnnnnnnnnnnnnnnnnnnnnnnnnnnnnnnnnnnnnnnnnnnnnnnnnnnnnnnnnnnnnnnnnnnnnnnnnnnnnnnnnnnnnnnnnnnnnnnnnnnnnnnnnnnnnnnnnnnnnnnnnnnnnnnnnnnnnnnnnnnnnnnnnnnnnnnnnnnnnnnnnnnnnnnnnnnnnnnnnnnnnnnnnnnnnnnnnnnnnnnnnnnnnnnnnnnnnnnnnnnnnnnnnnnnnnnnnnnnnnnnnnnnnnnnnnnnnnnnnnnnnnnnnnnnnnnnnnnnnnnnnnnnnnnnnnnnnnnnnnnnnnnnnnnnnnnnnnnnnnnnnnnnnnnnnnnnnnnnnnnnnnnnnnnnnnnnnnnnnnnnnnnnnnnnnnnnnnnnnnnnnnnnnnnnnnnnnnnnnnnnnnnnnnnnnnnnnnnnnnnnnnnnnnnnnnnnnnnnnnnnnnnnnnnnnnnnnnnnnnnnnnnnnnnnnnnnnnnnnnnnnnnnnnnnnnnnnnnnnnnnnnnnnnnnnnnnnnnnnnnnnnnnnnnnnnnnnnnnnnnnnnnnnnnnnnnnnnnnnnnnnnnnnnnnnnnnnnnnnnnnnnnnnnnnnnnnnnnnnnnnnnnnnnnnnnnnnnnnnnnnnnnnnnnnnnnnnnnnnnnnnnnnnnnnnnnnnnnnnnnnnnnnnnnnnnnnnnnnnnnnnnnnnnnnnnnnnnnnnnnnnnnnnnnnnnnnnnnnnnnnnnnnnnnnnnnnnnnnnnnnnnnnnnnnnnnnnnnnnnnnnnnnnnnnnnnnnnnnnnnnnnnnnnnnnnnnnnnnnnnnnnnnnnnnnnnnnnnnnnnnnnnnnnnnnnnnnnnnnnnnnnnnnnnnnnnnnnnnnnnnnnnnnnnnnnnnnnnnnnnnnnnnnnnnnnnnnnnnnnnnnnnnnnnnnnnnnnnnnnnnnnnnnnnnnnnnnnnnnnnnnnnnnnnnnnnnnnnnnnnnnnnnnnnnnnnnnnnnnnnnnnnnnnnnnnnnnnnnnnnnnnnnnnnnnnnnnnnnnnnnnnnnnnnnnnnnnnnnnnnnnnnnnnnnnnnnnnnnnnnnnnnnnnnnnnnnnnnnnnnnnnnnnnnnnnnnnnnnnnnnnnnnnnnnnnnnnnnnnnnnnnnnnnnnnnnnnnnnnnnnnnnnnnnnnnnnnnnnnnnnnnnnnnnnnnnnnnnnnnnnnnnnnnnnnnnnnnnnnnnnnnnnnnnnnnnnnnnnnnnnnnnnnnnnnnnnnnnnnnnnnnnnnnnnnnnnnnnnnnnnnnnnnnnnnnnnnnnnnnnnnnnnnnnnnnnnnnnnnnnnnnnnnnnnnnnnnnnnnnnnnnnnnnnnnnnnnnnnnnnnnnnnnnnnnnnnnnnnnnnnnnnnnnnnnnnnnnnnnnnnnnnnnnnnnnnnnnnnnnnnnnnnnnnnnnnnnnnnnnnnnnnnnnnnnnnnnnnnnnnnnnnnnnnnnnnnnnnnnnnnnnnnnnnnnnnnnnnnnnnnnnnnnnnnnnnnnnnnnnnnnnnnnnnnnnnnnnnnnnnnnnnnnnnnnnnnnnnnnnnnnnnnnnnnnnnnnnnnnnnnnnnnnnnnnnnnnnnnnnnnnnnnnnnnnnnnnnnnnnnnnnnnnnnnnnnnnnnnnnnnnnnnnnnnnnnnnnnnnnnnnnnnnnnnnnnnnnnnnnnnnnnnnnnnnnnnnnnnnnnnnnnnnnnnnnnnnnnnnnnnnnnnnnnnnnnnnnnnnnnnnnnnnnnnnnnnnnnnnnnnnnnnnnnnnnnnnnnnnnnnnnnnnnnnnnnnnnnnnnnnnnnnnnnnnnnnnnnnnnnnnnnnnnnnnnnnnnnnnnnnnnnnnnnnnnnnnnnnnnnnnnnnnnnnnnnnnnnnnnnnnnnnnnnnnnnnnnnnnnnnnnnnnnnnnnnnnnnnnnnnnnnnnnnnnnnnnnnnnnnnnnnnnnnnnnnnnnnnnnnnnnnnnnnnnnnnnnnnnnnnnnnnnnnnnnnnnnnnnnnnnnnnnnnnnnnnnnnnnnnnnnnnnnnnnnnnnnnnnnnnnnnnnnnnnnnnnnnnnnnnnnnnnnnnnnnnnnnnnnnnnnnnnnnnnnnnnnnnnnnnnnnnnnnnnnnnnnnnnnnnnnnnnnnnnnnnnnnnnnnnnnnnnnnnnnnnnnnnnnnnnnnnnnnnnnnnnnnnnnnnnnnnnnnnnnnnnnnnnnnnnnnnnnnnnnnnnnnnnnnnnnnnnnnnnnnnnnnnnnnnnnnnnnnnnnnnnnnnnnnnnnnnnnnnnnnnnnnnnnnnnnnnnnnnnnnnnnnnnnnnnnnnnnnnnnnnnnnnnnnnnnnnnnnnnnnnnnnnnnnnnnnnnnnnnnnnnnnnnnnnnnnnnnnnnnnnnnnnnnnnnnnnnnnnnnnnnnnnnnnnnnnnnnnnnnnnnnnnnnnnnnnnnnnnnnnnnnnnnnnnnnnnnnnnnnnnnnnnnnnnnnnnnnnnnnnnnnnnnnnnnnnnnnnnnnnnnnnnnnnnnnnnnnnnnnnnnnnnnnnnnnnnnnnnnnnnnnnnnnnnnnnnnnnnnnnnnnnnnnnnnnnnnnnnccccccgcattccccccttcccccccccagtgctaggatcaaaggtgcatgccaccacgatgagcatttgattgctttattttatatttgtttgtttttgagacaaaattttacacagtcacccacaatgctttggaatgtatacgtagcccaggctgtcctccgccttgttgaaatcttcttacctcaccctcccatgtgctgggattgcagacctgcgccccctgctgggcaagtgactggactgcaacagaagactggacagtgtggtgcacatcactgggacttctcacctagcaggggtctgtagaaagatctgagaggacagggctggcaggagcaaggcgagagactgtgaggcccaggcactatgcgaaccagctcatgctgaggtctgagagagacaaggagacccacccccagctccatggcagctgctcagtcaggagttgaatgggaagtggggtgaagcagagaatgcagcaggtgcaatgggtgcgcactgcagttttcacagtgacagagctgtcaaacacagctgaagtggctgggaggtgatcgtgcacgaatttaatcccggcactcaggaggccgaggcagatgggtctcttgagttcgaggccaacctgatctacagagggagttataggacagctatggctatacatagaaaccctctcttggagaaacaaacaaacaatcaaacaaagcagaagtggatagaactctcaccctaaggcaagaactcaaaatcgaacttgaagtacagtgtagactagcaggagtttacagcccaagagcacagaaggggtcaatggtgcagaattactgacaggaagtcctggggataaggaggccttctggctaaaccaacccaacaggattctcatgaaaactgcaattcagagaccaacatggaaatccaaaagcatttgggaaaccgaggcaggagtgcctgaagttcaaggccagcttgggttccattgtaaattccaggacagcttgggtgaaaggggggtgggggtagagggaaccagacagattgcgtgaaggctgcggctcttgtacagaccaacaggtggcaatgttgcaccgtgtctgggttctgtctctgcagccctggaggctgaaaggcccttcagttgatgccacacattgaggtgaagggcaaaccattaagagaagccatggagccacccttcaccccctcactaccgtctctggaacaggacatacccgagcctagtttgcagctgcactaaggcttcttgttctgaacctggggccacctcgttgccggcaccctcaacctgtttgtcttttctctggttctctctctgttgctgtaaacacctggacttacagctttatataatacttggtgttcgctgtgagtgaggctcggtggtcgagtgttttctagaagctcaaggacctggactagatcgccaccctgagtaaagcacttggtgtcctggagacggctaggaggaaagatacaattgctaagccttctgggtaacacagatggaaaggaggcagggcaccctgcaggcgtgcacaagtcggttgcccatgctgttaaatatcgagggccttggtggtgtatgcgtgtgaccctcagcacacaggaggttggatagctgggactccaggctatcctggctacgtaagcaagccatgtctccaaagaacaacaacatattaaatatcttgttagtaagtagctttggacccaacagtaggttgaatgcataaaatacaaggtgctaagtgtttacataaaagttgttaaatgtgtcacctggcacatactatacagaaaaatgatctgagcaactatgtaatcagattttataacaaagcagaaaggaggttggcgggaagaggaagaagaggaggagggtgctgtccagggtacagaacttcaattctgcgggaggaatgggttgtgtgagtgttaatactgctggactcagatgtgttaagaggggtcacctctccttgtttctttaactgtaagtcaattaaagctaaaaccaaggtgagtgacgggagatgacgcagtgggtagagaagcccgctgctaagcttggcaaactgagttagcgtcccaggacctacccgctttagaaaaccaactcttgcaaattgtcttttgactgccactcaagaccagtgacatctgcatgcacataccacataaacacccccacacacacacaatgtaaaaaaaaaaaattacaaaagggggcattgtgataatacgaaggagcaagcacccgcttctacatttttaatttattattgttgttgttgttattgttgtttttgctattctgagacctggtctgctgagttcctcctcttcagcccccagagtgtggagactcttggcaggcaccaccaagcccagcttccttataaaactctttgatacctattccaagtttaactttagctagttgcagagtacttttatttactctgacaacctggtcagcttggagaccccagactctgccccagcctggcccctgggagtcctatctccaccctgactggctagtgtcctactgaccatgctgttaaaaaccacggtgcagcttctggctacaagggaggaagtgcaaacccgacagaggtctctctgcttcctccccaggcctgcagctcctgttaccccctacaaccttggcagccctggcgaacagctggctgcaagaggactgcccgggcctcaattttgcatccttggttaccgggtcggcaccctcgcaggctgtgctgtgggccaaatctcctggggttctggcagggcgacccttctttgacgccatcttcactcaactcaactgccaagtgtcctggttcctcccggagggatcgaagctggtacctgtggtcaaggtggcagaggtcaagggacctgcccaccacctgctcttgggggaacgggtggctcttaacaccctggcccgctgcagtgggattgccagcgcggcagcgacagctgtggaggtggccaggagcaccggctggactggacacgtggcgggcacgaggaagacgacacctgggttccgactggtggagaagtatgggctccaagtaggcggggcagcatgccaccgctacgacctgggagggatggtgatggtgaaagacaaccatgtagtggcggccggcagcatggaaagggtaagtgccccactgagcctctgttctcactgtggtcctccactgacaggcatttcagtccctccaccagagacctgcctggtgacaagtggtcccagcggcagggatgcctccaagtctttctgtctgtagatggaggaggctgtcttcctttttatgtgcgattcaaagcacagctctctgggccccccaggatccagggccaggctactcaaccttatcctctctctattggcctggcaggcagtgctgaaggctcggcaggcagccgggttttccctgaaggtagaggtggaatgtagcagcctgaaggaggcctttcgggcagcagaggctggggctgacctggtaatgctggacaactttaagcctgaggtgagatgggatccaacttctgggcagggccaatgggcaatgttgggatgggggtgggggtttctcacctccccctggcttctctcttacaggagctgcaccccacagcagctacacttaaagccagattccccagcgtgtcggtggaagccagtgggggcgtcacactggacaacctcacccagttctgtgggacacacattgacgtcatctcgttgggaatgctgacccaggctgctccagccctggatttttccctcaaactgtttgctgaaggagataccccagtgcctcacgctcgccggttctaaagccgaagaagatgccaccagaatggactactgcggcttgttgggcaccttgggtcacatgtctttagattcagaggccaataggacatatctaggctttttacctaggcttcccactagctctgccatctccagcttgtgtgacttgccagggctgactttgattttgcttgcctcggttttctcatctgtgaaataggtctaataaataaaatcaacagccttactgggctgttgatgataataactactacacaatgagtggttggtaaaggctagaaattaacaccgctcatctaacctaagacatatatttgttatcgaacactaaccttctggagaggtggcccctttagcagatggtgtttcaaagtaagactctggcaactggcagctgacatcacatggcctatctgtgtggctagggacacatggcaagaaacaagctgctagcacagccccaagtgctcttttctgtctctgtggtgttaaggatggagccagggccatggacaagtgtcctagcgctgctgacctcagccctctctcttctctcccttctcccttctttcctgtctcccccattcctgctctgcctcaccatgtagcctaggctggccgtgaacttctggccttaggtgtgctcctgactcggctgcttgcactgtgctctctgcacctggcttacaacaactctttccacacatgtacactagaagccatgagtagtaataagacattagaaatgcgtggcacttctttgttgttgttgttgttgtttttcgagacagggtttgtctgtatagccctggttgtcctggaactcactctgtagaccaggctggcctcgaactcagaaatctgcctgcctctgcctcccaagtgctgggattaaaggcgtgcgccaccactgccctgcatggcacctctttataccaggaaggatcttatatttgaaggggtgtggtatcagatttgccatccggctgggacatttccctgactgatgtctgaggagctaccctgacctcgtctaagcctagatcctagggcagatccaggaggaacatgtccatgacaggtcctaggtgctggcggtcccaggagctccctctgcctctcagagcccacttctcccccttggccacaaggagaggatacattcagctcttggccacaaagaccctatgtcctacctggtgtcgcttagtggggaggtgtgaaggcaaacactaagcccactgcacagtccagagcccaatagactgaggcctgctttattcatggccctgcccttggagggtggtgcatcaggaagtgaagatgtacttggcagagatcctggacagagccggccaatattctgaaccaagggggccattctcatggacacagcctgaatgtgtcacatgggatagtacccattgtctctcacccattcctggtccccattcttcctgcaggggcagcatggatgctcttagcaaagtggactaactccagagacctttggtctttaaaagccccaactccttacttttgaagaaggaaaacggagtccctgcagaactgggcactgctgggtaccagtgcaggaaatgtgagcccggaggaggaggggtgaggggaggcacgggagctctggtaaccagaaagtcctaaatctgggatttcgggtggtatcaggggcagcagtgagaattaagctttaggagacccaaactcatgtgctggaatctaaaattagggggtgagtccggagcagacagaggggagtggactgcactgagggggagcatgaatcccacacatgtctcttccacaggattgctgttactgcttttagatgtaaggtctcattagctcacatagtctctgctggcctggacctcactgtgtagccaaggctgtctttgagctactagtccctaaaccttcacatcccaagtgctgggaaaccagcagaagccactatgcctggcgagtgttgcaattatttcttaaggactctgtcaggctgaattttaaggtcaattttgaactcagaaatggatagacccttccaggattctctgaactctgtgaactgggaagggattctattactggaggaaagcaagtaagactccaggcaagccaaagtagcacttgctctcctcatagcagagagggaggtgccgggtttccaggcagaggcaactgcatgggcagaggcccagaggaaggtaatggcttgcattgtgtgctgaattggttgacgctgggccctggaaaacaagatgactaggggataggctggctccagaccacaaaatggtaggtcagaggatttggactgggtcccaagaacaatcggattcaagctagaaaataagccaacgcagattcggtcccctgaagaaggatgcaggcggagaaaagccgggtggctgcagggaggtgaagggatgctgcctggggaggcttggatgagggtcttgccagtgaagcaggcaccagtgtgggtagagcagtggtcctcaaccttccaactgctgtgaccctttaatgcagttccctgtgttgtggtgatccccaatataaaattattcttgtcgctacttcataactgtaattttattatcgttaggaatctatgcaggatatctgatgtgggacccctgtgaaaggggtccttgtgggttattcaaaccccaaaggtgtcataacccacaggctgagaactgctagagtagaggctagactcttttggaggtctcagggggcagagagaagacatggcagaagaggagtgtcccctttcactgggtggtgggtttcctgttcagcctggggctacggttagagcacttctcaaggctgccccatgcccagtgcgaaacccatttgacaactggccgaattgactggatgagtgaaggtgactactgccatcctctgtgacatcatcagtgcacctggaggatgagaagggtcccatccctcagttaatgatgggggaggggcgaggtatcaacatctccgtgttacccacaaggaaactggcttacggagccaagagcatcgctggaggttacatatcaacacggtggtggggcagcattcggaggcgttcttcactccttccgtggatgtctggcactactcaaaacagacagggagacttgtccttatggcgatgtgtctgggtccggggttggggcggagtccagaagaacaatggaaaagcagttcaggaaaattcataaaaatggccttatgaccaccagagggcaatgtaaccccatggcttgatttccaccctcttggggattcaaaaagacaataggccaggtggccaggaatacaaagtgcagcagctgttccggaagacagggctagagctgctggagctgtttgtttgtgttcacagcactcaccaggcagagccggaggattgccagttcgaggccagtcaggtctatatagttaagcctggactgcagactggaaccctctttcagaggagaagaaagccagggctgggcctagtgcctcaagtctataatcctagtacctgagaaactgaggcaggagaatcacattttggaggccaaaacgggctgcatagaccttgtctcaaaaaagtaagaacaaaacaaagagacttcactcaggaaggagtagaaagctaggggaatccttccaccgacttgccagcccagtcttgtcatcagatattcaccccaatgtcgaaggtaacctagtgctgtgctaagcccagcttgggtggcaacctcattcacacacaggcccatctgctctcctactcacctacctacactgccatctagtgaaccctgtcccaccgttcaacctagtcaccaacagaagctaagttaggccagagcagggaggtgttccttcaaggacagcaagagctcaaactgaagctgagagagattgcttccatgcccaggagtcccgtgccaaggccacggaagggaggaggcatttaaagccatcaggacctcttagcaagccagaacatttctggaaaccatcttgcgtttaaaaaaagatctctctgttgtgttgatggagcagacacacattatttatcacttgctctggaaggaggtaaacatctccaactgctgctgcatcccctggctttgttcctgtggtgtcccgagtgatcgatcattgtagacagctcccaatatttcagctctgaagccttgggtaactcagttctgtgaggccagattctgaactacagaaaaatctcatcactggatcattggtaaatttgcacccacccctgcgcatagcaggcttcttctgatggtgagggcagtctttaacatgttccagtcggtggaaactggcagagcccttaaaggaaccatcgggtgaggggatcatcctgatgtagctctagtgtggtgggccctgggcagcctctttctctagtgcttcagttaaaagattcaggagtcctacagagcagccccagacccagcatggtagagtttcaagaggctgaggccaaaggatcaatgctggcctggattatagaaagagccagtcctaagaaaacaagagctggaatgtagctcagtggcagagtacatcccgagggacatacacacatacgatgtacatacatacgtacatacacacacacagtggacatacagatgtgtatacacatggtgaacatacatatgggcagacaaaacatccgtacacatagaatataataattaaaaacaaagcaatcaacaacaacagcaaaaaccccagtgttttgctttgtgggtatgtatataaaccttgcatgcctggtgcctgtggaggtcagaggtcagatgccctggagctgaaactacagactgtggtaaggaaccatgtgggtgctgggaactgaacccaggtcctctggaagagcacccaatgctcctaacttgggagccattgctccagcccctcaagctggatccttgactataacacggaaatggatttcatggcaagccagaatgaagttatgttatcagatttattaagataagggtaagggaaagtttgatggtgcatatctttagcccctgcactcaggagacagaggcagggggaatctgttagtgtgaggcaagccgggactacatagtaagaccttgtctcaaaaaaaaagataagaaatattatgcattctgtgtttaaatctgagctttgagaggaagagggagagaacagagagacaacaactcagagacaaagagactgagagatttaaaggagaacactatacacttaagtcttgagacccagagagcttttcactttggtgtctttacagatagggttttgtgatttttttttccaagttataattattcaaaggttgtcatttcaaaaaagaatcacaacttcccaccatatgtgttccagggttaaatgcagattatcaggcttggtggcggtgcccttagcagtggaatgattttatgtctctagcttggttttttgtttgtttgttctgtgttattttgagacaaagtctcactgtatagccctggctgacccgaaacccactacgtagagcaagcctgcctcagactcagagtgacttgcttggttctgcctctcgagtgcaggaattaaaggcatgccccaccaccactgtgccacccggctggcttgttgcttttagcaacctcactggaaacctctgtaggaagacagatgtcaccgctgtggctagttttaccccagactcagggcctctattccctcctagtccctgtaattttcatctttctgtttttgcttcattgtatacaatgctgatgattgaattaagctctgcacacatcgatttacatggttactgatttcttctgtctgactccaatttttcaccctttagccacagctcccatctctccctaaccccaagctgagaagctgagatgtcctctctcctcccttctgcctctgtgagccaggttgtttctgctggaaatcagtctctagaaatgaggtcgtggctgcagcctctctgcctaggtgcttgatgctttgcaaatattgaccccttatcaaatgctgcttgcaaatattttctcccaactctatattgtctcttcattctgcctccttatgcctgctaatcttatattgcttgtcagataaacaccagacctacacaggattcttatgataatgatatctttatgataaggagtggacatcctgtctccagttagtcatgcctgttactgggacaagcaaggtcttcctgagtagtttacctcctttcatgacctctgagtgttctaatctggcaggagctgccctggctttgtgtcagtcctggcactggcttggttaatcctgcaggtggctctttccctggccttgagtagcttgctttcatgtacacacacacacacacacacacacacttgattccttgccgagcagttgagagaaatcctctaacaactggggttccaggcttctcagctctttcctctggaaccatctccaagcctctgcctcagtctctcctctctcagctctctctctcctgctcagggtcctctaggcagctcctcacaaacctgcttgctttctctctggaatcttgttgctctcctcattcgttgcctgtggtctgttgcttcctgagtttttgtggcttcgcggtggtggctgcagaaacccaactactgatgctccattctgccccgaaactggagtcccagattccaggagtgaaattgcagatgattccagagtgctctccaggtgaacgccacagacacactgtctttcctgcctcaaaagcttttctccaagctgacagtggtggctcagcactcaggaggcagaggcaggtggatctctgaggttgaggccagcctggtctacagagtgagttccaggacagacagaggtacatagggaaactatgtaactctggctgtcctggagctcactaggcagatatgcagaccaggctgcccttgaacacccaaaaatctgctggcctctgcctctcgtgtgtgtgtcaccatgcccaactatttcctcctattaaaaaccattttgctttatatcataaaacgtgttgaaaatatttcttcttgaactcagtctcccaatgccaattttaccattaaattttttgcagtcattataatttctagaaccttttttggttctagatgtctttcttggcatttgagtaggttgcctgacgttcaggaagttgtgtcatttggttaagatgccccatttcgatcagtggctcctgctccctcccctgccaggaggacatttggcagtgtcacactgtcacagctaagaggatgctattggctcctagctggtagagatgctttgaaataccaagaaagcttgtcacaaggaacaattatctgtctcaacatgtctctagtgcaaaagtggaggatagtgatctgagagcggctgccccgactgtgaccactaaacgccaagacaaggggctctgaccatccatccactctgaagtctttccagacaaattgttcagctttgactggtgatggacatgatccatatggccaagatttattccatttagatcttagaggtaaagatttataaacatttaagaaattattgttttatcttattttacctaaaaatctatttttgtcttctcctagaaaagtcagagagatgagctggcacatgcctataattccagcactcaggagatggaggtaggacaggagggtcaagagttagaggccagactgggacacatcttgaggagcaggagaaaggttgggagacattcagtaatgtacttctgtacacacgtggggacctgagttcagatccctaacattcgcctaaaagtcaggtatgcgggcgtacgtcctttaaccctagcattggagagggggagacaggtgggtctcagaagctcactggccagccagccagccaattggagaacccaagttcagtgagagaccctgcctcaaaaaatgaagtagagagtggttaaaagagacatgccatccacctccaacctatacacatctacacacacgcatttgcatctacacacttatatgcactgattcacacaaacaggggcatagttaaaaagacagagggggggagtgtttactgaggtttaggggtgagcatttcagcaggctcagtttagatacgtggtggttagcactgatcacttgacaggatctagaaccatcatgaagataaacatctgggcatgtcgatattggcgttctaactgggttaagtgaggtaggaagagtcaccctagctatgggtagcacttgggctcaacaaaaaggaacaagtgaactgaaaaccaacttccactgatctctgcttcctggctgtcttagtcactgttctattgctgtgggagagacatcatgagcaaggcaactcgggaaagaaagcatttagttgggggctttcttatagtttcagaggtaagtccatggccaccgtggcagggagcatggaggtaggcaggtaggtatggtgctggaaaagaggctgagagctatttttttgttgttgttttttgtttcttgttttttttttcaaggcagggtttctctgtgtagctctggctgtcctggaactcactttgtagaccgggctggcctcaaactcagaaatctgcctgcttctgcctcctgagtactgggattaaaggcgtgcgccaccatgcctggcctgaggctgagagtttatatttgatccacagacacaaggcagagatttcgaaattcctgaatggcctgggcttttgaaatcttatcacccagccccagtgacacacctcctccaaggctacacctcctccaaggtcacacctcctaatccttcccaaacagtccacccactgagaaccagacattcaaatagatgtgcctatggtggctctcattcaaatgccacactgactttgggttaaatgtgagcagctacttgtgttcaatgccacactttccacaccctcaagctgggagctgaaataaaccctccatcctttaagtagtttttacctggtattttgccacactgatcagaccaacacaagatacaatgtggaaaaaaggagacaggaaggtaactaggtaccgtccagtgaattgtgaatgacctcaggaagtgtgggtgccatacagccagaactcaggaggagggtagggacagaagtgggcagaatatggatcgtttgggatggttgggggtggggcgagaggaaagcttccctgagtgtgtggaggagataattgtgagggagtggctaggtctatcaagggagctcttgagtttgagagacctgagtgtatggtccctcatggaagggaaaggatgactgaaggaacacgaagcatttagttaaggcataggtttgacttcaggttacaaacatccacagtggtagtgatatatataaaataaaacgttgggctttaacatgcactagcactaggtaggcaattctgggctggtgtggtctttcatagaccgtccagttcctccgctctaactgttcagctgtccctaagatatcattgcccgcagcagtgatgttccataccatgtctgaattctagcccagttacatagccatgcttagctaccagggattctggggagtggggccttcttttgggtggccatgaagccagttacaaaccatactggtgttcctgctgaataagagaatagatatatggggaccatatctgctgcagctggaggtagaaactctgggatcattcaggcaaaggcagctgaagttgaagctctgggtaaaactgactgggaagagcgtgtggagacagagaagggttagtcaggtctgatccctaaaaaagaagacaggatgggggggggggtaccatagggttacagaagctgagggaagaaggttcaagactgaaaatacaactaatgcccagatggggagattgttcagtgggtgagacggcaggaaggctgtgaactcaacatgttcaaataccaaaggtttgcctggagtgatggcagtccagtgactgagctgcagggtgctctttcggagcacccaggttccatttctagcacccacccagtagtggatcactgcacctctaactcgagtcctaggggaatctgacgccctcttctggcttctgtgggcactgcacacaggtgtacacaaacatgtgtgctggtagaacaggtgtatacataaaataaaacttaaaaaaaaaatgaagtggagagggccaatgagatggatcagtggaaaaaggcacctgttgccagccctgataacctgagtccaattccaagaacttacacggcagaaagtaaccaactcctgtaagctgtcctctgacgttcacatgcatggtgtgtgtgtgtgtgtgtgtgtgtgtgtgtgtgtgtgtgctgaatcagacagaccgtgttctaggaaaatagttggcggaaacgactgacctccacatattacgtgtgtgtctgacattccaatatttgggaaaatcaggcagggggactggtagttagacagaccagcccgggctacataacatgactttgtcttaaaaaccaaacaagggctagagagacacctcaggaggtaagagtgtgttctgttcttgcagagaaatcaggtttagttctcagtatccacatggtagctcacaaccatctgtaaacatacatgtggcacacatatgtaaatacagtcaaaactcccacacacaaaataaaatagataaatctaaaaaagaaattaaaacaaatccaaacaagaaccccaccaaactggtattcctcccatggaacctccccgactcctgagaattgtctctggcttttacttggtaaatttgcattcactgtggtggaacagagaaatctctaacaagactcctctgtcctcccaaaacaaaaattctttcagttcagtttttttttctcttttgaaaaggaatatcattattgtgccgctcaaagtagacttcagcccaaaggctcatgctagcgcctcagcccagcctgatgatgagcctggctctctggacctgcagacaccggcgcacacctggcctcaggtctgctggtttcaatccattcatcagtgggtctgaatcatgagcttttcctgacgacgcaaagacaaatgcctattcaccacagatagtaaacagaacacagaccaaataaacaacttacccacccaaatccagcgtggtgaaccaatgagtttatactcatggatgaatcaaaaccagctgcagtcaatgaagacccacctcagcatggggaataactggctggaagcgccaaggaactctcttctttctgacatttctcattacacatttatacagtctcgcaggggtgggaggtagggagtcgggggatggggaagcagcgggtggggggatggggagtgttccagatgggaaacttgagtttccaggagggaatatttccactgagagaaaataggagttgcttttgcctgcatttaggcagccgtacatactgtagaaatgcacacagagcaaaagcactcataggtgggagccatagagaccgaatgggccaggatactaacagctcctgaggtatacacccccagtgaactcccacaagccctgcctttaaaggtttcctcacctcccaacagagcaaccctgaggaccaagcctgtaagaattggtcttttccagatatttaagatccaaattttctcctggcagttgatgtggtagggtcaaggtccttgtatgtggtggtattactggctggtggttccgggtgctgtaggaaaccaagctaagcaaacggtgaggagcaaggcagtaagcagcatgcctccatggcctctgctccgttcatggatccgggcactgtgtctgctgcctgtgagttcctggcctgacttccgtggagggtggactgcgggttgtaagctgaaatacaccagttccttccaaagttgcttttggtcacggtgtttcatcatagcaatagaagccataactaagtcacttgggaagtactaaaaacaaaaactttcaaaagcagaaaacgttttctgtcaaccctgccggtttgggcttgtttgggggactgcctgaaaaattcagcaacccctgttctcacacctatggccttcataggtctaggagaataaatgtagtttttctcaaaaaaaaaaaaaaatccaaattagagtgccctcaagcttggtcttagtagtctccctctgatccagtcctgacaaagctgagctcacagcccctaattacaaagcttaagtaaggaatgtctgtctcaacatacaagcttagctttgacttagaattccagagggcaaaagtgctggataagcacacagtttggacacagtattgctgtatttgtttattgtgttttcagttcccaaagacattaaggaggagaaaaccatcaaaattaacaattaaaatgaagtggagaagagaaggtgctctctggcatgcctgttaccccaacccagcacacaggagagttgtgagttctaggcgacctcaaaaagggggcacaggggcaaaggtggggttgagagatggcttaagggctaagagcactgcctgctctttcagagaacctgggttcgattcccagcacccacatagcagctcacagccatcactactgttttaggagatctagtgacctcgtctgctctctgtgggcaccaggcacatggtgtacatacattcagacaagaggctcacacacagaaaataaaaaataagtaaatctttttaaaataaaaataaaaagtttgaaataaaaaaaagagtaaaatgcatctttcttttctttttttcttttttaccaagacaggttttctctgtgtaggcctcattgttttggaactcactctgcagaccaggctggcttcagagatctgcctgcccctgctgggattaaagatctgcaccaccaccacccatatttgcatccatatttttaaagagttgtttgattttagttacttatatgccgtgtgtctgtgtgtggtttgtacaaatgaaagagggagaagcttaacccgagctgaggccggaccaggccactctgtagtagggggaaagcttggtggccccatcgggtgccaagagactctgccatcccagaactccgatggcaagatgctaaggatgagtactgagccctgaaggggaggagtgggcagaggtgaggagtgcgaccgggactctgatctagagcagattttctctccatgtgtgtgcatgtgtgtgtgtgtgtgtatgtgtgtgtgccctacatgtatgtatatgctcatggagacataagagagcctcagatcccctgcaactagcgttacaggacccagcatcttctgctagagcatgctcatccctgctcatcacagccatgcttctccccagctaatgtgtctaattatctatgctcttactcattcctccctattgagctctgtgtacgctgcaatccaaaatcctctcccttccgtcccctttccctcacactttttcatcctttctttcctttgacagagtcttactaagtagcccaggctggccttgaacttgggatctcccacctcagcctcccgagtgctgacatttcaggcttgtcccaccacctctggctcatcctcttttcttttaacaaggagcagagtttgaggtcaaagtctccagtaggcaacactgtttccttagggcttcattgtctacattgtatttattttcgtgtttctgttttcttttgagtcaggttgcaatttggtgttggttagcctagatccctctgcctcagctctcagcttcctgagtgctgcgattcagccactggcaggcctggcctggcttttttttttttttttttttttttttttttttgaacttgtggcaagtaatactggaaatactgatttcccacttacagaggtcatacaaaaaggattcactttaaaacaaatttattaagcatacagtgaaccgatttaagtaaaaatataaagtaaataatgaaacaaaaagtaaacatacggcaggatcgtcatactcttgactgaagtttggaaagtcagatttccagatgccgaaagctccatcttccccactgcgaacccctctcctaaagaagttgtcagctggtgggcacacgggtattcgggactccgtttctatggtatggatcactgtaagtaagtctgccccacagcaaacctgcctctctagaccactccagcaagctggagggaaagatggcagaggctatgtttggggagtgacctttctctgggaaaaaatcttcattcccatattggaacaaactcagttctcgataggccatgcttgtcttaacacagaataataaaactgtactgtaggatgtgtgcagccataagtcagggggcagaggagcctactgatctgttttggttctgtgtcccaattccaggcaaggacagcctctccagtgtggcccatcaaatcccatgttgctgtttagtggccaaggccattatttgtacggaatcaaagacacctcctggatttgtcctctgtgttttcctggagggcctcacagtggtgggagagagtggccaggcacagatagggtttgtggctctggagagcaagattcttgccatctccagaccacatgactgacactcataactaccagctctgggctgatggtcagcatcccatacaggataggctgtcttaggtaagtttgtaccctgacgtgccatcttgaagccttctggcctgtagccagctagacttgccttcaattctcagagtcacgacttaggcattttaacctaagctgaacttcaggcaagccttggagtgcaggctgtccacactcttagcctgcccaccagccaggtgcagaagacagaaatttccacacaaaatttccagcgcaagggtcaggcctaaggctggagctgacccctgtagtccctctgaggtgggagttagtcttacaggtcctgaagactcagaagcccacgctggtccggccttccctcttccagaatgctgagatctgctccagggtgacccgaggctggagaccccaatcaggttccaggctcccttgcctcggcctccaaggcctggggctcccaacctgcaagccagcctctggcatgggctcagacccaacccagctcaccaggcttgtgtcatggggcctctcctcttgggtctgaggcctccagaaggtgctctgggctgggacttctggtggggtctgaggaactagagaactgagggaagagtatggggctgaagtggctggtggagcagttgctctgccctctaaggtgccaccgggtgttgggggacctggagccctgtccatcagcagaggcatggaggagccgtaccaatcctcagagcgctcccgggcgctgctcgtgggctcaatccacagttctcctccagggcgccagactagggtgggggcacgctggctggggtctggttgcgggcggcggaacaggcgttcggccagtacagcagtagttatgatgaagaaggctgtgagagaggccaggcccagcatgatgggaatacaaggtccacaggggattactacccacactgctgcctccgctgtaggctcagggagcccctccgtgtgcccagagggctgctgaggcgtcactggcatctgggagattcagtgtggactcagaacagtcagggaacgtctccactgggagaaggaaaggacagcaaccagaggatatcccgtttcctggaaagagattcaacaacggttctaacaacttgaccgtggcacaggatgagacagtgcttagactgcatgtcactgggactgcacatcattggccttttttttaaactgtaactttacttcagaacctcagagacagattgggagtcgggagtgctggatctctttgtccctcatcttgcgttcctgctcccacccccacccctacccactgttaattcggctcttctaattggcttattgagcatgggtggcaaaactagagaggagcaaagggtcccagagaggtcaagagcaaaccaggagaggccggagaacaagccagagctggctgaggctcccctgcacagtcgcaggccttacttcccctccagccccaccccccacctctgatgacagatcaaaggtctgggctctcaggtcttgcctcagtctcaagtgaggagacttggaatgagagagaaaccccttgctggcccctcccttccatatgcacctactctttgagccacctaaccgctctccttggaggtggccctgttgtgctatctggctgtaccaggtctgtggcccggcacctatccagcttccccagctctgcccaatcactggcctgtctgcttcccttgttggtatttgtccacatctctgccaccagtcccccatttgcagttgcttccgcacccctcacctcacctgtcaccttgcttcaatcttggatttcgccgttttcagagcccttcttcccagtgcatgccgggagggtgtgtgtgcgcgcagcgatctgaaaggccctggagggctggcctcagaagaaggcggaagggaggctaccacctgttgctgggcgactgtgccccaacttttcctgcccccacagagtgtttccaaggcaacctggggatgtggtcagtgtggtgaagaaccacttcctgtgtaaggtggagccagaatgagcagctgctttgctccagtcagtcccaccccacaggcaaggtccagaccccagcgcctttaccttgtcaccccaaaggcaagacccagaccccagcgcgttcaccatctcaccccaaaggcaaggcccagaccccagcgctttcaccttctcaccccaaaggcaagacccagaccccagcgccttcaccttctcaccccataggcaaggcctaggcgcgatcaccatctcacccaacaggcaaagcccagaccccagcgccttcaccttctcaccctacaggcaaggcccagaccccagcgccttcaccttctcaccctacaggcaaggcccagacctcagctcgctcacccaggggagaggaagattataaagaccggctcaggggctcccacagcgctgcgatgtatcttgctgcctgcttcttggagggtccctgtccttccgtctactccctgcacccttttcatccagctgtgtcatacttttgttttgtttgagacagggacttaagatgtagcccaggttggccccgaatcccccccccccccccacacacacacatacacactcccgtaagccttttgagtgttggtttcagtcccaggccactgtgcccaggctcatctctccactacttctgatacctaacggtgtaagcactatgagagtaattgttaccggtgttgtttaggccatcatacctttacatggtgtgcatgcagtgtctgcgtgtgtgtgtgtgtgtgtgtgtgtgtgtagaccagagtctacttaattgatttccaccctattattttattttatgtgtttgtgtgtttagctcacctgtatgcattttggttgcaagcatgcctcgtgttcaaggaggccagaaggggatgtcagatctcttggaagtgattgacagacagttgtgagccactttgtaagtgctaggaattgaacctaggtgctctgcaagagcatcgaattaactgctgaactccctctccctctccccttccccattctccctgtcccccggtccccctcctcccttctccccctataccctctccccctctcctcctgtccccctctttccttccccagtgctaagctaataggagcacttagctgagcttgcggtgcccatagttttgaagtgtgtgctaaggtctaagctcaggccctcatgtttgtcaatcagcactgttgtgttgtactgagccttctcccagcctttgttccctcctctgtcttctctttcttttttccagggtggggggtggggcagcggcagaggtgtttgtttgcttatgggtcatgctcatgctaggcaagcattttgccacaattcttcaccaccagcatttcaacatacatgtttttcatttgttttgagacagggtttcactatgtatcatttctagcttaaaatgctctacgtagactacagtgggttcccaattgtggcagtcttctggctaccttcctggtgctggggttatagggctgtggcagcacatctactcggtacacctactcggtacacctgctcagtacacttgctcagtacacctgctcagtacacctactcagtacacctgctcagtacacctgctcagaatccgaccccatgaggaagtcgagtttggctggttatacaagtccaagagcggatgaatgtgcttagatatactcgtgtaccccccacccctccccacccccccacccccgctgttgctatcttgtttctgttgtggtttttgttaccggacagactgtgtgtgtgtcaaccctttgtctctgactgtagacttagactgatgttgagacagaatttgtcagtgatagttaagaaaaaaacaactcagcgctgttttcccgaggaccggcctgctccggagcgtgagacctgggctgctcaaaagagttctgggatcacctgcagagccggactaagaacttccggggcgtgagccaggcgggcggacagtgcagcaagcaccgggcatctgtcaagtggttaagtcgaagcctctgtagcctttccccctccctgccagtgtttgtcgctcccagtagcctgcacagcaggttccctggcagcttctcattcccctgtcccctacatcccatctcttgttaacagaaaaagtgctttcattttaagatatcagtggtccggtacaggtacagccagctgtgagagctgcgctcccttctctgtcccaagagttttctcttctcaggcgccccgccctgaactgctggctgtaagtctgttcccagctccagtgagggaggcatccgcccacttggggcttctgtccaaagtaaagagcacctgtgagtctaactgtcaggctctgatagggggtctcgtttttttgtgagactagaaagtgccccaacaatctgaccaaacatgaggctgacaaagacagagaccagagtcagaatcagagatgtgcagtgaaaaaaaaaagataaaccaggatagaggcaaactatgagagaagatgagtgacaggatataaatatgataaatagcatccaaaggaaacaaagacaaggaagagaaacaaaagatatatatatatatatatatagagagagagagagaacattatatgagatctccattacagttaagaaacaggaacaaaaagaggtaaataacagagactagaacctagcaatgtggcacatgctaataatgctagcacttaaaaatgatctgtaagaaacaggaagccaggaaattaaaaagagataaaaaataaaataaaatactggccacaagagtcaggaaaactgaaaaacttagataagtacctggcaacaaaagaaaagaaaacttttggctaaagatcaatgtatttaccgtaaaaaaaaaaaaaaaaatgggcactaggtgagagactgccccaacaaaaaaaaaaaaaaagaggagccccacccccatgaccaaacccttccacctgtttgtggctaaaagtaaaaaagtaataaaaagggatgctaacacagaagctgagtccttaaaagaggccggtggcctacctgtcaaagcagctagactgtgtttcatattcccccaccgaccagtgcaaaacaagctaaaaaagctcctaggcactgtgggcttttgcagactgtggattccaggttttgctaaattaaagagataaacagcccttcgtatagactcagagattggggccctagaaagacctgtggcatatttgtaaaaaattagacctggtggctgtaagatggcctgcttgtctgcacatagtggcttctggtcaaggacacagataaattgactctgagacaaaacttggcacatgccctaaaaagtgtggttcagcccccctgactgatggctggctaacgctcacataactcattaccagactctgttcaattctgataaagtcacttttgccccccaagtctgaactcagctatcctgctcccagacccagactttcagcaggttcttgctgaggcacataggtgacatggagatctgacagaccaattactggagggtgcagatgtaacctggttcacagactggaacagctatcaaaaaaaacaaacaaacaaacaaacaaaaaaaacatactggagcaactgtggtagctggacaggcccagccagaggacacatcggctcaaaagactcaacatctacacagatagcaggtacgcttttgccacagcccacgtctatgggactatatatcaacagaagagtctactgacaccgaaaagaaaaagaaaataagaacaaagaaaaaagctggctctactgaagccctccacaaccctgccaaggtaaacatcctccactgtcctagtcaccagaagagagataccatgttagcaaggggcaacaacatgacagactgagaggcacgagtggttacagccatggccctgctggtgctcctgacaacggagcccgagtttgcctacacaacagaggtcttattccttatttccaaagattccagtcaccagttcaacaaaaacaagagactgtgatacacctccagggaaagaaaatcctgccacaaagacaagcagaagctgtgatcaaacagatgcatcagtggactcacttagaggtaagcaagttcatccagacattttccaagcctaagtaccatgtaccaggtttaaaacaccttgtggaacaggtggtgcacaagtgtgtgccctgccaaagagtcaatgtctgccacactatagtagatctagggaaaagacactgagaagacagacctggtgtctactgggaaatagactgaaaaaatatgtgtatgaataccttctggtgtttgtggacattctcaagatggatagaagctttccctgtaaaaatgagactgctcagatagtcatcaaaaaattattaaaaaatttttttccaaggttcagagtgccaaaagcaatagtgtcagataatggccctgcctttgttgcccaggtaagtcagggtgtggccaagtatttagaggtcaagtgaaaattatattgtgtgtacagacctcagagctcaagacagataaaaaaataaatagaactctaaaagaggccttgacaaaattaaccacggaaactggcacagacttggtgctccttccccatgccctactctttttgagatcctttatggggctcccatgcccatcactgtcttaaatgatgtgtttaaacctatgttgttataataatgatctgtatgctaagttaaaaggcttgcaggtggtgcagaaaaaagtctgatcacaactggctacaagaacgagccgggtgccccaaagacatctcatcagctccagccagaggtctaatctacgtgcacctgcatcatgctgagaccctcaagcctcactaaaagggtccctgcctagtcctgtttactatcccttcttattctgtttttgttcccaggttaaagatacagtagtatgatttctattttccacatagaaatatagacttctaaaattctaagattaaaattacttagtagaagaagaggggaatgaaagaaaatgagattttgtaacttgtgattcatgtaaaagagttgtccatgagctcagatgccagggcagggctcttgactgtaaagattaaaaaaaaaaaaaaatgcaaggacgcaggaaaggctatcttgtctgagtcgaaaccatctggctggaacctcccctctgtctattgccccttggcaccgggtaaagtcatacatcaactggttgctatgtgaacaagataagcccccagcccacaggaacaaagtcctgatgcccttttgctgctgctgctatgctgaattccacacccctaagcccctcaccccataaaaacccctagctttcaagcctcgaggcctacatccgttatctcctgtgtgagatgtatgtcggtctggagctccatcattaaacgacctcatgtaattacagcaaaataggtcctcgtgttcctttgggtgctctcacactcccgagactagagtggaggtccccaaaagggggtcttacagtgagccactttgtaagtgctaggaattgaacctaggtgctctgcaagagcatcgaattaactgctgaactccctctccctctccccttccccannnnnnnnnnnnnnnnnnnnctccctctccctctcccctttcccactctccctgtccccctcctcccctctccccctataccctctccccctctcctcctgtccccctctttccttccccagtgctaagctagtaggagcacttagctgagcttgcggtgcccatagttttgaagtgtgtgctaaggtctaagctcagaccctcatgcttgtcaatcagcactgttgtgttgcactgagccttctccaggcctttgttccctcctctgtcttctctttcttttttccagggtggggggtggggcagcggcagaggtgtttgtttgcttatgggtcatgctcatgctaggcaagcattttgccacaattcttcaccaccagcatttcaacatacatgttttttcatttgttttgagacagggtttcactatgtatcatttctagcttaaaatgctctacatagactacagtggcctcacaattgtggcagtcttctggctacctttctggtgctggggttacagggctgtgtcagcacatctactcggtacacctgctcagtacacctgctcactacacctgctcagtacacctgctcactacacctactcactacacctgcttactacacctgctcagtacacacatactcagtacacctgctcagtacacctgctcactatacctgctcactactccttctcagtaaacctgctcactacacctgctcagctcttgggttttttcccccacatactcaactctttccattgttattcatattcaaaagttatttattaagccaggtggtggtggcaaatgcctttaatcctagcaattggaaggcagaggcagggggtttcggagtttgagggcaacctggtctacagagtgaattccaagacagccaaggataaccagagaaactctgtctcaaaaaaacaaaaacaaacaaacagaagaagaagaggaagagaaggaggaggaggaggaggaggaagaagaagaaattggtcaagatagagccttggccaagaaagattggtcaagtatggcagcacacgccagttatcctgtcatttggaaaacaggtaagattaccaagtgtttaagaccaacctgctctatccagcaagttccaaggcagctaaagccacaaagcaagagtctgtcagaaaacaaataggaaacaaaaaggtctagatggtaagctgtgtttgtcagtatgaggaaaggatgtttttagttaaaaaaaaaaaattcaaatagaaaaaaaacaaagagccgggcggtggtggcgcacgcctttaatcccagcacttgggaggcagaggcaggcggatctctgagttcgaggccagcctggtctgcagagtgagctccaggacagccagggctacacagagaaaccctgtctcacaaaaccaaaaaacaaaaaaaaacccaaaaaaaacaaaaaaacaaaaaagaacaaagtagagtgacccacagctgtagtcccagtccccaggaggccagaaggaagactgacagcctgggctatagagcaagaacctgatccaaaagcaaacgaacagacaaaaatctaaataaataaatgaataaaacctgaagttttaattcttttttctgacactgggtctctgtggatcaagctggtctccaacccactatgtagcttgacttctgatcctcctgcctcaccttctaatcgcttgggttatgggcgtgttcagccacatcttgtttatttagtgctggaaccaagaggttggtgcactccaggcaagatgagctacaccccaactgtcttttaattactgtttaatcataagataaagacaaacttccggaagaggaaggtcagatatgattttcatgttgagtcaagctattttgagtcttattttccattgcctaagttaaaaatttagcagtttttttttttttttttttaaagatttatttacttattatatgtaactacactgtagctgtcttccaacactccagaagagggcgtcagatcttgttacagatggttgtgagccaccatgtggttgctgggatttgaactccagaccttcggaagagcagtcgggtgctcttacccactgagccatctcaccagcccaaaaatttagcagtttttactgattcttttttaaaaagaaaaaagcattatcatatgatccagggattccatgtacacacacacactcatgaactagtagatgttgttgagatagcatcttgctatgtagcccaggctaaccttgaattcacaatcctcttgcttcagactcttgagtgatgggctagccatccttcagccatgtttactggcttctgtagcatggggacctgaacctgggtgtctttactcacagatatccacccaatcatacaagtgttccaggaaggaaacaggaagccactcgatttgtgtctgaaagagtggccctggtaagtctgggcagaagcctcctgctctggtgataggtgttcaggaatgagcctgactaggctgtaaaactcagcgtggagacagcaccacctgctaaaaatccaccaaaggcctaatccatagctctggggaagtctttaaatagctcacacctttaatcccagcactcagcaggcagatttctgagttcgaggacagtcaaagctatacagagaaaccctgtcttgaaaaaagaaagtcctaaccttgccttattgacttctgtagctctgcttccagctaactgttcttgttaactgaagtatgccaacctaggacacagtttttgtgctaaaagctcaccctgagaaaggcttagcctacactgggatcctaagcaccccgtgaagtcaccagtcagccaataaaaactttctattggcttaaacccatttctaagaagccttctctggtgtataccccacaacacactaaagttttccaagtgattccaatgtacagccacagtgcagctcccctgctctggtctctcttttctgagtcccacagcatctaccccactagactgactggcatgttttgaggagacatcttcctgaatgggcgaggttccactgatgacacccccttcagttcctttcctcctgggttgaatgagtcactgttgatggaccgattactcctctccatttttattttgttttgttttattttgttttgaatcacgctctctctctaggaagcgcgagctgccttcagatgcgcttatcttttgccttcgcctttggagagctaggattgcagctgtgcctgaccacactcagctttaactaacgtttccccttctaaccttagagacacagcccaaggcctggcaaagcttggtcagcactcggtcaccaagctacatctcagacctcccttgggacttagaaccaaaactaaatctctctctgagggaccaaatgtgttacatataaaacctgccaactgtctatggccctctcttgcatttgtgggtagagaagtggaggaagccttggggttcagaggagaattctgagggtgtccatgaccctgaatgtgagttccaggtgctttctgtcatccggatagaatcctgtctttgagtcctgtgtcccagtaacacaattctctttgtgctaagtcatttgaattgggtttctgaggattttcactgatctgttttggaggtttgtgttgtgtttgtgttccaaagaccagctttgacaccaaagggtaaactgaggcaagcagccgctgtggggattggtgttgagagtggctgacggggtccatccagatactgatgggtactgctgccaatggcagccagcccttagagaagttgctcagcagccttttgctctgagggaacaaagcctgatttactggggctggcactccctgtggcaattgaaaactctgaagtcttttcattccttgggcccagcaagaaagagaagaaaaaattcacacacacacacacacacacacacacaatggatgaaacaaaaggcagcattcaataacttcatgcacacaaacatatgcatacatgtatatacatacatgcatacattcatacatatgtgcacacatacatgcatacagacctacagacatatatacattcacacatgaattgttagggcaaagcttcagcaaatatgctccaggcattcacacacacacacacacacaactggtgggtggagcaagctcctgcacacactcagacaagcatgacatgtgtacatgcacacagatttgatggatggaacaaagttccaacacactctcacacaaaccttacacgcatacacacagacgcataattggtgggtggaaggagcaatgttccaatccccgcactttagtctttcttccacagtgtgtatcccagcgaaatcttccaagcagtaagaagttacaatgtgcttacattttagttttcttctagagaatggttgtggaaaaaacagtgtgttccccaatacaagagagagccagtagcaaattacattttaaattattcccaagaacacgcatacattcataactaagcaacttgttatagattaacaaagtgtaagcaagcaaggtcgttttctcagccagtttctcttcctggcaggcaacagtttgtggcgataaaggaaggggtaactattttttattatttatcctaaaaagtaatcttataaagaatctttaaaaaattacaaatctaaacttttttataaaaatcagtcatatccatcttaaatcttcagaatgcatatcttctcatcagcaatttttattaaatcatattaggaggctgagggcaaaaatgggtataaaacaccaattatcaccagtccagccccagtgagagtcacgtcagccagtgctgccattgttcttgttccctgaccataaaagtccctcgcttaactaataagagtgtacctttctgaacttcatattgttccctaagattttttacatgagagtcagtagtaaaaccatctcaccctagctctgtacatgtgtgtgtgtatgtatgcgtgtatgtgtgcatgtgtatgtatatgagtgtgctcccacagctctatatatacatgtatttatactatcgtgtgcccgacatggcagaatccatggtgacactgaatgagtggggctgcagatgaagggcagccatgactgtgttgtggaggaagtccgctgctctaattaggcttttctgacttttatgaccaaatactcaagaaatttaaaagaggaagcagttatttggttttataggattccactgtcatcacagtgtgtgtttggggctggggttggtaaaaacaatttacatcaaggcatggcggtgggggagaatacaggaaggtgccagagctaaatataactcaaggacacttccactgtgacctacttcctccatcccctccctttcacttcttcccagcaatgccccgtattatcaaggaacagagtaggtcataacctcatggcctaatgaccctgaaaacaccctactagacatgcccagagttgcatgttattatcctagagagttttttttaaattaggtattttcttcatttacatttccattgctatcccaaaagtcccccataccctcccccacccactcccctacccacccactcccacttcttggccctggcgttcccctatactgaggcatataaagtttgcacgaccaatgggcctctctttccagtgatggccgactaggccatcttttgatacatatgcagctagagacaagagctctgggctactggttagttcatattgttgttccacctatagggttgcagatccctttagctccttgggtactttctctagctcctccattgggggccctgtgatccatccaatagctaactgtgagcatccacttctgtgttcgctaggccccagcatactctcacaagagacagctatatcagggtcctttcagcaaaatcttgctagtgtatgcaatggtgtcagcgtttggaggctgattatgggatggatccccggataaaaaatatggaacgtttcacgaatttgtgtgtcatccttgcgcaggggccatgctaatcttctctgtatcgttccaattttagtatatgtgctgccgaagtgagcaccctagagagttcttaattcaaccaagttcacagtcaagttttttttcatatccttcttgggaagaacgtaggctgtcaacctgatctaagttttggctactttggcagtgccagtaaaactataaattcaaagagtatttatagggcatctactacatgtcaatcaccagactccggtgaacaatcacacacaggctctgggtaagtgctcagcgggagacggcaacaaagcaatggcagggccagggtcttgattctgagcaaccagtgcagcccaagctcctgctggtcttaacacatcctacctagcgaggtaccactatgctgcctgtgtatcttcaaataggttcccaggataaaaccctgaatatttgggaagtagacagaggaaggctggttttccccaataggccctctctgagggaacagagctggaggccccaggtcaggactacactctgtctcataaggcccagctggtacttagcacagagacttagagaaacagaaacttgagagttgaagctactcctgggttttttaaaattatcactacattttatttacacatgtgtgcacatacatgtgaaggggcatccacactcacagaagccaaaggagatcagatgtgctgctttatctctctctactttattccttgagtcggggactttcacagaaccgggcaagtaggctggcggccaaaaatctccagctattctcctgcccatgccccaagctccgagtgtacgggagtgtgcacacctggctgttacacgggtgctggagatttgaactcaggtcctcatgctcacagcaagcagaaccatcttcccagcacgccatgatgtgtgtgtgtgtgtgtgtgtgtgtgtgtgtgtgtgtaatttttttgcttgctttcagcctaataggcttgctgactgagtgagccctggaactttcctttctttggcctggatcctactccccagtctggccaccccttcttcacagttctccagtggcagcccagaggtccgagcaggaaacagctgggtgctctgggtttctggtgctcctaggaagttgtgatttagcgagctcagtgtgtgcagcgtcagcctgaccacatgtcactcgacacaggttggccacttcacactaagggtttagtggccagtgcctgaccctatgacacacacagtgccatgcatgagatgtccccaaagcagaagaggaccaaagagacagcacacctctccagactccaaccacatgtgacagcttgacaataccaaggctcgtctcccacttttgttggagatggatgcaccagtgaagctatcatgcttgaggcctggacagatggctcagcagttaagagcacttgctgctcttgcagaggacccagccatattgagcagcctgcccataacgccacttccagaggactcaccatctctggttctgagggacctgcatacacagacatacaatgacacttaaaaaagatgtacatgttaaagaaactgaagactgggctggagggatggctcagtgcttacgtggttatggtggctcacaactgcctgagactccagttcccagggatctgatgccctcttctggcctccatgggcaccaaacacacaaatggtgcacaaacatgcagacaaaatacctatacacataaaattaaattaaatttaaaaagtggcgcacatgccattaatcccaacacttgggaacagatgcagggggatgtcttgagttcaggccagtctgctggtttacatagagagttctaggccaatcagagctacacagtgagaaagccaaaaaagtaaaaattaaaattttaaaaaaaaaaaaagagaaagggaagaaagaaggaaggaaaggaagtcatgttggggctagtgagatgactcagtaggcaaaggtacctgccaccaagcctaagtttcatttgtgggacccacatggtggaagaagaaaactcattcgaataagctgtcttctgaccttcacatgtgtacttgccacacacatgcacacactaaataactaaacaaatgcaaaatttttaaaagaggaaaagactatgcttactccttcttgctgggtgtgtggggaaaggacccagaaactaggcagggagtcagagcggaggatagaatacatttgctgttgggcccctccaggcctccccaggccccccaggtcccccaggccctccaggcttacctggagaaggatcgagacttgggatatctgaactgcagctagcccagtgctttgtgcatgagaaccacatcacggctatgtgacttgctactgccaggaagtgctctgcctgtcatgaactcactttcagcatagctcaaagtgagtggcttttagggaagtcactgtagtctgaactgattgggcatgggggtgtctgggtgaaatcctcacaggagcaccctaagtgagcactggggagactggagtaccctctctctgtgtctgattccagagagtgagcagaaggcagacttcgtgccgcccattctaccttatttccttgggaacctctagacaggaacttgtaaagtcaaagtcactgtgtcagaggaatgatgatttggggttagggagacagcatggtctgtcacgcacacatgaagaccttagttcaggtggcacacatttggaatcccagcctgggggacagaatcaggcggattcctgggttctccagctggccggcccagtctgctccgtgagactcaggtcaggacaaaaggcgcacggagcccgaggacacccgagggtctctcatctcctggtggtgcgttcgcagctgtggctaatactttcttatgttttagtttgtattgacttttgttttgctggtgttctgagatagaatttcaatatgtagtttgctaagctccctattagtagtttttagtcagcttggtctgtctccaaaagcaaaacccagcagaccataagcttggtgggaagctcaaaggttgagagcccgctggcattactggaccctgttgcgctgtctcgctaatggatgtggtgtcttctgaataattaactttgtacatggagagtgttgcttccttccagtgttggccatgaagggctctctctgcagtggtcagcggttagtgcagagactcataactaaagcactgacagtaagtgactgtttagcgctaaaccacaccctcctcccaggctctggaatcttggcagggagaggtaaaaaaaaatgtaagagatttcagggtggcagggtgggaaggcaggctgtgagacactgtcttctggattgacaagactgttgcattcctaaactcagaccagcagtagttatctgtacaagactgtacgagactggattccttcatcccaccatggacggggggaggggtccacgaggccccacccctctcttagaaactataggctgttagtggtagctgagggctggggagctctaatttcaatgatatccattggtaaattgcccctgcttgagtcaataattcccaactcccttcccacgctcatacagggaaccctaattgaatgtgtcaagggctctgggtttgatgggagaagtgagtaagaaagaataggccatgcatagtggctcacatctttaatcctagcagttgggaggcatagcgggtggatctctgagctttttgggccatcctggtctacatagaatgttctaggacagccagagctacagagggagattcagtttcaaaaaccaaacagaaagaaagaataatgggagctggatgtggtatacacacctttaatctgagcacttcaagggagggcaggccgatctctgtgagttcaaaaccagcctggtcaacataagcagctctaggctctagggctatgtagcgagcccctgggtaatctgtttactttctgcctctttggatttgcctatgctgggcattctgtataaatggactcatatgctacacaatcctttaacggtggcccttttcatgggacaaaatcttttcagggttcattcattctgtagtatgcatgagtgtttccttccatttcattcctttatgtgtttgtgtttctctctgtgtatctgtgtgtgtgcctgcatgcgtgtatgcacctctaagtgcaggtactcacagaggccagaagagggcatctgatcctctggacctagagtgacaaagctggttgtgagctagccgggttggtcctgggagccaaactcaggtcctttggaaaagcacaacatgtttttaaccactggtccatttctgcagtcccattttattcctttttatttttataggatattctatatatgctccattttgttcatctagccactgtttgatggacacatgagctatcgcacttcctggctctcatgagcactgcagtgaaaatccatgtgcatatctttgtgtgaatgtgtttccagtttatcttgctgtgagggtttgaatgataacagcccttatatgttggaatacttggaccacagctggtaaatctgtttgaacagaataatgaagtgtggccttattgaagaagatgtgtcactgggggtggacttggaggtttcaaaagcccacgctacttctagctagctctctctgcctcctacttgtagattggatgtaagttcttagttcctactgcagtgcccttcatgcctgcctgctgccatgctcctcaccatgatggtgatggactcagcctctgaaactctaaaccccctattaactacttcttctataagtttccttggtcatggtgcctcttcagagcaatagagaagtaactaagacacttggtccattcctgggaggagatctgcttggctccatggggactgtgaggaatggtgggtgagaacatttataacaattaggctcatctagttccaactctgtactcagaactcatccttcccatcaatgacagttcccacatgtccccagccccaaagtgtggagaccaccagactcaagcaagaagagattgacagcaggtggggagtggggacgtaaggtgacaaggaaatccctcatcaagtctctggatccctgcttgctcagacctcctattatggctaaatcttgaacatttctcctcctttttcattcatttactttctgtctgtttgatcctcttgtttgtttgtttttgttttgtatatatttagggacatggtcttatctagcccagactaaccttgaactcattcaaggtcagctcaaggtcatctgaaaatgactttgaacccctgatcttcctgcctctacctcccaagtgctgcaattataggtgtgcatgtgcctggatctgacttacaattccattgtggatatccagcttctaccaagctcatttctctgctgaggatggtgtgcctgggcctcactacacgtccctaatgatgggatacagaaacgtaatataagggagatgggttgtggttcagacagcaacatgagccaaagctaagaccgtcaaacacacgtaggtggaaagtgttttgcatttcaaatatttagcttcagcacacaaaagaaaatggggccaaccatgagttcttcctgtgtatatagaagtcggtacagccctggcatcttctgaaagacacaactttatggtgagaatcagggaaggcaggctcacactgaagcatgcaagccggaggctgccacatcttatcttatagttggagacttaggtgtgaagggatccagcggttcgtctgggatgggcattatcccatatcacctgccacggtcttggttttagaactgagccctttgatcttgagaaaacttaaaaaaaaaatgccatacatctagcaagtgccagagcagaaagggaacccagaccccctctgctgagtcaattcctttcaaacctgccaatcaccggaaacatttgggtcttctataagagagtccaggcactcctatattttcttaccctaatctctgaagtaatgactagcccagcaaatagctccagccctgtccttggaataaagccagggctgagctctagggagttctgtcactacacagtgtctgtcttgttatcctccagggttgtcttaaactggtcatcaagtccctaggttttgagcctgctggcccattgtgccgacacccccttcccctggagctcatgagctaggtggagctgtcacgcatgacccaccttctccgactctactctgcttcctctaaaattgacctgacagtgaattgttcctgactttcactctaggatgggccacacttatccttcagccacatcttccttgtacattctccgcagtggaccattacaccattttcctttgtcttcctgccaggtgaggacagggtctctggatgctccacagcaggaagccgacactcctgctagcagctggaaccaagtgtgagtctatgagcctaacaattttctaggcgtacctatagattttattcaatcctgtaaagtgcaactaactcgtcctttaaccagagcctcgtgcatagtaggcacacaccattgagcaaaaccctcagcctatgtccttcttttactaatacaaaaaaacaggtgacacttttaacaaccagccccaagtgacagaactggccttcagcctacatttttctgtcttgatttactctcatctggctctaaggccagactccaggaggccctcggcagggagaagagttagacccgcatgtgtcaggagggctaaagaggaggcaacagagcagagccagtgaggttacagaagcaatttttacaatccatgtagatcccagaggaaagagggccaatgggaaggcacagcatggcgaccaaccactggcagagatccatgcactaacgccttgcttgcagcctatggtgttagccatgcagagtttctggggattgctaagtgctgggtttagtgcaagcaggcaaacattccaggaggtgccgcagcaactgagatggtcactgtggtatctgcagactattcgaagtgagagggtctgtgggggaaatcagatagggggtggacaccaagaggcaagaatctggattaatcaaactgagaaactggcatggggaggagcacagggcagcaccaggatggaaaggcctgctcctaaagaggaagctaaacacattcaaagtggatggtgagacggaagaccataggacatccattctgacgtgaggctgaaattctttaactctacgatctggcatctgtgaacacccttccctggccacaggcagagttagccccatgctgtgtctggctgtgcctgagcaggtccctgtgctgtgaagagttctcccttagtgtctgccctttgggaacctgagacctcctgggcaggagacactgactccacacgtccatcttccagagctgtcagcctcgagttcaggctgcttttgcctgtgtggttggctctgtggtttcttgagctttgggtcattattttttttttctaaagtgaatgggcagacaaaagcagagagagggcttgagaggtgcacagtggtaagaggacagtgtgcattgtgtttgttacagagtaaagtggggtaccctctaccgaggagggtggactgtggccaaaaggacattgcaaagaaaaaacacccttgatgtgtgtcaccgtgcagtgagggagcttgtgggggctacaacctgccacctctgctaaagcaaacagggagacaaagattactgggtgagatggtttattctagtccaggtccttttctgaggggggttttcctatctaggtgactgacagaccttattagatgaactctttagaaaattattcaggcttgtatgctacgcctatgctaggagcttgacagagcttgattggcttagactaggggtataattcagtgaaggaatgccatgcatgcgtgtgcacacaggcatgcacacacaaggttaatctggttaacagaaactggagcttgctaggtctcacagtgggtaaggactgcatcccatgtctctttataatacagtgtccatgagatgctcccacccacttcaagcttgacagtttgaccagagcgagaatcttgaagaaaagacacagacctgggaaaggccaaggatgatggctgaacagaagtctcagtagcacatgccagccccaaggcactgcctcgcctattcattcaacaatcctttatggcatggctatgctgggccaggtgtgatgccttagctcatgttggcaatgaagagatgaatcagtatgagtaacctgcctagaatgagtttagtttagtggagggggcctctatgcaaacagataaattacagtgcagggcaattagagtcatagtagagaaatatgagagtacaaggaatgtatttaaagtaaaggtgccaagaaggaagtggaggaaaccagctggggacagggtgctgagcaccctggagagcaccaggaggactgaacccagggtgtctgaggtagctggatttcgaataagcaaagagtgaggtgaaaacctgtagacagccacacgctgagctgtggagaacaggagatgagacagggtggcccctcttcagcctggtgaggccacttttgcttgctagagtcctgtatccattggagcagttgaagaaagcagtgttgggtttgtttggcaagactctgatgccttgtctgccagctctgttaaaagggaagtagagaggattttccctaaacaggtagcagagctctcattgtttggcaacacatttacttgggttttcttatgtaaggttttgttttgagatagggtcttagtctggcctagaactccctatatattccaggctggcctcaaactcacagagatccacctgcctctgccttctgagtgctgggattaaattgtgagccagctgctcacatgcctgcagcctcctctcttactacataggatgagcaatccgtttatttatatgagctacggatggcgacttactttctgggatttgatcttgctcacacagaactccagccccttgctctctagcacatagctttttttttcattttcaaaatatatttattataattaatgttctttaaaatttaggtgtgcaaaagagagtgatcaaatctgttttattgaagttgcctctgatcattgttttgtgactgtagattttgagttccatttttttttcattaggtattttcctcatttacatttccaatgctatcccaaaagtcccccatgccctccccccaaccctcctacccacctactcccactttttggccctggtattcccctgtactggggaatataaagtttgcaagtccaatgggcctctctttccagtgatggccaactaggccatcttttgatacatatgcagctagagtcaaaagctccggggtactggttagttcataatgttgttccacctatagggttagcacatagcttttgctctaccgcatggcccagtcagagtcccaagcaaagtcctcacatgcaatctcaggcacaggattctttgtattgcctcctggaactcagcctttgtgtgtgctctgagggtgatctcagcgttggcagcaggttgtcccagcttacacttcttcttgcccctgtcctatggcactgtgtcagtgttcttgagaggtgcccattgattgtcactgactggaaagagcctctctctatttaaaaagatctatattcatttatgggcatgtgtttttatgtatgacacatgtgtgagactgcccatggggaccagaatagggcatcagaccccggggatctgaagttgcagttgggagccacctgatatgggtgctgggaacgaatctctgggtcctgtggaaaagcagtcaatgctcttaactgctggcgggtctctccagcctcgtgtttggcttcattcaaccctgactggccttaactgtgctccatagctgagcgtcttagggtttcattgctgtgagtagacaccatgactaaggcaactcttataaaagacaacatttaactggggctatcttacagtctcagagtttcagtccattatcatcaatgcaggaagcatggcagcgtccaggcagctgtggtgatggagaaggaggtcttccaaaggcaaagactgagttccaggaagctaggagaaggatctcaaaacccaccttcacagtgacacacttcctccaacaaagtcatacctactccaaaaaggccacacttcctaatatgccactccctgggccactacattctactccctggtcccataatcttcttcaaacacacaagtctatgggggccagacttagccaaagcataataaaaaatacatttagtccaactccaaaaatcccatagtctgtaaaaattcaaagtctcttctgagattcatccaatcacttaattgtaatcccttataaaatcaaaaaaagtggatcacatacctccaccgtcacaggatatatattatcattccaaagctttatactgaggaaatactggaccaatgcaagaccaaaaactagctgggaaaactctaaattcagcatctccacatctgatatccaactcctttctgctttgttgactgcagcacaactctctttggtggctagttccactccctgttagtagttttccataacaggtatcccatgactctggcatctcaaacatcttggcgtccccaaggcaacattgaagttacagcttcttgttccaatgtctggtacccacaaattatcttctgggttcctccaaagggtttgggtcatatctctagctttgcccactgtagcattccagggtctggttgattctactccactgttgctgctgttcctgatggtcatcccatggtactggcatctctaacatgatggggtttctcactgcaactaggcttcaccagtagcctctcagaggctcccttcatggtgcccagcctcaactcctctgcatgacgccttcagttctgggccatcaactgcaactgaggctgcaccttcaccaatggccttccatggcctcccacagtgccaagcctcagctgttcttcatgaccccttcatgccttcagaaccagtaccacctgggtgactcttacatgttaccaaatccagctgaagctgaggtacgatctcagcgctctctggaacacagcttctttgtgctctcagaaaacacttcccagaataatttaactgaaactggcttacaggttcagaggttcagcccattatcattaagacattaagcatggcagcatccaggcaggtgctggagaaggagctgagagttctacatcttgttcctctttgaaggcaaacagtagaaaactatctttcaggaatctaggaagaggccaggcagtggtggcgcacgcctttaatcccagcgcttgggagacagaggcaggtggatttctgagttcgaggcagcctggtcttcagagtgagctccaggacagccagggctacacagagaaaccctgtctcaaaaaaccaaaaaaaaaaaaaaaaaaaaaaaaggaagctaggaggaagatacactgatactcatactaatttttgactctcagagagatgtaactagattgtgtgtatgtgcacgcacgtgtatagttctctttcttgaccatgttaccttaatagccctttctttcatttcgcctctctgagacttggatcctttaaatcagggtttgacaatggctggaagtcagtcttttgaggcttctttaagcccaacagaaaatatagaccacacctatgcggggaccctgcctgatctaagggacattagaaggtccaagcttagaaactagagcttcatcattcagtagactgggaagaaaagatgccattcttaagaatattcggacagtcaagcacacagcagattgttacatgtaatgctaaggctaacacccgaaagtagatacactctcttccactgagaaccatgattctaataaccaactgaaacttaaggcgtgtgctgtaggaggtcaggtaggaagtgagagggctcaacaagtaagacacttgccaccaagcctggcagcctaagttcagtcctcaggacccacaagtgatggtcatggatcctctgaaactgagagcctcaaaggaaatgctttcttatattaaaaaaaaaaaatgcacataagacagacagcctggggctactgccaaaagatgactgactgcgcctaacttcacttctgagtttagtagtaaagtctgcagaacgataccagcaaggatcctttgtgcacagttgaaagctctgtatgttaaattgcctattatatgcttagttaagaaataaaattagatgcttaatggtcatggcagtgaaaacagacttcttttgcccacctcgaggatccccagggtgggttgtagttttcagccagcacccctgccaccacaggcatctgaaaacacacctatctcatgtatcctgcggcaatgtcagccaggagttgctaaccataaggcatttgtggtgccgccaagtgcaagctgtctaattccaagtccccaggtctaacgaacagtgattccaaacctgcttattttacaagtaccgctgaagaagatctggtagcaagcatccgtcctaagtgtcgagaatctccacaggcaaattcccatgtcggtaaagtgaatgcttttgtttccctagtaaagtcaagccagatgattcaaaatatcttcccttatatttacggttagcctctaaaattctcagatccataaagcacagccattaatcagagtttagccacagaatatgctcaagatttctgccatggctgggagtgatatttataagccacagggaagcacttaaggcttttggttgttggaagtgtggatgactcccaccgttcgtcattgatgagtcacaagagctggaatcagtcacgaccttataaaggggacaagccaccaggcagacaagagacattagaaatacacagccaacagtcatctcatctttgctgatgtctttagcatgcttccatgccagtttaaagggaatttgtctcagaataaacaagatttagtgaaattgggctaagcaatttaaaaagtttaaagacatattgatgtcatctgctgaaaatatgacaaaatccaaaagagtcattctaagcagaaatctggtggtaaactagataagagggaaaccatacacatacgcagttgttgaatgtatactattccattagcagtgcctcaaagaacaccaaagaaaggggcagcaaggtggcgcaacagctcaaggagcttgcagccaaacctgacaacctgagttcgatcctcacgccctacctactgaaaggagagaactgactctgcaaggtgttctctgaccaacacacattgtggcattcaaatgcatgtctgcccagagacacaaatcagagtggagtgtggtagctcaggcctgcagtcccagcactccaagaaccaggagttcaaggtcattctcggttacctaacaagttcgaagccagaccaggctacatgagatcctgtcgcaaagtaaaacaaaacaagcagattagatcggacataaaggaactggagagaaggctttgtggttaagagcaccagctgtccttccagaggaaccaggtacccaaatggtggtcaaaccctctgtcactgcagtcccaaggagatgatgctctcttctggcctctaagggaactgcattcacgtggctcagacacacatgcagttaaaaacaaacaaacaaaccatgaactaaggttctaactaccagcagatagatgagtgacacctgccttcacatctcagaactcaaggcaactttttcgcttggttgaagagaacttctcagtctctaatggtttgcaaacgtatgtactcttcgcctaaggttgttcctgagcctggggtgaccccaggaaggtcagatttgttttagcaacatggacccatgaagaatatccctgaaaaccagtgctggtagtgcaagactgtcactccaggtacttaggaggctgaggcaggaaagttaataattcaaggcctgccttgattacagagatacgtgggacgtccgttctctccttccaccatgggatcaaggtaatttagtgaatgaagagcatagagagatatagtggagtgcttatcttccatgcttaaataccaaggcctgggatgggcagggggagtcaagaagacctggcaaggtcttcttctttctatacaggaagaagagcctcctcattgaaggctctagtttatgtgtatgtatatgtatatgtatatgtatatgtatatgtatatgtatatgtatatacatgtactcttgtgtgtgtgtgtgtgtgtgtgtgtgtgtgtgtgtgtgtgtaagatgtgtgactgtcacaatgtatagaggtcataggacaacttcccatcatgggttcccaggatgagattcaaatgaataggcttgctcagcaaatgcttccccctgttgagcatcgtgcagatgaggactccttttctgggtttttaaccatatggcctcccaggcacgtatgtggctcaccggctttaccatcaagatttggaagaacttcattaccatactctattttttatttttttcaaagatttttttaaaaaattaatttatgtgtatgagtgttttgtctgcatgcatgtatgtgcatcatgtgcatgcctgggcccaaagagatcagaagaaagtgttgggtctcctaaaattgaagttatagatgtttatggccaccatgcacagctgggttctccccaagagcagtgagtgctggcagctgcagagccatcgctccgacccatgtcaccatattcaaataaggcatgctatatttgtactaaacagattgtcattattaggtcataggttagaagaagccttttgtagtctggtgtagtgaaaccattctttaagcccaccatttagtaggtagaggcagggcgatgaagagttcaaagccaccctcaattctgcagtgaatataaggccagggtgggttacatgaatcccggcctcaataatttttacagtcgagcataaagatcctcattaaggccatagtcacttttagccttaggagtgattctgttttccttaattgcactttacttatgagttgcagtagcagtattggtagtaggtgtgggggcagagtcagaggacatgtttcgggagtctgttctctctctccactgtgggatccagagattgagctccacgaagaaaatacttttaatggctgagccaccgcactggcctctgactttaatttttcactaggcaacaggaagtggcagaggctgttttatgtcagcttgacacaagctagagtcatttgggaattaagaacctcaactgagaaaatgtcctgtgggcaagactgtggtgcgatttttttctttttggctgatgtttggtaggagagggcccagctccctgtgggcagtgacatcactgagctagaggtcccaggtgctataaaagaagctgagaaagccgtggggaaccagccagcaagtaacactcctccatggtctccagttcctgcttctaggttcctgccttgagttcctgtctggacttctgttggtgatggagtgggaactggaaatggaaatggaagataaaataaagtttctttcccaagctgcttttcatcatagcatttttaccacagtgatagaaaccttaactaagacagaagtaaacacagcctgtttcagaggtttcttgacatcatttgtgagtttgccttttcaacatcttctagatggagggtgccaaaaactatgttgaaagcctgtgaaatctcttagcttattaaaccataagaaggtctgttgtcactttggagagatttgggaagttcaaaatgaggagcgattccctttagtaaggttttaacaacttgctctgatacttccattggtagaatagttgagaaaatggtggcaaacatttgaatatatatgtacccttttgggggaggcatctgagtaaaatctaactcccagttttctcctgggaccacctctctgctttgaactgggtagggtaaggtggtgtcttggttccacaccctggatggtgactaatgcctctctttccagatgtcatgggtcacgaggtacttttataatttttcccctgtcttcttagggcaccagaatctcatgttcccctggagccattttcctatgtatcccctgcttctgcatagcatgggcatctaaacatggggcaaacattactgcatctctgtgacctccatgaatgctgtccatctggcagtcagtttccctgtgtaatgagggaacttgtcattctggtgtcacttataatgcgctatcgctacctgtgacatagcctctaaaagagataaaactacaaggttgtatttaatggaatttcccccccagtaaaatcttcttggcatccatggtggtagacagcagaaaatcattgcccacattggatgcctaatgtaagtgaggccagtctgaaatacatgacactttctgaaaataaataaataaacaagatagtaaataaagccttctttccatatagaaatagattaaggtctaaaaaacatatttaatgttggggctggcgagatagctcagcggttaagagcaccgactgctcttctgaaggtcctgagttcaaattccagcaaccacatggtggctcacaaccatctgtaatgagatctgatgtcctcttctggtgtgtctgaagacagctacagtgtgacttacatataacaataaataaatctttttaaaaaaaacatttaatgtcatatttatctattaaatagataatagaaattttaaaatcgtgtgtatgggtattttgcctgcatatgtacaccatatgcatgcctggtacctgcagaggccaaaagcaggcatcagatcccctgaagcagtcccaagccaccatgggggtgctgggaattaaacctgggtcctgtggaaggtcagtgggggtccttaaccactgagccatctccccaacccctattcattccacaattcattcatctgtgttgtgtgtgtgtttgtgcacgtgcaactgtgaccgaagtcattagtctcagtagcaaatgcctttatgcactgagccatgtctccagcctcagctgagcccttggagctgacatgttgggagaaccttagcctgtcccctgaaggccacaccctgcctttctagtggctttactggagtaaatcactctacagatgcacgtctcctcccccacccctcctccagtggtgctccaacaacaagatttctgttcaaggttagctttgtttgtcttgacacagggcctgcctatcgagccctgctgctctggaaccaactacgtacaagggctccaaacagcttttcaaacaggcttgaatacacagggctagaatacacttgaacgacttccactcagcagtgctctgtgttcccaatcgtttctgaaagtgtaggcaacgctgctcggcatgcagcaaactagtttagtctcgtctagtttagcttagcttagtttagcttagtttcacttagcttagatatatgagagctttgcacatacttcgctgcaccccgggcatacctggtgtcctcagaggccagttacagacaggtgtgatctgccatgtgagtgctgggactcaaacctgggttctctggatgagcagcctgtgctctcaatgacggagccatctctccagacctctgtgtctggagagccttaaagaatagccatggtttttatcttccctgctttggattgaacctaaaaccccccacataccagacaaagctctttcccactatgctatctctttattgtttcccttctcttactgtgtgagcatgtgtgtgtttgcacaaggacacgtgtgtgtgtgtgtgtggggggggtgtgtgtgtgagcacattcatgtggaaactagtggccagcctagaccaccaagcaggctaggctgactgacattcaacccagggattccctgtctctatgcccaggtctgggattgcaaatttatcccttagcacttcgctttctgataaacttcgctgtcactccaactccaacttttttttttttttaggattcactaggttgcctgggnnnnnnnnnnnnnnnnnnnnnnnnnnnnnnnnnnnnnnnnnnnnnnnnnnnnnnnnnnnnnnnnnnnnnnnnnnnnnnnnnnnnnnnnnnnnnnnnnnnnnnnnnnnnnnnnnnnnnnnnnnnnnnnnnnnnnnnnnnnnnnnnnnnnnnnnnnnnnnnnnnnnnnnnnnnnnnnnnnnnnnnnnnnnnnnnnnnnnnnnnnnnnnnnnnnnnnnnnnnnnnnnnnnnnnnnnnnnnnnnnnnnnnnnnnnnnnnnnnnnnnnnnnnnnnnnnnnnnnnnnnnnnnnnnnnnnnnnnnnnnnnnnnnnnnnnnnnnnnnnnnnnnnnnnnnnnnnnnnnnnnnnnnnnnnnnnnnnnnnnnnnnnnnnnnnnnnnnnnnnnnnnnnnnnnnnnnnnnnnnnnnnnnnnnnnnnnnnnnnnnnnnnnnnnnnnnnnnnnnnnnnnnnnnnnnnnnnnnnnnnnnnnnnnnnnnnnnnnnnnnnnnnnnnnnnnnnnnnnnnnnnnnnnnnnnnnnnnnnnnnnnnnnnnnnnnnnnnnnnnnnnnnnnnnnnnnnnnnnnnnnnnnnnnnnnnnnnnnnnnnnnnnnnnnnnnnnnnnnnnnnnnnnnnnnnnnnnnnnnnnnnnnnnnnnnnnnnnnnnnnnnnnnnnnnnnnnnnnnnnnnnnnnnnnnnnnnnnnnnnnnnnnnnnnnnnnnnnnnnnnnnnnnnnnnnnnnnnnnnnnnnnnnnnnnnnnnnnnnnnnnnnnnnnnnnnnnnnnnnnnnnnnnnnnnnnnnnnnnnnnnnnnnnnnnnnnnnnnnnnnnnnnnnnnnnnnnnnnnnnnnnnnnnnnnnnnnnnnnnnnnnnnnnnnnnnnnnnnnnnnnnnnnnnnnnnnnnnnnnnnnnnnnnnnnnnnnnnnnnnnnnnnnnnnnnnnnnnnnnnnnnnnnnnnnnngagggagaagagggagaagaaggagaagaaggagaagaaggagaagaagaagaagaagaagaggaggaggaggaggaggaggaggagaaggagaaggagaaggagaagaagaagaagaagaagaagaagaagaagaagaagaagaagaagaagaagaagcagcagcagctgctgctgcctccaagcagtggtggtgcacatctttaatcccagcacttgggaggcagaggcaggcagatttctgcatttgaggccatcctggtctaaagagtaagttccaggacagccagggctatgcagagaaaccctgtcttgggggggaaaaaaggagaagagaagagagaaagagaaaaagaaatctcgtggattctaataagagagctttgtacttagctgatgtccagtagctggtatcccttgacattgggatctttcaagttgaggagcggggacctctgactgtgactcagccagcactatagctgctgcagctcgcaagcatctctgtgaagatctctgaagacttaggctagaagtaatatccctagaacctttgggtaaggggatccaatgccaatcttatcattctgctgcagagtgggcagaaggcttatccagttgggacttctccaggttggggctgctaacagtgaatctttaggctttgtaaagcctactgctattcgcttatctcttgtagggattcagcataggagcctatgtaaagtggcttagctctcagaccaaactccggaattcatatacgacagagtcctggcaagcctgaaatggctctgagttgtcttttagtgttgagagtcgtaagagttaatcttgatttgatttggggtcaccatggcacaagcctctaggcatagttgtgaggaagtttctaggcgaccctgaggtgaaaagacccaatcgtaagtgacaccattccatgggctgaataaaaaagagaaacaactgagcagcagctgggttcggccaggtggtgtctgccgccaattctgataacctgtttgattcccacactgtacaaggagagagaaaattccttcacactgtggcatgcacatgtatacaagatagatgcatagacagacaggcatacagatagctggctggatgcacagacagataaatggtggatggatgcacagatggacagataaatggatggatgggtagacaggcagacagacagataattgagcaccagcaggtacgtacgtctctctgtttcctgactgtggacacaatatgctcctgtcatactttccctgtcacgacagactatatccctggacagtaagcccaattacttcctcccttctttatgttgcttttattagatattttgttgcatgagataaattaaataagtaactaaatcagtagtcctagtgtgtgtgtgtgtgtgtgtgtgtgagtaaatgcacacacaggcatccttggaggatagaggataccagccctggagctagagttacaggaggttgggaaatgaactcacatcctctgtgagaacagcaagcactctattttgttttgttttgttttgttttgttttgtttttcgagacagggtgtctctgtgtagccctggctgtcctggaactcactctgtagaccaggctggcctcgaactcagaaatccgtctacccctgcctcccaagtgctgggattaaaggcgtgcgccaccactgcccggccagcaagcactcttaactgctgagcccagtggtcctgtccctcacaaggctccttcctttcccctcccccctacaaccctggggccagaacccattatccttgagttacagtctgtcctgcaatttctacctctgaaacttctctagggctgctcaggattccacttctcctagaaagattacaacactgatatcaggtagggatatcattttgtgggcggcaaatcgcatcctctacatcccgaagtaaactttcatgttaaagttagagaggccagttcttcagccaacttgtgcagatggagactacctctagacccgagagccaacattgccttagtgcgttgatggctttcacaggatcagagtctgtgcacagccaaacaacaggtgactgtgatttagcatacaatgatgggataccaaggaaagcacccttccagtaaagaagaccaagcctttttttttttttttgcctgcgatttttttttttttttgccttgaacctttttaaaagtcgatctctccctgtgtacttgtctgtctgtgtgtgcgtgtttgtgtgtgtgcgcgcgaatgtcaggagacagctttctgaatagatctggaactcagatcattaggactgcacagccaaatgctcttagccgaggagccagcttcccagagcacacggaagagctgagttcgacgcgtctgcatcctatgtctgctattacagcatcttcttgatgtctggagtagatcgactgatatgtggcaacatttggtctttatgatgggtgtgatagtgcacacctttaatctcagcaattggtaggcaaaggcaggtagatctctatgagttccaggccagcctggtctatgcagtgagaccctgcctcaaaaaaaaaaaaaaaaaaaaaaaaaaaaaaaaaaaaggagggatgatgagagagataagaaagtgagattgtaaactggcgagatggctcagaggatgaaggcaccctgctgccacacctgctaaactgaactcagtcccagaacccataatgtttagaaggtgagaacaagttggcctatgacctccataagcacaccacagcatgggcatgcatgtggaaggtatgggcactcgcatacacacacatacactaaataaagtgtcatgtcttttccagtggtgggggtgaaagacgcagagatggagtttctgggggagttgggactggaggttctgcagcttttgaattggaagcattgccaaaggcgaggttattcaatgggttcctgaagcagctcaatcctgtaacgttctttgctccttgttacaatctctacaagcaccaggatctccaaggcactggggaccaggcaggcccgtggtacagaaatgcagacaaaacactcatatgcacaaaatacagaagtacaggagaatgccagggccaggaagcaggagtgggtgggttggggtgcaggacggggtggggggatagggaacttgaagtgtaaatgaagaaaatatctaatttaaaaaaaagaaaaaaagaaaaagaagaaaggtgagagggaaagataaccaccacccccgctcctatcctggcaatccggaagcccatggggctgccagtctgcagaaagcagaagacagatcctgtcccaaacaaggtagaaggtgaagagtggtataagctctgtggcaggcacatgcacaaacatacacacacacacacacacacacacacacacacacacacatcatatacacacacgtacagaaaaattaagaaaatgttcttagagttggctgacctcaccaagagccttgagtggatctttgactctactgaaggtaaaaacatagctaagacatagatgggtcacttgtcatatccacgtcttctctgacagctgcaattgtgtcacctgaagcaagaatggggtaggtaggaaaatccttctatgaatgctatttcagcacacatggctcgttgcacactaggtggtctctggaaacaaaaaatcagaataaagtggccacgtaatcatcagccaagaaaagctcaccatcaaactcaagggatcctagaaaacatcccaaagaggccaggcatggcagtatatgcttataaaaccccacactcgagaggcagaggtggggtacaagatcaccctcatcatgagttggagaccaacctggtctccatgagaccctgtctcgaaactctgaatttaaaaattaaaaattagagagagaaatcactgctggtggtgagctaactcagccatgcaagctccttgtgaagtctgaggtgtcctccaagacttgtacgcaggtacagtcgggcccttgactcacactgcagaaaatcagttctagccgagatgaggtacaggtgtggctgcctggacagtaaccacacaagctggggacgggcgagggcagggccacatgtgcctgtaaccccagagatggaggatacagacagcaagatcctgaaagctccctggtaagacagtctagccagactgctcatacacacacacacacacacacacacacacacacaccacactgtaaaaaaccagtagtggcatttagtttatattctttaaagaatgtaattagatgtttaaagattaaagaattcttactatacacaggacacagaaggatcatacctgttttgctcttaaccatggctggctagctgctttaataattctgtttatgatccttctaggagaagagagaatagttcctagagacttgtgggatttgatcagttttgtcaaatttcttgactcttaaccaatggaaaaaaacttttaaagatttatttattttatgtgtatgagtccactgtagctgtcttcagacacaccagaagagggtgtcagattccactgcagatggttgtgagcctccatgtggttgctgggaatttgactcaggatctttgaagagcagtcagtcagtgttcttaaccactgatccatctcatcagaccaccaatgggaaatttaaacgagatccaagagcgtggggggggggggctctcttcctttctcttgtccccttaattctctgtcttcctatcttgcctcacttgtaatgtttgatgaaatgaagtgttgcctggggctaggactgcaaacaaagtcaagcaacatctttaaacttgtcctttttacttctggtagagtgcgaggtagacctctatcatggggtctgagtttgcaccaagaggacagggctgcttctcttaggcagactctggtctccatggcaattcaagaagggagggagaaacagtgaaatagagaatcatgccactttccttacactttccagtccctcctccactttaccaaaatccagagagtatttcttcacaccttcaaataaaaatactctacacaatatagcagccaaattcctaaccccaacattgtatgcctgcctgcaggggctgccagctgtcaccagcggccatcacctgcttctcaccaggtgagaaggcacctcctgctggcttcctgtgcacaccgccatcatcccacccccttgcttttcagattcacacactcactgcccaggtttgaagtttctatatggatcagtgttcacacaaacacccactttttctcttgtcacattagtctagtgtcttccccgtcgctatctgagcagagagacctcccagctccacagctcgctttccctgctcccctaatgccctctatcctctcacacccccttctttcattgcttcatagctttgacatattttatactaacatcaatttgtccaattcctctcattggaacagaaggtttctgaagtaggctgttggctcccttgctacctctctggcaaaatggggtctccaacatagtcatcaacataggttgagtttgtttcgttaccaagggaacagaggaaaaggaggaatgtcagtaatcctgcagtagcagaaagctttggaaggtgttggcggttcattgtagaaccagggatgaggtgaggtttatagcacatcatctagaattagtgggcaagtgggctttggatggaacccgggttacaggtacctccggacaacggaggctactgagatagcagcctgtgagtctaccctgtagacttttcctgactttgaatgcctcagtcaccagctcagatgcaatcttagagttacctaccatagctttgtgatgacctccttgtctctgaacagatcagggagggattttgagatacgtcccaccagaggaatctcttagacttcgggaagaaggacttgctgtaaggaaacctcagaaccaggttgaggaggtggggcgctcctgactccgcataggaagagtaagagcaatagattgaaactgtgacaagttaggtagacttctgtcccaaaggtcctgggtatgtcatgtaagaaatacaagcatatccccccagggtttggtatcagactgtgtgtatgatgtgccccaataacaaaaagagagagccagatgacactgagaggaaagacgctagagggagggcttgggagagacgggaagtaaggaagtgaagactccagtggctatgtccagggaagggaaagaataaaaacaaaggaacttagagtcggaaatgtggggaacatcagcacatacgcagaatgggaacgaaaagcagcggaatggacagaaaacgaggggagtgaggccagtgatactcttgaacatggagaagaggagaggaaggggaggtggaatagtggtggctgtctggctctattcctgggatctattatcaccaggagccctgccctatttctggttcctcagggcaggactctagctatctgggatgagttttcagtcccagatggtgagcctgcaaggcaaggggtgtatgctctgaattcctgactgcgggtcattaaggcctgacactgcttattctagctcctccctaggctccaacctctctgctgggaaggtcctggtgactcagggatcacagggctggtctaacagggtctcaagtactagtacttaggggtccggtctagggactttagatcaagaggaaatcagccttggaagggaaggacctaaaggaagaagaaatcaacagcattgatctgaggtgtttcagacctaaggaaagggacagctcactctggtgatctataaccatggtgcctggaggtcctgagggtctagtcctcacagagtgtctaagtattcgcagaggaggacttgtataaactctgtccctctgcttcccacatgcccattggactgcccacttgtagccccaggctccccttctcagagaaaaaaagacttgagaagtgtctgactgaggatgggtagatgtaaggatgaaggacagatagcccaggcatggcaaagcattaataacatcagactttgtgatataggtgctcactatttatttttttaagctttataattagattttttcataatataataccaacaaatagagaaaaattatcaggcaaatatttggcactgctcagagttgaaagtgattttgttttctaggagaagatgtatcacaaatgactgttgaggttgacagttacctggggtcagttcttggggctgacctagggcaaggactgattctcagggatgaatacctacagctcttggattacattctcatttgtttgtttgtgttttcagacagggtctcatctacagcccagcctggccttgaactcatgaccctctccccacccctcaaatgttggtattacagacatgagccaccatgtctggattaatcacactctttaaatactaactgctttccccacccttcaggtggacttttagcaaattgtctcttcacaaacctggcacattgtctagagtggaccccaccttgccacctgtaacccttgcgggagaggcaggataagatgttccaggcctgcttgacacctgaccctaagaagctgatcatgtttgctcagcaggtgaggttcacaggataaagaacagtgggagggcttggacctggtataaaagctctggaaatttctagaagactagcatctgcaacttctaggggaaaggtaagttgggagatactcagagatgagctagaaaagacaatgcctggactgtagcaggggagacttgggtatcagctcctggatgtgagctgctttggagtgcaaagatgtctggttttggctgagggatgcttggggggatggatatggacagtttggctggtggagacagggttatgatacacagacaagttgcctgggatctgatgtcttgagctcacacatatccctcctattagcctctctcagctccaccaggtcttctcagacccttgtcgttggcacagtgtcttctgtcatctcctttgctcccaaggtcacatggaggcacctctaaaatcttctttgccttgatttaagagtagaatgatgctagagacttaagtgtgcctcagatacttcatagactagatgacttcaggtaggttttgctcagattcttggttcaccaactcaactgcctcaggactctggagatggcctttacttcctcttcagaaagctctcttgtttattgtgcggggatggaggaaggcttgactcagctggacagactgaaaggaagttaggattctcttttggatctggagagacgagtagccacagtcacatcacggaatgagctttctttttaactttcttcccaccgcagcctcagaatgttggccgtcgccctcttagtccttctttgtgcctcggcctctgctaattccagtaagtgaaatgccacagggagatcatgggaaggcagcccgtgtactgccgctggccaggattgtcagaggctggcttgggtggtgggaggcaggagggtatgggggacagctgtgctcccagagcatctgtgcctccaggcctttctttcccctctagttcagtccaggacatcctcttacagtggagagtatggaggtaaaggaggaaagcgattctctcattctggcaaccagctggacggccccatcaccgccttccgtatccgggtcaacagatactacatagtagggtaagagtctctgcgtttctgtacgttgggatctgtctaggaccttgctaagttggaaagttctcgctgaccttgggtcgcacctgtgcacaccttggcacgttgtaatcacaaacacccaggagccttacattacctgggttggatttcacctttggtttaaacctatttccaacatttctgttgagcatcctttgtccctgcttgttgtctgtcctggaatagttctatcccaccctccagctggaaacttccatcacatgaagagccaaatgtatttctttctgttccatgttctgaaccatgagccagttgttggcttgtctcttccctgtctggcctgggcagtcttctggtgtttgaaatcctcgggcctctttgaagtgtgtattgtgagcaaactcagactcttgttgtctaagtgaccctgagaaactaactttcgttccacaagcctatttgccattaaaaagagaggctaagattctctgcatggtctcctagggctcacgcagcctttataacatatggaatttgtcaccagcctgaagttctcagcatgtagtcgaagaagtcttgattttattttatttttttaagatttatttgtttatttttatgtatgcgagtatactgttgctctcttcagacacaccagcagagggcatcagatcccattatggatggttgtgagcaaccatgtggttgctgggatttgaacgcaggatctctggaagagcagtcactgctcttatcctctgagccatctctccaggtcagaaatcttttttcatttgttatgctggtgtgcacaatgtgtgtgggtgttcaaacgcctcattgtgcgtgtggaagccatgtgggaatggggttctctccctccacatgtgggtcctaggggttgaactaaggttgtcaggtttcgcagcaagcgtttctaccagctgaggcatctcggcagcctggtcttgaattttgataatcatgtccaatgtgttccttcttctcttctcacccctgcctccagtctccaggtgcgctatggcacagtgtggagtgactatgtaggtggcacacagggagacctggaggagatctttctgcaccccggggaatctgtgatccaggtgtctggcaagtacaaatcatacgtgaagcagatgatcttcgtgacggacaagggccgctacctgccttttggaaaagcctcaggcacaagtttcaacgctgttcccttgcatcccaacactgtcctccgtttcattagtgggcgatctggctctgccatagattctattagcctgcactgggatacctaccctagccactgcaacacttgctgaatgaaacccaccttcctttctgtcaggggtgctgtgtgtgtatgggggtggtggtggtgagaactcccttatcaccaagccccatgaaagtatgcaaatagcttaataaaaggatatggttaaagacagtgtttttccacatcctaattctagtagaaatgtgtgaatcgtatttctggctttaaaaaaaatgaaaataatgtttttgagacagagtctctctacatagccctggctgttttgaaactcactatgtataccaggctggcctcgaactcacagaaattgactttatttctgcctctgcttccagagtgctggggttagaggggtgtgccaccacgactggagatctacctggctctgcctcctgagcgctgggattatcattgcctggtggggcttttctttatacattatcaaaaagagacaatattctgcctacactggctctttccaaagataacccctgagaatttttcctaataattcagaggctagggtaaggctcagttgcaccaacttgctaaaactatctcaaaaaaaaaaaatcaaaaacaaaagaggaaattctaagtgagccatagtggtgcactataattgagagactaggctaatctggtctatatagtaagttcaaggctagctagggctacatagtgagaccctaagtaagaggctaaaggcggaagaaagattgtcacaggtttaaggccatcatgggagcatagtgaattccaggctagtcttgaatacagtgagaccctgtcccagataccggatgcatgaataaatagataggcaagtttacagaggagaggtcttcattgtgggtagtcatgaatatacggggttggtgagattaagggtcactatagagaatcaacaaagatataagccactttaaaataattattaggccaggcagtggtggcgcacgtctttaatcccagcgcttggggggcagaggcaggtggatttctgagttcgaggccagcctggtctacagagcaagttccaggagagccagggctaaacagagaaaccctgtctcaaaaacccaaaaccaaacaaacaaacaaataaataaatattattaggatcccagtttcaagtcctaaaacataaacagttttagtgggtagcagtagggagttactgaagtctggggttacagaagtgtgccaccataccccgttgtgtgatggtaggtgaacactttatcaactgagccatgtccccaaatgtcccttcttttaaacagttgcatgcaggagactatgccattgatttaatttatttatatgtaaatcacataaaaattcactcctttaaaagatgcggtttgggtaggagtctagtctgtggcatatgcatatgtgtacatgtgatgcatgtatatgtgacgagtgtgtgctcacctgcatatgtgtacatgtgatgcatgtgtgtgtgtgtcatgagtgtgtgctcacctgcgtggaggccaaatgttgaggtcaggcatcgtctgttgctctccacctttttgaaattttttcttttctttttttttctttttttttaatatttgtttatattatgtaagtacactgtagttgtcttcagacacaccagaagagggcatcagatctcattatggatggttgtgggccaccatgtggttgctgagatttgaactcaggaccttcagaagaacagtcagtgctcttacctgctgagccatctctccagccctttctttcattcatttattttttcctttctctctctctctctctctctctctctctctgtgtgtgtgtgtgtgtgtgtgtgtgtaggcaggtacacacagctgtgcacatgtgtacatggacagaccacaccatcactacgtcccctatcagtctccaccttaatagttttgaggcagggtctgaagcccattgttttatgaggctggctgcccagagacctcccagaatctccctgtctctgctccccaatgctgtagttggacatttgaatggccatgcctggctcttatggggtgctagagatttgactccaatcctgttgcttttacatccagtgttcttaccccctgaaccatctctctagcctcacaggttagacttttgcaaaaaacatgtatttgaagaaatttttcatttacttaaaaaaaaaaaggtttgggcactggagagatgattcagcaggttgctcttgcagaggacctggattcaattcgctacactcaaatgtagtgtccatatagacaaacaggcaaaacactcacacacattaaataaaataaataacacttgacatggtggagtacatctttaaccccaggactggggaggcagagttgggcaaacctcttcgagtttgaggctagtctgatctacatagtgaattctaagacagccagagtgacataatttgggggcacgcagctctgggtttactccctggcactacatagaaccaggtctagatcctcatcactttattcttaattttgggctgggcttttcaacatcttctccatcatacagtttaaaactaagaaaaggtcgcctgtgaagacggtaaatggactgtttgatgtcgcacacttcagaaaagacctactggctagcagagttgaggctgacatgcccaaggtggcagtggtgctggtgtggagagtgaccctgcggtggcagaagtgcaggcaccacactgttggagctgattggccccaaggtgtgctacaaaggcatggcggaccattgcatgcagatttctctgcgaacagagtatctttcatttgttggagtggcaatttggcaaatgttgatattttctaacacaagcttgaaattttgtttttaaggacaagtacaactatttctatatagagttaaagagacagttcagcagtcttgttttgtttttaatgcacctggctgtggtggtttgaatgagaataggaaccacaggctcatatatgtgaatacttagtcatgagggtgtggcactatttgaaaggattagaaggattaatttgtatggccttttgttagaagatgtgtgtcatcgcttctcggccttttggctaagatcaagtgtagaagatgtgtgtcactgagggtgggttttgaagtttcaaaagcctatttcatccctcttccctctgtctatagatcagaatgtagttcctagagtctgcttgcatgttgtcatgcttcctgccatggtttaatggactaaacctctgaaactgtaagccagcccccaatgaaatattttctctcattatggttgccttggtcatggggtctcttcacagcaacagaacaatgactaagacagtggctcagctctggtggggctgctgggcaataagcttagatgtggacaattcactgggttctgcttgaattctgttaggtgttgacactggaaaagttctgctgaacaatttaagggtttaggcaactgtatagtaaaaacagcaagaccagatggaattattgacttataaatattaagcttagtgtttcagttcagtgcaccaatgctcaccaagcctcttattttggaacttacactgtagtaagggcttattgccagcactaaaggaaacactattctcatctccatcgtcactgttcaagtgcacagctatgtgcagtggaacactcttattcttttgacgtagaaactgtgtggtgctgtagactggagagtcagactccctcgagaaaacacacttatgtaaaggcacagctgcgttttcccatgatgccttcttcagcatccttcctacatggtacagggggtgttttcatgtattttgctgctacattataaatttgaagaattatttaatattggtaatagaggttggaggtggttcatcatgttagcttgagaactgtattcactgaattttcatgagacatacaaattacgaagctgccatggatatattttgatggtgtcctgttactatcaatatttcttgagagattgtttggaattccagcaggagagcacagttattttctaaacccttggctggagaatggctctcatctgttcacgaaaggtcattctcttcaatcaagcattcagtgacagaggagagggacactggctgatcaatagagtgatgacacgggcagattgttttcacatcccattgtcagaacttttttaaaagattgattgattgattgatttaaagttctatctgcatgtacacctgcatgccagagagggcaccggatcccattatagatggttttgagccaccatgtggttgctgggaattgaactcaggacctctggaagagcagtcagtgctcctaaccactgagtcatttcttcaaccccttgtcaatatttcttaaagtgctaattctgaaataaagccaaatctcttgtcaaggatttaaatactaaaagtaagggaaatataggtgtcctgtttagctttgccaatttgacatagcctagagtcatctgataggaaaacctccattgagaaaatacctacattaaataaacccattgtatgtccgcagatagggaagtccctggattgttaattggtgaaggaagttcctggcccactgtgagcagcaccatcccttagcaagtgttcccatgctgtattagaacactggctaaacttgagcctgagtgagccacctagccagtagcatcctccacaatgctttgatatatgcttcagtgtggaatgattaaatagcagatctatgcttatgcactgttttgtgcagtgaaaacagttaagatttatgctttctcgatggacaatggctcatacctttgataatagcattagaaggctaaaggccagggaattgcttagaatgtgaggccagtctgacacacagtaagatccaatctagcctagaatattgagtgaaagcatgtagctggaatttgctattttgtgggtttttctttacacacacacacacacacacacacacacacactgtttcctaacactagataggagagaaacaaggttagaggggaaagaggaagcccatattctacacctgggattaaaatgaaaacacattcttataatatttttgtgttttgtaaggaaccaaaatttcagaattctcattacatgaacctgcccctcccccctggaaaaaaaatgctgggtgatggcgtttgtcttaaatcccagcagagcaggaagatctctttgaggccagcctggtctatagagttccaggacagccaagtttacacagagaaactctgtctttttttttttttaagatttatttatttattttatgtatatgagtacactgtcgctgtcgtcaggcacacaccagaagagagcactgcatctcattacagatggttgtgagccaccatgtggttgctgggaattgaactcaggacctctggaagagcagtcaagtgctcttaaccaccgaaccatctctccagccccaagaaactctgtcttgaagacaaaacaacagcaacaaaaggctgagcctggtggtccataactataacccaagcactcggaggggtgggtcacctcagttttgatgtcggcctggtctacacagaaagtgccatcccatccatcaacacacaaggtgtatctcaaacacacacacaactactcctttagcagttatgggggtgtgcggtactataattacccaaactgttccatgtcccatggctctcgtttccctcctgtcagtctgttcccttctcagccacccccctgtttagcctctgagaaccttccttctgctctccactcccaggagccccacattcttgttccatatgtaaatgaagtgacacgctttttgtccttccttagcctggcttttttcattgagcataatctccaagttcatgcgcgtcgttacaaacggttggatttaggactaaagctaggatagataaacaaattattagtgtctaaataatggcgttccagtgatggggaactctgtatatgtaaagtaaaaagaaggctgagtgggccttgggatgccagcacttgctgtctggcagcagtcagaggagagaggaagctttaggaagcaatggaaatgaggagtgatgcacagaacaggtaaggacattgaatggagcgcttactgccaatgcttaatgcttagctaccaggacatcattaattgagacagagtgcctgggaatttcagaaagctgaagctaagctgtagttgatacagattgactgggaaatgagaaaatatttggagcgtatgtttgagtctagaatgccagacaaaaggtcagttcttgaggacaccaaatctgggcccccctccccatctgatgagtctacacacatttttgtgtgctttgccttcaataaatttcaaggttagcctagtctacatagtaagttcgaggacaaccagggccacttagagagacccccatctctaaataaataaataacagcaacaacaaaacattcagagtggtgcaaagtttttacatatcaaactgaaagtttgcttttaagaattcagaagtaagacgggcagtggtggtgcacacctttaatcccagcattttggaagcagaagcaggcagatttctgagttcaaggtcagcctggtctacagagtgagtttcaggacagccagggctatacagaggaaatcctgtctcgaagaagaaaaagaaaggaaaaaaaaaaaaaagaatttagaagtaataaccaaaatgtcaaacagtccagtttccatttccatggtaatgaagttaaccttaagtcactagactgtgaccaatcagttcttgattgtgtgaaatgccgtctcattctagacctgtaaattgtgctagtcaatatctttgaatttagctgggtgtagtgacacacaactttgattcctgtctttagtcccagcaccaggaaggcaaagacagacaggtctctgtgagtttgagtccagtttagtctacaccattctgggacagccagggctacctaaagataatctgtctcactgtggtccttcatggttagatggcaaagtgttgcagcttccagggcagaagagcgcaggtctttgttagtttaaacccagcctggtctacatagtgagttacaatgttgctagttagagacccaaagaccaccaaagtctggtttgacaatctgtattaagtcgctagaaaattcctggaaagaaactcctcacaaagcagtctcaactgcattttacagaagcttttaaaggtaaagagcacacaaaaactacatcctgtttggcagttgcagggcaaaggaaagcaagcagtttaacagaagccaaacgcatgcaattagctgggggcattttgtcccaagattctaaaacagggctgggaactttcccacagtaagaaaaaaaaaaggggtggtggtgggggagtcaagttcaaagaggaactttttgccttctcacaccaggacagccagggctacaaagagattctgtccgctccaaaaggcaaaaattgtattcagagctgggaactttgaatatagaatcaatcaagtgctttcagaagaaaagctgagaaggaaaagtcgggcgaaagtctgcatttagccaattccaacctggcaattcaaaagcctgaaagtgcagggacctcagttactgaccatttagtgacagactccagggccctatccctgggaatattttgctttcgagaccggaagtgagcccgagacggcggaattacggtaaattagaaccgaaacttccggcggcacgtagctgcgattggtcgaatctgagagggaggcggggccccggtaattcaaaagagagaagcgggccgaagaagggaaggctatgagcttaagggctaagacgtgtccgcagcgacgggagatggcgtcggccacctcaggtacgcgggccgggaggagggagcaccactgcgtgagacttacagagtagcagtggtcccggaaaatccagccggcgcggggcggaagggcgaggggacgctggctggcgggcgtggaggtgggcgccaccgcaccctgtcctctattcgctgccttcggcggtgtagagggggttgagaccctgccgaggctccagctcctgtctagagcctgagcgctaatgtgtgcgcttcaatttgtgtcatctgtaaagccgggcagccacccgtctgtaaagactgagcagcgaagagcctctttatctgtctgtctgtctgtctgtctgttcagagatcccactccgactgaaggctgtgtgagatcacacggcaaaggaaaatcctttccctccagccttggaaccggatgctgttttcctggtgaaaaggctggctgccaggagattccaaatctttcctaagacgatttgcgtatgcgtgtctttcctctttctataggccgaaatctggcctgtttgtttggctttgggggaggcagacctttaggagaacgcctcagccaggcagtgctgcaagcattttgtgatgaaccgtttaatgttgtacagagctctgaggtcatgactgttaatgccctgtctttaacaaaaagctttaattttatcaatgtgtgccacctatgtgtggatctccgcagaagccagaagtgttggaccctctaaagctggagttactggcagctgtgagccaccagatgtggaccctgggaaccaaactcagaacctctagaaaactaataggcactcaatttctaaggctcaccagccccctgtacttgtgttttgacaagaggaagcaggcataaatggggtagatagcttcttcaagatagcacaactagtaaatattgggaatctaaattcacactcaggtagttacactgtaatgcctctgcccttgacagttatgtccgaatacagactctgagacccagggtgcttggtatgtagtaaacgttaaagtgctgaaagactgttagccctttccaagaaattacaatcattttcaaatagtcccataaacaaatgtagtatgaggaaatacattggtagaaaagcataaacttgtagtgtagaatctgaaacaaacctttgggtattttgagaaatctttattaagaaatggtaattggaagctgagtggtggcgcacacctttaatcccagaactcaagaggcagaggcaggtggatctcagttcaaggccagcctggtctacagagtgggttccaggacagccagggctacacagagaaaccctgtctggaaaaaccaaaataagagaagggaagagagagaaatgatagttaggactgagagaggagctgggtttagtgctctgtaattccagtaacggtcccgttcaccaggcttggacatggtgcacatactttcgtgccgaattttgaattccattagtcagataggattcagaccgagagactgattgcctcctggatctccatgcaggcaggcaaaacacgtacataaaaagatagtgaaaatggtagttaaagtgggttcagaggttgggtggacttttactcaaccttgaaaatatcaaaaagagcaagcgttgcttagcaataaaagaggccaggaagattgtggtgaatggttgtctcttcctagtagagaggagcaagctgggagcaccgctcagcggtaaagtccttgtcccggaagcctgaggactgagtttcatcccatgttgaggaacactagggtttgatctttggcctccatgcccatgtgcattcgcacataggtgtgggtgtgcacaaacagaagaagaattaaaacctaccactggtgtgatcctcacacgcaaaaggccaaggtaggaggattgggagctcagggccagcttttctcaaaaaacaaaaacatatttaagaagatagagccagccgggtttggtggcgcatgcctttaatcccagcacttgggaggcagaggcaggcagatttctgagttcgaggccagcctggtctacaaagtgagttccaggacagccagagctatacagagaaaccctgtctcgaaaaaccaaaaaaaaaaaaaaaaaaaaaggtagagccaaggctagcaagatggctcagctgctaagaaaattggatgttcttccagagaatcctggttgggttcccagcacccacatggtggctcacaaccatctataactccagttttggaagatctgatgccctcttctggcttccacggtcatcgggaatgtatgaggttctcttagggttatcattgctgtgatgaaacacagtgaccaaaagcaagtttatgtggcttacactcccacattttaatccatcactgaaggaagtcaggacaggaatgcaagcagggttgcaactgatactcaggagctgatgcaggggccatggagggatgctgtttacttcatccgctcactctccgttcaccatggcctgctttcctacaagacccaggactaccaacccaaggatactgacaccacccgagtcagtcactagttaagaaaatgttctacagctttttcttatggaggcttttgctccactgagattgctacctttcaggtgactccagtttatatcaaattgatataaaactagccagcacagtagcacacagacatacataacatcagagaaattttaaattaaaaagagttaacaggtattgatgactgtgggaagaaagaaaacagttaaaaattcttcttgtggggggtctgagctatttgtgggtgttagcaaagtgaggaaacagttgcagagatgggcaagggaagagtttagtacaggtggaatttgaggtacctaagaacatccaggagaagctagatggtagcttgggcggaagctctgccagccagagacagctctttaataggaagtgctaaggaggagtcatcaacttgaagatggtttgtttttttgtgtttttttttccggtttttcaagacagggtttctctgtatagccctgctgtcctggaactcactgtgtagaccagactggcctcaaactcagaaatcctcctgcctctgcctcccgcccgagtgctgggattaaaggcgtgcaccaccaccacccgggtgaagataatatttttaaaaggaacaaaagataattggtgccaagagagcaggtgactgtgcctgtgaagtgaatctgagctatctcacctagggacgtttgtaccccagtgaacatgtggaagcgtctggagacggtttgctcattacaacttggaggtgaataaggagagtgctaccggggttgaacagtttacagtgtgacagcctcgaaacaaagaactatacaactcagaatgctagtaatacaaaagttgacagaggatgggacatagggaaagcatttaattaagattgctaaactgaggaatagtcaggaaaactaataagataaccagggaaatggatggctgggaaacttgtctcacaagtgtgctgggttttgaattccttcaggaaggaggtcagggttcagactcaggcactgagtgtctagcactatagaggccccttatgatcgcaaaacaaaccaaccaaactgaaacaattttagaataaatgatccaggcttgaatctctctgaactttgttatgatactttccaagataagataaattattatgagcctggcgtggtggcgcacacctttagtcccagcacttgggaggcagaggcaggtggatttctgagttcaaggccagcctggtctacaaagtgagttccaggagagccaaggctacccagagaaaccctgtctccaaaaacaaaaacaaacaaacaaaaaaagacttatttattttatatatgtgagtacactgtagctgtcttcagacacatcagatcccattacagatggttgtgagccaccatgtgggtgctgggaattcaactcaggacctctggaagagcagtcaatgctcttaactgctgagccatctctccagccccagagattctttttttttttttttttaacctgtaaatagaggcttggggctggagggagggctcatctataagatctcatgctgctttccaaaggacctgagttggttctgagcacctgcattggactgttcacatcttctatacctctagctccagaggacctgactctcgattccggccttggtgggcaccgctctaggaggggcattcattcaaacagacatatatcataaataaaaaataaggattaaaaaaaaaacttttgtgttttttgacaataaaaaatagtttaggatttttttccaatgactaaatcactggaaagaaatgacgagtgtgtcagataagagttacacgtctgtatctttgtcttgtttgccttttgtatttaactaaatgatcaacaagtcatttcagtaaaacccaggacttttccctttttattgatgtgtgtgtatgtgtgtacatggggggggggtgcccatagcgaccagaaaaggatattggcctcaaactcaagacatttctcctggcctggcccccaggtgtttaccatgaacctaacctgggtcctctgtgtaagcaacaagtactctttttttttttttggtttttcgagacagggtttttctgtgtagtcctgactgtcctggaactcactttgtaaaccaggctggcctcagaaatccgcctgcctctgcctctggctcccgagtgctgggattaaaggcatgtgctaccacgcccggttgcaaccagtacttttaatcactgagccatctctccagcccttgcttggttctgtcagtgtcagatgtaaagtcttagaaggaggagagaaggaggggggagaggagagggagagggagannnnnnnnnnnnnnnnnnnnnnnnnnnnnnnnnnnnnnnnnnnnnnnnnnnnnnnnnnnnnnnnnnnnnnnnnnnnnnnnnnnnnnnnnnnnnnnnnnnnnnnnnnnnnnnnnnnnnnnnnnnnnnnnnnnnnnnnnnnnnnnnnnnnnnnnnnnnnaggagaggagaggagaggagaggagaggagaggagaggagaggaggtcttagtcctttagggtattcctgtgattggcagttcacagtggggcccagcactgtctgaaaccttgttagaaagacaatctcagattcattcagagacttatgctgtttatagatttaaacaaaatcttccatgttatttatgtatatatcacacttggagaattctgctttgtgtcttgtgtccacctaccctacttatagagcagagaaggaactggcttacttgagggacgcccacagcacaactgtgatggtttgtatatggttggcccagggagtggcactatttggaggcgtgaccttgttggagtaggtgtgtcactgtgggagtgggctttgagaccctcatcttagctgcctggaagccggtcttctgtttgctgccttcagaataagaggtgcaactctcagctcctccagccccacatccgcctggatgctgccatgctcctgccttgatgataatggactgaacctccgaacctgtaagccagccccaattaaatgtggtccttataagacttgccttatggggctagagagatggctcagtggttaagaacacagtctgctcttccagaggtcctgggttcaattcccagcaaccacatggtgactcacaaccatctgtaatgggatctgataccttcttctggtgtgtctgaagcagtgtactcagatacataaataaatctgccaggcggtggtggcgcacgcctttaatcccagcactttgggaggcagaggcaggcggatttctgggttcgaggccagcctggtctacaaagtgagttccaggacagccaggggtatacagagaaaccctgtctcaaaataaataaataattccaggacagccaggggtatacagagaaaccctgtctcaaaattaattaattaattaattaattaattaaataaaataaaaaataaaagaaataaatcttaaaaaaaaaaaaaaaacttgccttatatataacaacagacaccataaccaaagtaactcttgtaaggacaacatttaattgaggctggcttacaggttcagaggttcagttcattatcatcaaggcaggaacatggcagcatccaggcaggcatagtgcaggaagagctaagagttctacatctccatctgaaggcagcaagcagaatactggcttccaggcagctaggatgagggtcttaaagcccacatccacaatgacacacttcctccaataggtcacacttcctaataatgccactccctgggtcaaccatcacaacaaccatgatgaaaagagcttccccctaagtaagaggcacccctggaccttctagcaaagtagattcccatttctctgtgcttctccaaattttaacacctaaaactggtctattgcaggacctggccgctgtgtaagcaaaggagggcttggccggcgtccgcctctagctcgagtaagggtggctgtgcggctgcgcccgtttatggatggagagacagaagcgaaggagctcccctgtgtccgagccatagacagctgctctcttgaagtggctaactggaagaaataccaggagacgctcaaatatcagtaaggttcaggctgatcctccacctcggcctgcgcgtttgttactctcactgggtttctgagatctctctctctctctcaggatcctgttccttgctgtcactcaatccttcctccagttatttagatgttaatggtgtgaggtgagtgctgtggagaaagactagaagttgaacaaaggaaggaaggagcaatgtggcttcaaataagttctagaaaatacaggggaagggcaggaaagcagacctggcagtcaaccagagaagaccattcagattccggaatggcaaacaagacgggaactacacaaaagacttacacttggcctgttagtctggcctagagggctataaaccacagactgcatgcaggtcagatccaaccaaagtcttccatttggttgtttcatttttttgtttctttggattttgttcttttgaaacaaggtctcataaagtccaggctggccttgaactactgatcctcttgacttccctcctcagtgctgggatcccaggtgctgtgctgacatgcccagcacagtagacttttctgtaaataaagtttatcatttgtttacaaaacaataggtgcttaactagccttagaattaaggcatgtttacacaaaacctaaaatatttattatttgcttctttataggaagttagtttacctcagtgctaatcccttagcaattaggcttctggccctttccagctctctcttgtcagcatgcactgactcactaggccaaccttttatttaccctgttccaatgctacctcaaggaaaatactggaaagccctttcacaccatgttgtgtgggtgcttgtcacagggcaggaactaactgccaaaataacctaaataaggacaccaccaatatccaacttggtgagccaacacgttttatttggggttatttataggaatatgggtttataagcaggtaaatgacccatagacagctgtatcaccagagcccactccagctcacagagatggaatcctggagcacgtggcacagcctgcaggcaatgagcctcttccaagcagctcaactggcctctgtttctccagcctgctctgctctctgaaccctgtctgctatgtctggggaggcagttgttcacgtcaagctcaggacatacttccggagtttaggctcccctccacagagcactgcctcttgtccctgtgtcctacttggcagcacttccttctgctggcaaaatcatttattccttctaacatggtcttgcttgtctcctgaatcattgtagagtatggatatctggccaaccagattgcagtgtgagattaatttgtttccctaacatcagtacaatgactggatatggtaaaattttcagagacactttgaaggtctttgtcaaaaaaaaaaaaaaaaatgggatagagcctttaaagccagcatcatctaggtgagggtatcaataggacatcctaataacaccttttttcacctacaggtttgatgccttctatggcgagaagagcactcagcaggaagtctatgtaggttcagtacagcccatcctaaggcacttgctggaagggcagaatgccagtgtacttgcctatgggcctactggggcaggtgagagagccagacgagaactacctatgcatgaggaaaagaactaggaacattgaggggaacttcatacctttctctgctctttgcccagggaagacacacacaatgctgggcagcccagagcaacctggagtgattcctcgggctctcatggacctcctgcaactagcaagggaagagagtgctgagggacggccatgggacgtttctgttgctatgtcctatttagagatctaccaggaaaaggtaagggggcaaagtaccagggccatctagagaggacatgaagctctcctctagtaaaggtgtagtgaagcctagacaggcagggttggggtagcaagtgaaagaaccctaacagtccagtagagaaagggatcctaacccctgcttcagcaggcaccctggtcatggagaaatgggctcactgtcactgctcaaataggtattagacctcttggatcctgcatcaggagacctcgtgatccgcgaagactgccgagggaacatcctgatcccaggcctcacacagaagcccatcaccagcttctctgacttcgagcagcacttccttccagccagtagaaatcgagctgtaggagccacccggcttaaccagcgctcttcccgtagtcacgcagtgctcttggtcaaggtaaggcccgctgacagaaaggcctgggaagcccctgaaatgtggactgagtctgggtctcttgctcttcccctaggtagatcagcgtgaacgtttgactccatttcgccagcgggaaggaaaactctaccttattgatttggctggttcagaggacaaccgtcgcacaggcaaccagggcattcggctcaaagagagcggagccatcaacacctccctctttgtactgggcaaagtggtggatgcattaaaccagggcctccctcgcataccataccgggacagcaagctcactcgtctgctgcaggtcatgtctacccatgttgaatcaaaaggaacaggagaaggtggcacttaggcctgctggttagggaagcaggcattgttgtaaaggaataggagtctgacccatactctaattctcactcctcaggactctctgggaggctcagctcatagcatcctcattgccaacattgctcctgaaagacgtttttaccaggatacaatttcagcattgaacttcactgctaggtccaaggaggtgattaaccggcctttcaccaatgagagtctacagcctcatggtgaggactagggaagaggggtggaatagccaggagagttggggagtttgccaaaatcaccaagcactgatactgaagctgaccactctgattcttctatctcattaatcttcttagccttggcacctgttaagctgtctcagaaagaactgctaggcccgtcagaggcaaagaaggccaaaggccctgaagaagaatcaactgggagccctgagtctacagcagctccagcgtctgcctcccagaaactaaggtgagagtcaggccttccctacaggataagatagctggaggtaacagtggggttagcctgtcgagtctttgagcaaagggattcatcctaaactcaccaaagggccagccagattggcgctctggacgaaggcacgcttagatggggcgcatcaagcttagatcctcactttgaggattcacttttaggagatggagatcctgagtttttaaagccaggaagctcatacagaaaaccaggtgcccagcagtggtggtgcatatctttaatccagcacttgaaaggcagaggcaagtggatctcttgactttgaggccagcttcatctacaaagcaagttctagaacagctagagctacacagagaaaccctgtctctaaactgttccctaccccactccccaaaaagaatgactcgttctgtgaaagccaggaaaagttattcctactgttcactctacactttcttatgctgttctcctaaggctgggacatggagaacaggtcatggcctgtggctttgaagagctcgttcagtgtagcacagataatctcactggatgttattagaaaagtggcattttcactttgaaaaaacaattttcatcagaggtgagggtgaaggttcaaggcagattgatgtatgactgataggacttactgtgcttagatagccaggactccgctggaacaagaatcttctgtatacagcccactggataaaggcgtcttctcactttaggtctttagtaactttcctgttcacgagggcctcttttgtgacactttccctgcttgctttacaaatgtccaagccctcagctcttaccttatccctttctttgtgtttgtggtatgcatggttatgtgtgcatctgcatgtggtatgcaaggctatgtgtgcttgcatgtggtatgcatggttatgtgtgcatctgcatgtggtatgcaaggctatgtgtgcatatgcatatggatgcttgaggatgaagctgagactctgcctcagtcactcttgtaccttacacactgaggtaaggtctcaataaaacccagagcttcctgttgtggctagtatttctagcctgcttgcttgcttgcttggggcatcctgtgtctccctttgaggctagaataataggctgccacacccacttggcatttattgtgggctctaagtatccaacttccaagtcccttgtttacatggcaaagcatttaactgctgagtcatcttcccagcgcccccctccccttcttccttatcacaagtacctcttggacagggtagaattgaggtccctaatgtgtggcatccagtgcatgttagcctcttatctgatattccagtatccctgagagtttacttcacctgaaaaagacaagataactagatatcagttatcagagactaggtaactgcttaaagagtcccatcaggatcatggaacacatgcaccaagttaaggtatgacaagggttgtcctgctgctggaggtgaggagagaaaaggtaacctttttttcaactcagcctcttacagaagctaagcaatatggatccagccatgttggagaacctcctgagtatggaacgtttgctgggttcccagggaagccaagggacccccctactgaataccccaaagcgagaacgaatggtgctcatgaagacagtggaggaaaagaacttagagattgaggtaaatgttggggaaggtggctgaatattccaaccagctttaagaagcattcctagtatcttcagacaggaaaggatgcttagatgctgatctagaattcagtttccatcccgttctggacattttctgtcttctgttggaataatgtttgtttggtgtttaagatttatttttatgtatattggttttattctgacctttatgactgtgtatcacatgtgtgcaatgcctacagaggtcagaagaggttatcagatactctgggtctagagttaagagatagttatgaactgccccatattggtggaatcaaacctgggttctctggaatagtatacttagctactgagccatctctctagcccctgcttgaatgcacttaacatgactgaagcctaagaaacaactgagatcagataacagggggaagaaatccaaattagagaaatggctcagtggttaggagcccatgctgttctggcagaggacactaatccaattgccagcacccacatgaggcaacttccagcttcaggaagcaaacatctctctgaggtctttgggtatatacatagactgcacacatacacaagatagtaaatatattaccagaggctagagacatgactcagcagttaagaacactgactcaatttctagcaactacagagcagttcatgactgcctataattctatttccagaggacccatcactgtcttctgacctacaagggcaccaggcacatagcgcacagacatccatgcaggccaaacacccacacatataagtaaaaatatataacctgcctaagtaggcaggcagctctttttgtgaattcgtttggcccaatctacatagtaagttctaggccagctgtggctacatagtgagaccttatcttaaaaaaataaaaaagtaaaagaaaaaaaaatctaaggctggagagattgctcagaggttaagaatgctggttttccttacagaggtcctgagtacaggccccagcaacggcatgatggcggttcagaaccgtctgcagtgagatctggtgcctatgcaggtataacactgtataatcaaaaaaaaaaaatctttaaaacatgaggtggtgttgcagacctttaattcgagcactctgaaggcagataggtagatctctgagtttgagtttcaccacttgccttgaaaagccaaaaaacaaacaaaaacaaaaaaccccacaaaccaaaaaacaaagcctcctcacgttgaataccttgcttaaaaggactcattctgtctttaggtagccctctgatgtagacctcccttagttattttgaattctgtctctcctcttggacctcagaactctatctgctaaccttcctaatccactgctttggggctggagctaaatcacatctcccatgattctttccgacagaggcttaagatgaagcaaaaagaactggaagccaaggtgttggcccaggaggcaccggatccaagggaaaaagagaacactcccacaattctccagccgcctgcctcttatagtggcacagtggcaaagcccctgaaaaaggctgtagtgatgcccctgcaacggagtaagtttagttccaggttccaggaagaagcagctatttcagaaaggaagagacggaaagatgctgttatcatgtcactcatcctcccactgggtctgaagaagccctagatgcttgtcctctagtattgtagacagtggggtactgactggctatggtgccactcaggagggtgaggcaggagggttactatgagttctaggttagccttatagaatgagaccctgcctcaaaaaaaaaaagtcatgttgaaaggaaggagctagggaaatagaaatgggagaagcaaatggttactaggaggggagggagggcaggaggtggcctgtgtctttgaccagttccaaattcctttcagttcagaagcagcgagagtcctcaaaccaaatccagctcctgaagaaaggccccaaaaggaaggtgagtcccaccccattttccagctgggagccttttgcataatgccttaaagatgccttatagagcttttttgagggggtgtggtgggggagtgaggtatggatgtgtctcatagaaaatatctaccactgtttcttttcttcttgatgcccctgatgccccttgtgtttggattggctgctgactggatctaatgtggcccctgccctctaagaactgtagagcctatttaggaaatggacaagtatttaagaatctctcacataaaatgaaaaatataattttctccacacaaaacattagtagaactgtccccattgtaatggcatgatgcagtttcccccgcatgggttttttgtttggtttcccttttcccccctgtactggaaattgaaccccagccctcaagcatggaaggcaagcgctctaccactgaattacacttcttcctaatcaggattgatgtgtgcgctcagtcactcactgactcttcacagcaactgagaaaggagctagcaattaaagaagcacaacaaaattagtgaccagaggggagaggccgcagagagatggactgtgcctcgtcatggcagtcacccactgcctttactggcatttctgttacctcatagctggagccatcccctgagtcagaagctgtggaaaaggatgaggactactgggaggtacagattagcccagagttactggcacatgggcgcaaaaaattattggatctgctgaatgaaggctcagctcgggaactgcgcagcctgcagcgcattggccagaagaaagcccagctcatcgtgggctggagggagctccacggccccttcagtgaggtaacaaccctggggacaggtgcagtgggggggtccccgtgctgtgtccactcccttcctagtgttgctgtcccactaggtggaggacttggaacaggtggaaggcatctctgggaagcaggtggagtctttcctgaaggtaaggccacctttgccctttctgcatggtgttcccccaccgcagcccaccttaggctgctatgctaacgcacgttcctcttctttacaggcgaatctcttgagcttggccgccagccagcacagcggtccctcttgacactaccttcttttaaaaatccttgtatagtgacgtgttgtgtaaatacagtttttattccatggttgagcctggtttttgaggatgacagggctggggtcagagtccataactaccctgggggtcaggatcaagctctgcaggacacccatgtaggcgccatctttgggaaacccccaaactaggccaagattgtaaataaaccactggaatggggaggggacggtggcctagaagaatcaaaaagctgacgcgaaagcttaagcacagcgaccgaccgttaagcgggcacgcgctccaagctagccccgccccgctgtaactccctcggcgcgctccccactctcccgctcagcaacgacgtccctgttatgtgcgcgtgcgcgcgaaataacggccgctggcggagggaagtggggggtggaatcgttcaagtgggggaagagaagccgcctagtctcccgcgcgcccaccacctgcaccatcgccagccaatcagcaaccgtcttgggggtctcgcgctcggggcgaccggggctgctgggtggctccccagtccctccgccctctagagtccctcctgtccctccccctcccgctggccccgcgcgcactcgcgctcgcgcccgctccagcctcttgtgtgtcctcgcgccccccgcccgccctccggcgcgcagtgtgcgccgctcccccaccctcctcccccctccctccttgcgcgcctcctccttgggtccccctcccccacagctgcctcctcccgccccagggtgagcgcgagccacctccctcctccctccgccatggatcccagcaactggagcagcttcatcttccaggtaacaacccccgccccccccgcccctgccccccctcccacaccccctcctgcccgccctccctcctgtcccacaccccctccgcgcgcccggtgcgcgcgcagtgtccccctccctccctcgcgccctcccccgccctccccgaggcgccggctgggcgcgcgcgcgcggcgggggccgaaactgctccctcgctccccccaccccgccccgccaggctccaaccgccgccaccaccgccgccgccgccgcccgggccccccgcccccggccccggccctcggccccgcggggcctctcgcccccacccagggggcgtcgccgccgccgccgcgctccgcgccccacaagacgccctccttccctccctcccgccggccggggtgcgcgggcggcggggcggccctcgggccatgcgttcggctcggcccaacccggccggccgggggcggcgccccgagcccgggccccgcgcggcccgtgcccccggctcccgctgagctccgggggcccccactgtggccgaggccatgttccccgtgttcccttgcacgctgctggccccccccttccccgtgctgggcctggactcccggggggtgggcggcctcatgaactccttcccgccacctcagggtcacgcccagaaccccctgcaggtcggggctgagctccagtcccgcttctttgcctcccagggctgcgcccagagtccattccaggtgagtaggggccgggccgggcgggcaggcgccgaccagcgaccgcggcccacacggcgccttgtctccgcaggccgcgccggcgcccccacccacgccccaggccccggcggccgagcccctccaagtggacttgctcccggttctcgccgccgcgcaggaatcagccgcggcggcggcggctgctgcggcggctgccgctgcagtggttactgcacccccggcccctgccgccgcctccacagtggacacagcggccctgaagcagcctccggcgcctcctccgccaccccctgccgtctccgcaccagccgccgaggccgcgccccccgccgcggccgccactatcgcagcagcggctgccaccgctgtcgtcgccccaacctcgacggtcgccgtggccccagttgcatctgtcttggagaagaagacaaagagcaaggggccctacatttgcgccctgtgcgccaaggagttcaagaacggctacaacctccgaaggcacgaagccatccacacgggagccaaggctggccgggtcccttcgggtgctatgaagatgcccaccatggtgcccctgagcctcttgagtgtcccccagctgagcggggccagcgggggtgggggagaagccggggctggcggcggcacagccgcggtggcggccggtggcgttgtgaccacgactgcctctgggaagcgcatccggaagaatcacgcctgcgagatgtgcggcaaggccttccgcgacgtctaccacctgaaccgacataagctgtcgcattcggacgagaagccctaccagtgccctgtgtgccagcagcgcttcaagcgcaaggaccgcatgagttaccacgtgcgctcacatgacggcgctgtgcacaagccctacaactgctcccactgtggcaagagcttctcccggtgtgcaggggcctcgctgcccactaggccggtgggggggagggcaacaaggtggcctgtctttggctggtggggaggcggctcccgttcctggggacaggaaccactcccagggaggagggaagttgctaggaacagggggtggtactttagaagaggtgggtctctgggctgaaggaaagcagcctctgggcagaagaggaatcttggtttgagggctttcctgcctgaggactgaagctgagggggaaacgctgggacctttgcagaggcattttggaggaacctaggtagatttgaggcacaccttaccttggagcctaagccctaacacacaccccctcccacctcaacatatccctaggccggatcacctcaacagtcacgtcagacaagtgcactcaacagagcggcccttcaaatgtgaggtaggaagccagcttcctcctgtcctggttttcatgattttgatcctcattgtagctgtgtgggttcagcctctcagaccccctttttctctctctttttgcctcttcactccattttcacatttctccttcaaggcctggtcatctcacgcccatttcctacagatcaaagacccccgagactctgatccccttatcttgctcccttctctctactccccgaagctttaactctcctgtgaccccacaccctcccccagaaatgtgaggcagcttttgctacgaaggatcgcctccgagcgcacacagtccgacacgaggagaaggtgccatgtcatgtctgtggcaagatgctgagctcggcttatatttccgaccacatgaaggtgcacagccagggccctcaccatgtctgtgagctctgcaacaaaggtacatgctaaggggtgccaggagggcagggactaaaaaggggggcacagagctgttgggttttttttcaccgatgtgggtcaagggtgctgcagctaagagcttgtggcgagtagagagaactctttaaggggcaagtacaacagcattggaaacaccaccactaaattatgtgccatggttcacaggagaccgtctaccagaaattcaacctcatgggtgtgcttgggagaatgaagtgggacgtggttactttgagaaaggaatagccaaaaagccagtcccaagggtttcaacttagcagccacaagctcttgtctccagctcctggggcaggtggagtacatcagcaggggtgtgacgagcatgcaccctacccagtagcagaaagctgtttcactgtggttggtgactaaaggagctgagacgggggcactggagaggggggggacacagccgtctccactgagagtcaagcctttaaaaagctaggtagccgtgtcgtggacggtctctgtagagattaaggactaagtaagggcaccacacaaaccagtccccagcaagcgtagggaaaggctatgcttctctggagtagttggccccagcctaccaaggatgtgggaggaggacagtgccatgtgaggagggtgtccccagcctaggagaacagccctgtctctggggtctccaccaggctgaccccaaccccccatcccaacccccccccccaataggcttcaccacagcagcatacctgcgcatccacgcggtgaaggaccatgggctccaggccccgcgggctgaccgcatcctgtgtaagctgtgcagcgtgcactgcaagacccctgcccagctggccggccacatgcagacccatctggggggggccgcccctcctatcccgggagatgccccccagccacagcctacctgctgagggggacccctgcacccaccaggcaaggtgtgggacatggctggggggggcagcatgggatgtgtgggacaagggaactcaaagggcccaataggggatcgcaggaaggccagggatgccagtctgtcactcagattagggagccttgggatccagagagggcagtatggacatgctcagtctgggtaagcaggcaggccgaagcctctggggaccagataggaagtaacggctgtgtcccaggggaaatagggaaatagttgaaaagtctggggtatggaacatgtttcttgccatttaggttgtgctgtgatccttggtgtttctccctataggtactggtgaggtttgtccaatggcggcagcggcagcagcagcggcggcggcggcagcagcagtggtggcagccccccccacagctgtgggctccctctctggggcagagggggtaccagtgagctctcagccacttccctcccagccttggtgagctccaagttgatgggggagaggggagagtggaggaaagctcttcttggtacagtctcctcttcccaccaactcctcacgactcttcatcaaccaaggagcctccagacagagaggaggaagaaggaattcactaggttttaacaatgtttctcctgctcctttcttctccctatcagagctgaccctacaaacacctgtcccctgagttgtgttgaagtcccctggacaatgagcaggggtggcagaggacagcagcagccactgccctcacctttaaccccttgccttgcctcccagggatttgtgagcctttcctagaaggtcctgtgctctcctccttctgtcccctcccctactgtctgctgccccttcctggggagttggtgctttcttttttgttgttgttttttcccaggggtagggaggagagaggaggggaaagaagattctgtcccagaggagagaaaaggtggtattgaggaggggcagaagcggggaaggcagagggatacttgagtaaggttgggtggttaaaccccaagcatcctactggagtgtctgtccagggagaagccaaggggagcatcagaaggagccactggagccagaggcagaacaagagagatggaatcttagggggccagggcaaaggaggggagccagggacaagaggtgcttcctgggggtgggggaatgcagccacagtgtctcccccttccctcttccaccccagctccagccctggtctttcttcctctttcccataacagaagctatggccctggccatgtcatcgtgttcctgtgtcccttgcatgttccccaccctcccctccctccttttgcgcagaccccattacaataaattttaaataaaaacttgtctctgagttcctaagttatcttcaccaagccccctgttgtgtgtgctcatgcctcacccctcccagggagagggaggggttctttgttgaccttgatcttggtcccaacctttcctgctctgcaaagtggtagcttctctcttctgaggtacaacctctagctgcagtacaacacaaatttagggtagggccaagaatccagaagttatggagagcagattccaggtcttcagggaatacccaatctgaacaggcacagaatacccactggagattagggatgccaagctagttattgatgctgtcctgtctacaacccagcaccaggctgcacatacagatcccagggtccatggttgacacagggttcagtaagctgcattcgggtcccactgtggtggtcatggactgcttgccctggcccttcctagcttgctggaatttccatttctgggctttgctcaaacctttacaaagaccctcccttaagcttccatcacgcattgctgctgctgctttccaagagtaggaaggcttcagttctgcaggctcccttctcttgaaaccccacgcagttcccctgcagccaccccaaacttagacctgtttgcttaacccatctatgctgctcagggtgcctccacccaatcctcactggtccgtctcttcgcagacctaggtctctgccaggatcccccggtgaccgttggcgggaggggccgaggacttaggaagaagggggtgccccaccaggaggtgcgcgtgagaaaggacagggagggggcgagaaagggcagggagggggcacgagtggtccccaggccggttacccaggtaacacggggcctggcacgaggttctcttgggctatccgggaggggcaggaggcgtgctaggggcgggggcggcgcggcagcagtggagcttaggggaggggaccagagaagaagggccgagcaaacccggaggagagaggaggggagacccgccacctcccttcattgctcacagacttgttccctccccggtctgcggctgctgcagcagcagcggcggtggcggcgggacgcaggagcagtcccgaggctggcagcggatgagactgggaccaactgagactgctggtaggtgtggacgacagacagctgggtggcatgagaatgcaggtgccaggcgaactagagggtggtgctgggtgcgtcgtaccatcgggagaagatcccctccccctcagcctctgctgaaagcaacaagggaacccctaaaagaagggctaagaaggtatgcacaagatactgggtcttccccaagaatggggctggaaggaggtagacgggcatttgagcccaaatgcacagtaggaaaccctgcacttcttaggtggtgcccagagaggagggaagggtacagaaggagcagactgtgtggggtcctggtcagtctgcctgttggagtgcctgacgcatgcacagattttcatgttctggtgcgccttcgagttggaagctgagagactgggtcttgttgggtgtgttggatggatctaggaacagacccaagagcagttctgtttagaaaagggcttatcttcccatggctctccaagccgactttaaaatacttctccaccttaaagcaaaggaaatcccaacttttcctcctctccctagggacagtacaggctagccttgaaacagaatcctagccctcttgagcctgtggtgatgagagacactcttccctcctcaccaagcctgtctcctcctcttccaggatttgctactgtcactgttgtctcctcttccccacgggccctctcccatctcgcttctctaagatggcagccagcagctctcaggtctctgagatgaagggggtggaagacagttccaaaacccagacagaaggtcccaggcattctgaagaaggactaggtcctgtccaggttgtagcagagatcccagaccagccagaggcccttcagccgggcccaggcatcactgcagcccctgtggactcagggcctaaggcagagctggcaccagaaaccacagagaccccagttgaaaccccagaaacagtccaggccacagacctcagtttaaacccagaagaaggctccaaggccagccccagccccagccccagcgaggcacgccaagagccagcatccaaaccagatgtgaacagagagactgcagcagaggaagggtctgagccgcagtctacagcccctcctgagccaacctcggagcctgcttttcagataaacacccagtcagaccctcagccaacttcccagcctcctcctaaaccaccccttcaggcagagccccccacccaagaggaccctaccacagaggtcctgacagaaagtacaggggaaaaacaagaaaacggagcagtggttccccttcaggctggtgacggggaagagggcccagccccccaacctcactcaccaccctcaactaaaacacccccagccaatggggctcccccccgtgtgctgcagaaactcgttgaggaagacagaataggaagggcacacggtgggcatccaggatctcctcgaggtagcctaagccgtcatcccagctcccagctggcagggcctggggtggaagggggcgaaggcacccagaaacctcgggactatatcatccttgccatcctgtcctgcttctgccccatgtggcctgtcaacattgtggccttcgcttatgccgtcatggtgagccccaagggaccctggcccaagtgtactgtggctctcagcttcgtgccagtgtcagcccagagccccagtaatgacaccttccctcacctctctgcatggatcccacttttccaattgctggccctttgcttgtctctccccaggacctaaccttccaaggcactcctgcccgaccccttcaagcgggagggaaacagatgtgtcatataatcttactgacctgtaccctcttcctcctgcgtccccaattctccttcctttctcaaccccattgggctgaccttcctcctctggactctcacctgatccctgctgggctggctcctgctgacctgggccatgatacctccaaacccctcaccctcaccccagtcccggaacagcctgcaacagggggacgtggatggggctcaacgtctgggccgagtagccaagctcttaagcatcgtggcgctggttgggggggtcctcatcatcatcgcctcctgcgtcatcaacttaggcggtgagtgggggtcagggacaggaagggaggcgcggagggttgaccagggcagctttactaacccctgaccctgctctctcctgtctgtcctccctatgcctttgtctcttcctgtctccttccctgtctgtctttccctctcctctcccacagtgtataagtgaggggctctgccctgcattccaagacttttcttcctgttgggagctgtcttgggtccatccctgtcctgggagaatcccagtccatggccctggcccccatctctagggaccaagggagcctgagcggccttgtttacagcttctttccccctgcatcctgccaggctcctctgccagccataggcttcctttctccctgcacttttgcctgcagacccccaccccactcctgcctcttgacctccctaaccctgcactctgaaaacctctctgcacttctggaagccttcctgaacatctaaattgtactctgcacctctgcatctctcccagcctccctgcacttcttcctgcctctggaatcctctgaaccttatccctggcctcccaacgttcattgtcttggtatctaacccatcccgttctccccttccttaacaccgtttttccccttgccacgtcccctgaccctttctcccttttcatctcccccttagcgtcttcaccctcctgccaacacttagtctgcaaaaactgcagtacttaggtcaggctgagggaagaaggatggtgtggggagaggagcctagctgggggctctgactgttctctactggggaccacccaggcccagaccataccctacccctacccctaaggtgcctattgggtcccaaagctggcaagtgagtcctcacctgggggaccttctgagagtccttattctgaacatccaggggaggaaggggcatagctgcgcctgaagagtcagcctgaattgatctgcccgtttgggctttttaacctcagagtttcttgtttgaaggtctatttatgtgctttgtaaacagtagaattcaaaacaaaacaaacaaacaaaaacaggaccaaagttcccagctgcagggagcaagggaagggtgggggagctctgtaattattctctaagaggatgagggaggtttgttgcacgcgacagccctctgaggaggcagagagccagctgcgatgcatttcagagttggcggggttttttgtttgtttcctttcttttttaaaaaaaaaaaaaaaagttgggggaaaactaaaattccttttcaaaaaataaaactgagtctccctttttgtatgctgaatgctgcatgagtcttaaacactaataaacagagaatgcatgagactggcctcagttggtccctgtgtttgcagagtcaaggtactgctttctggcaggccctactgaacggaatacgcatgcgctgccgcagtggccatctttagtatgggccgaggttaatgagtcctaagggccaaattgcgcatgcgcaagtcttctctttcctcttccaagtagctttgactaccgcggagcctccgcgcgccatttctctgcgcctgcgtactgagatgctgcgcagcctgggaggcgggttttagctccaggtttgtaccgctgctgagtagacgcgaactaggtttgcccggtctaaaaagatgacttccatcccggtgatggagaaggcgatgtgaaagcgagaaaacaggcccttccctttccagctccgagcgtgtttcctgcgggtccctgggaacggcagaattctgggtccgtggggtggggtctgtccttgcaggggtttgagcgccccctcctggggacggtgctctggccgcagtcagctgttggactgactggcgatttcctagacctagaaaggctctccagcctttcgggtgaggcgcactggtttggtactctagaatctcctctattgctgggcttcttctctagtactctatgtcccttgccctgggccatggaaccattgcaggcagcacagcagcgcctctgtctgaagaaggggaagtgacttccggcctccaagctctggcggtggaggacactggaggtccctctgtctcggctagtaaggccgaggaagaggggaaaggcagtcaggaggaggccgggcgtgagggatccaggcctgaggaggcactagaagctcccagcgctgcgagcgacgagcgtgcggagggagaagccgaagactggtgcgtgccctgcagcgatgaggaggtggagctgccggccaatgggcagtcctggatgcccccaccctccgagatccagcggctctatgaactgctggctacccaaggtactctggagcttcaagcagagatcctaccccgccggccgcctaccccagaggcccagagtgaagaggagagatcagacgaggagccagaggccaaagaagaggaggaggaaaagtgaggccatgctttacacattattcccgggactgctctcctgagcacggagcctggagggaggggagagcaggaaaggatgaggcggcgggctggggtgtgccagcgggtgttagggagtgcttctctcaaccttggctttctgtccaccctgtttcaggccgcacatgcctacagaatttgactttgatgatgagccaatgacaccaaaggactcactgattgacaggagacggacaccaggtacggatgagagggaagaactgaggggaggtaaagggcctcccctagttaccccgcccacaagtgggctggtctgaggccttggctggtttcagccatcatcttgaccagcagtgggacggagcattcatacagtagcattcacacagtagcagcatagttctggcttaggtcagtgccatactttcctatcagggaccccgcagaccttcccagaagttcaaagtttgttgaacacatctctgaagtactatgttcatgcccagagctgacctgacatcccagcctgtgggccttcctagaatatgcttttagaatcattctggagctctctcgcagccggccaagccaacagcaagttgcattagctccgcttgtacagatccaccattgtcaaccagaggagtccttttaagtgaggtcccgtctttcctcagcttgtactactcccgaggattccattccagagaggaagagcatgtccacggagagtcttaagttttctggcctctacccctgccccaggacctttgcacatgatggttatgttccccagccattgcattatgggtatcttagtctaataccagccatcctgtgtgtggcccaaacctaaacattagctcctctgtgcccctgaggcctaagaagggagtatttaacaagatctctaagtgtgggcacttggagggctcacgtctcaatgctgtcatgttttctaccatcttaggaagctcagcccggagccagaaacgggaggcgcgtctggataaggtcctctcagacatgaagcgccataagaaactagaggagcaaatcctccggaccgggagagacctcttcagcttagactcagagggccccagccccaccagccctccactccgatcctcaggaaacagtctctttcccagacagcggaagtactgactggtgctgctcctgcctacaggtgcagactgttttgtgctgggcatggccagcctttcccaacccaggctctggggaacttgtaatggggaaggcctcaggctcccagcgcagtgcctctcaggagagtgcctgtgtgttctgtttagtgtctgttcgcagttttgagctggatgtgctaaatctaataaaagatgcccgatgagttgggcgtggtggcgcacgcctttaatcccagcactcaggaggcagaggcaggcggatttctgagttcgaggccagcctggtttacagagtgagctccaggacagccagggctacacagaaaccctgtctcgaaaaaccaaaaaaaaaaaaagatgccgggtgatcttctcagaggagagactgcagctcaacccaagcacgcattctcacttgggcagaggcagagctgtgttcctccacactgtaatattgaagccagaagaggcagaggctcagccagccaccatcccccacccccacccttactgctgcatcctctgatttcctagtctcggtccagacccgccagttagcactgattcagaaactgcccccagctgtggtgacttcagtgcagcctggaggagcaaaagatccagttgcagggccctttaaatacacaagctccgcccctgcctgcccagcccattagggaagtcatcccaagtgttggtgagggaaattcctgacctgtggcctgcagcagccagctaccctgctaaatgtgagtacggatcttgtgaccgtggcgggacccccaagactccaacccgggagtagatgtctgtcccacaggctctctctagtctgactgctttcctgcgacgtttcttctggggcagtgacgtctcagcagttacaggaaggagggcgtgggcagctctgccttgtgaggtttcactttctaagactttcagggttcgaaagcaccctgttaatgtcctcggcccccaaaacctcaggcgtccctgacatagggtctccctcacaggagatgggcggtaaggggacttttgtcaggcccagtagcacacatgtgccactccctactcagaaacctgaagcaggaagggtgccttgcacttagcaggagagaccccatcatttctgtttctcttgtttggttggttgactttaggttttgttttgggggtggtggttgttgttgagaaagggtcctcctcagccgggcgtggtggcgcacgcctttaatcccagcacttcggaggcagaggcaggtggatttctgagtttgaggccagcctggtctacagagtgagttccaggacagccagggctacacagagaaaccctgtctcgaaaaaaagagaagggggggtcctcctcattttttctaagtggtcttgaactctctgtgtagctcaggatgaccttgaacatctaaccttcttgcccccacctcctgagtgagtgctaacattatagatttctgtcatgaatatcagttttattcagagctggggctcgaacctaggatttcatgcatttgggacaaggactctacaacctgatgggtagagtgtgactcggtggcacagcatacttacatgtaatcccagcacttgggcagctgaggcaggagggtctccagaggcttggggccagcctgagatatagttccaccacagcctaagctaccgtgtaagaccctgtcacaaataacagaagccaactgggcaaagttacagcttccactcagactccattgctggcttttcccttctgccgtcactccagaggatccgggctctaccttctctgagtgactggcatgtgtgacttcacctccttgattcccttctccactggtcgtggaggctttttcctgctgccctgggcagggctgtgcgaaccatgggccttggccatcttttcggtggtgagcgggacgatcacaagagtagcttggtttccaggaggtgcagatttaatgagaacgagaggaaagctttaggggaagaaacaggaggaagctcaatggacagccggcctgagggtctggggacttgggattggtgactattgcccagctctcgtgggagatggtggttgacaaagctgttccttctgccctgcctgcctgtggctccctgggacatgaaaaagaggctggccatcacaggatatacctttggcacacaggatatctatccccaccctgaggtggggcacctgggcaggacagctaccacctttgccatcctgggcgctcgatgctcaggcctgctgtggtatcccacactcttctcgtgtagccaagacttcgctggctccgcgtatggaaaatgctcgcctttgaaaagccatttcagctgggcatggtggtgcacgcctttaatcccagcacttgggaggcagaggcaggcagatttctgagttcgaggccagagtgagttccaggacagccagggctacacagagaaaccctgtcttgaaaaaaaacaaaaaagaaaaataaaagccatttcctggacagcaacaaaccggaacaggtcctctgtgtccccttcagtgagactggctgacaacctggtgctgacaagccatactgtctccaggaacgccagggaaacctggccaaccatccaggaccaagccgtatggctgggctaggtcttgacctcaaaggctagaatgagtcatcagaaggcattggacgtagggtgggcgattcctggaatccttgattctgtgaatctggagtaaggcctgagaaaagtgtgacgaggactcaatgttagtcagaagccaggtgtggaagcatggcaattgttttatccccagagtttcaggccagcctaaacaacacaataaaactcttcttgacacaagctggagagatggctcagtgagtaagagcactgactgctcttccagaggtcctgagttccattcccagcaaccacatggtggctcacaaccatgtgtaatggagtctgatgtcctcttctgatgtgtctgaagacagctaactacttacataaagaaaagtttaaaaaaaaagaaaaatcccagtcaggtctcgtttaggagagaaaaccttaatggagatcagggctcctgagtcagtctaattctagtctgcacactcttcatttgtaacattttgggggggaggggctgttgaggaggggcagagccacttggcacatggtgaggccaccaaactgtgtcacagttaaggttaaggctttcttttttttttccagagcctgcccttagcctggcctgcctgtgttacatacagtatcacagcctgggctaccactccagctgtcgattggctaagattgtttgggggaggggctagtgagattgctgctgagcctctgctggcctgggttcaagccccagagccaacatggtggaaggtgggatcaaggaagaactccattgaggacaggccctgcttatactgaatgtaggtagaccttttcttaaatccaaagtaggcagccatctggtggctgggctgggtcaccaccttccccttcgctctctgtcctcccaggattaagagaacagctggggacaaagggagctacttggagctaggcaggagaggaagggtttttatcaggaaggcaggagagagacctgtgacagtgttaatggttaaagtagaaggtgcaggaatggtcccagtgatgattttaaggtgaagtagagcaactggaactgtcacccacaggagaggggctgttcaaagtgggatgcagtcacaggaatggagggaggctggaatgggctagccactgagttgatggtcttgttctcctgaaggcggagatttgaggccttcagcttcacagtgaattcacagctaccctggacccacctgagaaagaagaaaaggtcttggtctttgccctccagatgtaaacagatttgttgagcttggactgtttgagatggaccttcccctccctaaacctgtagctttaggacagacacctttgcaactttttcagtccagcagaggaagtttggttgctaggagtgattcagagccaaggttgcaataacagaactgtgacaaggctaatgtttctggttgttgaggtttggttttgtttttgaggcagggtttccctgtacagccctggcaatcccgaaactctagaccaggctggccttaaatttggagatttacctggctctgtagccttagctagctgaaaacttgctctgtatctcagtccttcatgttgtagttttcttcctacttcctaagtgctaggattataagcataaaccactagactcagctcactcacacacaccagcatcgctctgggtaacccaggctagcctgggctagtgctgtcaccatcacctccagatggcttatagctggtctttgctgctttgtgggtttcttttccccaccctttatcctcccctccaccccatttcaccccctaccactagataagagaaaaggagagaggagagagatccctgaattgaacttttgtttcttttatgagcatgactactaacaaaccaaaaccaaccaaatgaagccaacaaccacccacgcttgttggggtgctagcatttatgtaccctctgaaaagttcccagaattccaaatgtcacacagttgcagaaactatctgcagctggtaaaaccatgcctctgctagagcacgaggcaaatcatagtcagctgctgtggacggtccgatgcagcccacaccccacacctgggattaaaacaaaagtgctttcttaaaatatttctgtatttttaaagaaaccacaattccagaattctcactacagtggctctcaatctttgagtcattgtgagaactttttaaaaaattaatcagtgctcagaccctaccctctatgaaagaaaccccaaatctccagagatacacagctttaagaatgtccaggagagatggcttgacaacgaagagctggtcctgctcttacagaagttcaactccctgcactcacatgagcactcccacacagacacatagttaaaataataaaagactaagctgggcagtggtaatacttgcccttaattccagcactccagaggcagaagccagcagatctttgtgatttcaaggccaacctggtctacagagtgagttccaggacagccagggctacagagactgtctcaaaattactactactactaaaacaaaaaagaaaacctccctgcggaccacgagcagtgaggcactgtgaaccagccactggctatttagattccctatgccagacattcgaaggttattttgaaaattcctgaaatgtgatgattcatggctcattgattttggctgatacatcaacattgcctttgagttgccagaaaaggaacgaagccaagcatggtggcccataccagtagtctcagcactcaggaagtcgaggcaggaggcttgctttgagttcgaagccttcatagacttcatcatagtagtaatccactacccagggttacatagcaagattctatctggaaaagaaaaagggaaagaacagacgtagtagttcactctaaggatttggaagacagaaagattgctgtgcaaggccagcctgggctacagagtgagacgtctcagaacaaaacctggggctggcagcctgccctcgttctgtgtcgtgcactggagaccagtaagccaagctgcaccctggcctcacacacccctctttgcacagcagactgtaccccagcttctgctgctacctgaggactagctgtggctccgagcaggccagactagacgtgtgcccaagagccggcaagagccggcagggagcagggctcagcacaaggcagaaaggagaggtgcagccggcaagagttggagccagacctcgggcatccggacctggggcagccatagacaaccctttgccactggcttcttcatttctgttgagacacattctcattatgtagtccttcttagcctgtaactcactatgtcgaccaggctggtctccatctcacagataccttcccacttctgtctcccaaatactgagacgaaaggcaggtgctaccacacctggcatactgtgtcttttgagggccttgaaataacagaaataaaaggctggaactgtgcacatcatcgagtaagctgccagagtgtgagacttgtcacaaatctaagtgccagaggcataaaggcgatgcctgctccaagggaactgactggtagtctcagtggtgggggagctatggggcgtggtaggggagtggacagggaagtgagatggaacccttgtaccgaagcaggggcctggcctcagaacaaggccggaacccagcctgattagctttgaggaaggctcttgctgagtcactgagctgggagaggctctcaggccccctgactgttcccagctggggtgacagatggtggagaggcctcagtcttggggagtggagccaatagaggctgtgcctggagcctactcccacctcacaggaccttctatatttctcttcttccgggtggggcctccaaaccctgctggcagtacaggcccttcttcttgtcccatctggtttcctggcttggcttctcccttgcagtgaacctgcattggagcccctggagagatgctgtacccaactgtggggagcccctgcatagctgtgcctctggtgtgcgaagccttacctgaccagtagacaagtgagggttcagccctaatgccagatggggaaggaggccctgactacacccctcagtgggttaggaaaattgggccttgggccctgtctattctcagtagtaaacactgtactggtaaagagccaggcttggctgtgggtgctttctgtacaaacgtgtcatcaccgtgctgggaaaagactattagtcatctcaatttggtaatggaggaggcagatagaggaacaaaggacatcctgtaaggtcgttcatccaaagagggtcaggtgtccaatggcggtggtggtacacaactttaatctcagcactcaagaagcagatagagccagggcgtcgtggcgcacacttttaatcccagcacttgggaggcaggggcaggcggatttctgagttcgaggccagcctggtctacagagttcgttccaggacagccagggctacacagagaaactctgtcttggaaaaaaaaaaaaaaagaagcagatagatttctgagttccaggccagcctggtctacatagccagttccaggacagccagagctacacacaaaacaaaacaaaaacaaaaaagagggtcttagtttaagtggctttagtcttagagtcttgaatgttgctctcctggaacagggttccatttcatgtcctgcagcaactggaatagaggcaaagttgagccggatatgcagtggcttggaggactcagagcagagggatcagcttgggggcagggtggggcatagaggagagatgggacaccggatggacaggactggacaacatggcaggacagagcctggaagtcagaaggcaagttgtaagcctggaaaagctaccctcctgagaatcggggatctcagcctcctgtgaaaagggaacccagaacagcttctaggttagatcgaagctgcagggttaaagaaagaggcagttgttccctgctttatgtgtttccaaacaaagtcccttcagagcaacttcgggatggacttgatcttactactgtttgaggttgcagtcagcatgcctgatggtatggcagcaggaccctgaggcagtgggtcacactgtacccaccagctatcaggacctgaggcagcgggtcacactgtacccaccagctatcaggaaacactgaatgctggtcctcagatttctccttttgagtcagcatgaaccccaagcccacagagtggtggttaggctgggtcttcccacatcaattaaacctactgtagaaaattcccttagaaacatgccctgaggaccatctcctgggagattctaaacattgtgaagttggcagcgcttagccatcccaagcaaaatttcctccctttaacatgggaagcatatcagaaaagcattgtagtcggcggtggtgacacacgcctttagtcccagcacttgggaggcagaggcaggtgaattgttgagtttgaggacagcctggtctacagagtgagttccaggacagccagggctacacagagaaaccctgtctcggaaaaaacaaacaaacaaacaaacaaaaaaaaaacagaaaagcattgggccagggaagttagcttagctggtaaaatgcttgtcattcaagtgagccctgagttcagtctccagcacttaaaaaaaaaagctgagctgctgagttggttcagttcccaacatggaagttcacgattgtctgacgctccagtttcaagggatctggcatcttcacgaggacatacatgcaggcaaaacaccaatgtatataaaataaaatacaataaatccttaaaaaaaaaaaaaaaaagaaagaaaagatatctaaattgtgattttggccccactggggatgtgaagacagacaaatccctggaccttgctggccagccagcctattggaattggcaaaccacaggtcatacagagaaattatgtatgtttgtttgggggggagggggggacttgtctaaaaataaccaaggttggacaggagacatgaggtgaaggtgcttgctgctgagcctcacagagtttgggcccagggatccacacggtggaagaagacttccacggcacactctggcacacgcacccacttaataaaatttaacaaattaaaaacagaaagtaagctgggtgggggtaacacatgcccagcactcaggctgctggtttccgatttgaggacagccagagctacacaaagaaaccctgtcttgaaaaaccaagaaaagaaaagaaaaaagtgcatgttacctgaagataaacgcccaaggctgtcatgtagcctctgtacacacaccccaaacagcaagaacctttccttctgtttttgcttgtttttcttttgtcttgagatggaggctcgtgtctggtccaagcttgctgtgtaattaaggataacttgggacactccccttggaccttctgagtgctgggatggcaggtgggacccactgtgcccgtttatgtggtgctgggaattgaacccagggctttcatgcatgacaagcaagggcactctaccagctgagcctcacccctgctccaacccaagcttctgagtccatgtccttaaccaacgtcgccagtgtttctaactgcctttagagaaagaaaggaccggctgaggatatagctcagtgctacacagaaagtttgtctagcatttgtgaagtacacgcctcaaatctgccagaacaattaataatattaacaacaataataaaacttttaaaaaagcttcagtctggggctggagagatggctcagtggttaagagcacttccaaaggtcctgagttcaaattcctgcaaccacatggtggctcacagccatctgtaatgagatctgacgccctcttcaggtgtgtctgaagacagctacagtgtacttacatgtaataaataaataaattaaaaaaaaaaaaaaaaagcttcaggctttgactcaggagtctagtcctgagtgtcacatccagtgaccccgaatgactcacgatctttatctgagctacttggggctatactatccacaatggtaaatggatcaaaaagccacaatggcctatttgaattaaaatttaaatgggcaccccccccccatgtgggggactgtccctaggacctactgagccatactgctagcccctgaaattaaattaatttttcccccctggggatgtgtcttaattattgctgtgataaaacatgatgaagcgggggttggcgagatggcacagtggttaagagcgccaactgctcttccaaaggtcccgaattcaaatcccagcaaccacatggtggctcacaaccatccgtaacgaaatctgatgccttcttctggagtatctgaggatatgtacttacatataataaataaataaatctttaaaaaaaaaacatgatgaagaaagccgggcgtggtggcgcatgcctttaatcctagcactcaggaggcaggggcaggtggatttctgagttcaaagccagcctggtctacagagtgagtttcaggacagccagggctatacagataaatcatgtttcaaaaagcaacatgtggtggtctcaccacctatctcaatcaattctgcccaggtataggctgtagaaataacttgggggcaaggtcacatagcgtcttgtctcttggggacctgaacttagcattacacttgaatctagcttgtgtcaagttgacaagaacctactccggacaggatatagtgtagtttcccagcatgtgcaaggaaggccctaggctagattcttctctctttctgtattttatttattttatgtatgagtgctctgtctgcatgtacacctgcatgccagaagagggcatcagatcccactatagatgcttgtgatccaccatgtggttgctgggaattgaactcaggacctctgaaggaacatacagtgttcttaaccactgagccatctctccagtccactaggttacattatcaacactgccaaaacaaagatgctttgcccaagcatggtggcacatgcttgtaacccccacactagggagactgaagtgaggacatggagagtttaaaaccagtctgggctacataacaagagtctgtacaaaacaaagaaataaaagggtaatgatttgttttttcagacctcccaaccacattccaaatattcagtagaatcacagtctagcgacagaagatatggaatatttccaggtgctggagagatgactcagcagttacgaacacctgttgccccaggcagtggtgtcatcgtatgcctttaattccagcacttgggaggcagaggcagaggcagaggcaggcagatttctgagttccaggccagcctggtctacagagtgagtttcaggacagccagggctatatagagaaaccatgtttcaaaaaacaacaacaacaaacaaacaaacaaacacttgttgcttttgcaagggacaggagtttgttcccagcacccataataggcaatccacaactgcctgtgtctctagtttcagtaaatctaaagctttcttctggcctctataggcattgcgcatactcatacatacatacatacatacatacatacgcatgtgtgcacacacacatacacactgaaggaagggaggagggagggaggaagggaggcaagcctctgctttgcctagcagacttgattgcctttttctgactggaatagacatgtccaaagtccaagaggggctgggtctaaggatgggcagtacttgggtgtgtcacattctcaaacaaaccgagcactgaaggaaaccagccaggattcacaggtagatacaatggtgtgggtagatacaaaaccattcacccctccttcccactccatcctgctcttgtttcttctgacagtgggagctgggggcgtccacaagctaagaacggtggagattcttcaccttcactgggttttgctgtgttaggaatccacgtggttcgatgggagcatcacttgggtcttcttttttctttttttattttcttttatattttaatttatttaatttattatatgtaagtatactatagctgtcttcagacttcagaagagggaatcaggtcttgttacagatggttgtgagccaccatgtggttgctggagtttgaactcaggacctccggaagagcagtcagtgctcttaaccactgggtcttttcctggtggggaccccacttctgaaaagttcacctcaggactgcttagagcacagggaggcagaggggtgcagacagacatctgaatacagccaggctttcttgactcgtggaataaaaagctgcttgactctggagaagtcagtaaccctcacagaactgtggctctccagcgtgggtgggacaaggcaacatcggggtgtccccactcagcttggtgcaccttaggaaatgggaacctttgattcacaggtgtgtggagggagtgggcgggagggagggaaaggtggctgtacatctctctggcttctgtgggtaaatggaagcaagcagttctttgcagaggtggggtctgaggtgggataagaaaaggagaagcaggtatggcagagcctgcttttcattccagaagactgaggcaggaagccggtgagctcagagttggccagctatctcagaagtaggggtggggcaggaggagggtgtagggggaaggaagaggaggaagagggggaacaggaggaagagcactgagagatggctcagatgtaaggagtgcttggagaggacccaagtttgagtcccagcacccacattgggtgactcagtcacctctaagtctaactccaggggttctgacatcctcctctgacctctgcagggccccaggtacatacaaagtgcacatacatatgtgcaggcaaaacattcatgcatgtaaaataagtcacattatatacatatagaagaagaagcgctcactgctcctgcagaggaccaagttcagtccccagcacccgtatggtggctcacaactgccactaactctagttccggggaatctggtctctgaaggctcctgcatgcaagcacacagtgcacataaacttatgcaagcagggctcagcaggtaagagcactgactgctcttccaggagtcctgagttcaaatcccagcaaccacatggtggctcacaaccatctgtaatgggatccaatgccctcttctggtgtgtcagtgtgtcattccaggctgaggcaggagaatctcgagttctaggccagcctggtgtgtgtgtgtatgtgtgtgtgtgtgtgtgtgtgtgtgtgtgtgtgtgtgtatgtatatatatatatatatatgtatgtacatgtatatatacacattgtgtactcatgtaaataaactaaatcttttttaaaaacttatgtaagcaagtacatatgacatgaagtaaaatattttatgttttaaaaagcagaggaggtgggaataggaaggggacaatcaggggagctgggaaggggaggcaaattttggactaccctgctttgtcccgaatgccctgtttaatcttttgtcttctccacctgtcctttttcgtgctgcaatcaggttaggccggggcttgggattcaccatggcaactgaagaggccatcatccgcatccccccataccactacatccatgtgctggaccagaacagtaatgtgtcccgtgtagaggttggaccaaagacctacatccggcaggacaatgagaggttggtgtagagctgtcccagcctggctggtgggaatgaccctcatctgggtggccgggaggtttctcttgcttttactgtctcctttggaacatcatcctggctcctcacgccccttcttatcttacaacagggtactgtttgccccagttcgcatggtgacggtcccaccacgccactactgcatagtggccaaccctgtgtcccgggacgcccagagttctgtgttgtttgacgtcacaggacaagtccggctccggcacgctgaccaggagatccgactagcccaggaccccttccctctgtacccaggggagctgctggaaaaggtaccttgctttcctctcttgaggcagacgctgcctgctctgcggcggctcccgtaggaagggctgaggaggtagctatggattcttatcaggggcaaagacgactcacagtccttccattctaactcccctgctctccccacacacctcagacagacttacactagctcacaatatccatgcctatatgcctgggaatgttgccatgcagacatggaccaccatcatagccagaccctcatccatttgccccatcgcttgagctcccaagcaagggagtctaccaagtttttaaaatagttctaactctacctgcttggtattttatgcttttaaagtgactttatccactggccagtgccttttctgttatcgttacattgtatctccttatttcatgggggcaggggcagggcatgcacacctgctacagacctgcatgcggaggtcagaggacagcttgcaggggtcagtgctgtccttccaccatgtgggtcctggggttgaactcaggtcaccaggcttggcagcaagggccatcaccattgagcagtcttgccagctcactcttaaattttcctttttttttttccccagtgctaaggatagaacctagttcattgtgtatgctaggcaagtgctctatatctgtaaatcctaatgggtgcttcttgctcttgagagcctaatagcataactctgggtgtgtccacggctggggagaaagacaatagaagtaaccaggggtcagtgagatggtccagaagaacttgctgcataagcctgacaacctgagatcagtgccccagacccgtgcctgtgctgggaagagagaacccagctcccgagcattttcctcagacttccaaacatgcatggtaattcatgtgtagctacacatacacacatgaatacataaagtgaaaattttaatgaaacaataaataacgaggacaaagcaatcctagaaagaatccgtgaagccgggcagtggtgacgcacgcctttagtcccagcactcgggaggcacaggcaggcggatttctgagttcaaggccagcctggtctacagagtgagctccaggacagccagggctacataatgaaatcctgtctagaaaccctcccaccaccaccaccaccaccccaccctgctgcagagagagagagaaggagagggagctatctgcctatctatctatctatctatctatctatccatccatccatccatccatccatctatttatttatttatttatttatttattatatgtaagtacactgtagctgtcttcagatctcattatgggtggttgtgagccaccatgtggttgctgggatttgaactcaggacctctggaagagcaatcagtgctcttaaccgctgagccatctcaccagcccccttatttatttattttatgtgagtgcactgttgctctcttcagacacaccagaagagggtatcagatctcattacagatggctgtgagccaccatgtggttgctggaaattgaactcaggacttctgctgagccatctctccagcccagctctgttctttctaagtttcagtattggttcaagataccaccaggcgaaggagtgcctaagctagacgaatgaacggaagaaacagtgggggcagccagttgtcactgtcatcctagtcacttaggcagggagcaggccagggaggtgccgtggctctgtgatgcagcagacaggaaatgacagcgaggtgtgtggacatgtgccttagagagcagaggcaggaagatggtgatcttgaggcaagtctaggttagacagaagccgatcgggagatctgttttctccatcccagagtgaggccaggagataaagtggctgcccacctctacagcgcagacctacacggggaatacgggcatcactcgggtgaatgtcctgacactattctttaacagctttgtaggctagttcagctcacacgtatctgctcatctttcctgcctcgtttagaatattttcagagaccaaatctagtcatttttataaacttttaggttcatctgcttttgtaaggcctccccttcctacgagcacaaggcaatactgaaagcaaagctacaagattaaaacctgcattttacacccctttattccgtcctcctttctcttttttgctttttgggggcacggttgcatgtagcccaagctgacttagaacttgctgtgcaattccatccctgcttcgcctgttggcgtttatcaggtgctgtgattataggcgtgtgccactacaccccgctttatgtttgaatttcaaatccttcctagttcagtgattctcagtcttcctaatgctgccgccctatacagtccctcatgttgtggtgatccccaaatcgctacttcataactactcttttgaatcctaatatacatctctgatatgtaaccccggaggggtcatgacccacaggctaagaacccctgttctagcacatcagtgtgaaccaggtcctgcaggtggtgttcggctgcctaaatgtctctcccagtttcccactaggtcccctccttacacttgtcctcgacagtcagaagagagtgcccttggctcaggagcagtgacatcctccttagttcttcagacctggtggccctgggcccactcctaccttgtatatcacactaggattttaatggagatacacaaagatggctgggtgtgtggctcggtgggagaacacttgctcagcattcacaaggccctgttctgatccacagcagtgtggacctctcagagactggtgctgtggctctggtctccaagtatcaggtttgagctcggaatcacagcttgaacactcatgacccttctttccctgcaggacatcaccccgctgcaggtggttctgcccaacactgccctgcatctgaaggcattgctggactttgaagataagaatggagacaaggtcatggcaggagacgagtggctgtttgagggacctggtgagttctgtccccatctcttggtgcttgtctgggccggggcttcctgcctttctcccataaccctgacatctttggctgtgagcatcagctgtctcctcctctccttccccaggcacctacatcccacagaaggaggtggaagtcgtggagatcattcaggccacagtcatcaaacagaaccaagctctgcggctcagggcccgcaaggaatgctttgaccgggatggcaaggaacgggtgacaggtgggaatgactgcagcactgtggtggatgggcaggcaggaaggagggagggcctgcagggaaagcaagaggaaccacgtgaagccagagaagtgaggtgtgtgtgtatgtgttttgtttttgttttgttttgtttttgagacagagtttttctgtgtagaccaggctggcctggaactcagagattgcctgcctctacctcccaagggctgggattaaaggtgtttaccagtactgcccagcatatgtctgtcttccattgtttgtttatgttgttgttttaaagatttaaaatatatatttatataattaccttatttttatgtgtataagtgttttgtatgtctgtatgtctgtatgcaccactttgtgtctggtgcccatggaggccacaagagggtgacagatccctggaactggagttatagacagttgtgagccaccatgcgggtgctgggaactgaaccccggtcctctggaagaacagccaatgttcttaaccactgagccatcttcccaggtctgttccttttgagacagtgtctcatgtagctctgactgacctggtattcaatgtgtagtgcatgatggcttcaaactcatggtaatccttctgcctcagccttccgagtcctgggagtataaatgcattcccacgcctgatttctcccagtctctcctgaggtctaccagctgcatcttgcacacgcacttccatgctagccttgagcctgcattcacaccatgatagcgtcttactgtccccactctgtaacataaactgtgggcactggacacatgttacctggttctagatcaaaggtgagatattcacatacattcaagatgatagatggtattttatttagtcccctgacaagtgtgagactcttttttttttaagatttatttatttatttatttatttatttatttatttatttatttattataagtacactgtagctgtcctcagacactccagaagagggagtcagatctcgttaaggatggttgtgagccaccatgtggttgctgggatttgaactcctgaccttcggaagagcagtcgggtgctcttacccactgagccatctcaccagcccaagagtgagactcttactgttcccatttatccacagcaagactgacgcacttttgtagggtatgtggccatgcagggcaagactgtgatttgctactgggcaatgactttctcaggtctatgagaggcccttttacccattgcaggagcatgaaaaattagtctttggtgcttagagacaacatcgcagggtgcacctgtagcactgatgtgacattctagaaggccctttgtggtttttgacttttgagataggtttctttccctgcatagcccaggttggccaaaaactccctatcctacaacatcaatctcctgaatgctgcgattatgggtatgtgccaccatgcccagcctctaaaagttttataggtttgttttgtttttgttcttgttcttgttcttgtttttaaagatttattatatgtaagtacactgtagctgccttcagacactccagaagagggcgccagatcttgttatgggtggttgtaagccaccatgtggttcctgggaattgaactcaggaacttcggaagagcagtcagtactcttaaccgctgagtcatctctccagccccctgtttttgtttttgtttttaattcttctgggaaagaggttagttttcctctggcctcagagaaagcagtggcttcaaggaccttgttaggtgctcaactctagggacagtggcttttctttgccttcaaagcccagctggtcctggtctctgggctgccacgcagtgatggtgggtgactggctgtccttcctgctcctgacccaggtgaggagtggctggtccgatccgtcggtgcttatctccccgctgtctttgaagaggtgctggatctggtggacgctgtgatccttacagaaaaggtttgtgcttgggtgtggggagagaagctggcagtgctcagagggcagacaaggtgcaaggaaggagcaggcatcgtccctatgcacactagagaaatcaggtcagatctcccgaggagagtcctggagtatcctccagggtaggtagacattgtccccgagacctgggatcaagttaggggcctatggtgttcccagatccaaagcactggcagcaggaaggtggcaagaggcctccacaagtaccctgtgtctccacctgcagacggccctgcacctccgggctcggcaaaacttcaaggaccttcggggagtggcccaccgcactggggaggaatggctagtgacggtgcaggacacggaagcccatgtcccggatgtctatgaggaggtgctgggggtggtgcccatcaccaccctgggacctcgacactactgtgttatccttgacccaatgggaccagatggcaagaaccagctgggacaaaagcgtgttgtcaaggtaaggccatctccacctcagagctgtgacaagggagacccttgagcagcaagcggccttctcatctgtcttgctccacgtcttccaaacaacacatatgttttagaaatacctttagtatttttgcacacaggtttatattcctgacacgctgtcctatttgcttaccctgggccttaggcttctcctgaagtttctggaactttttctcccaatttctggaacctttgtcatgctgcataaaataaatctcacagcccccagcccccatgctctttctcccctatcctgcctcctgtgagaaccgttagggctcagcaagctacccctacaaaggcagggactagatagtttagggcttgtgtggatgagatttctgctgaagttatccaactaggctattgccacagcatcatggaaacaacaaggaagcgaaactagaaacgaggtgtgcaaaaggcaggtacactggggaggttaaggcaggaggatcaggagcgcaagggccatagtgagctttggggtcaccctggatacatgacatcatctcttaagaaaggaaaagaaaggaaggggtgaggaggcttaaaagtaaaaacaacccttgcgagatgtggtggcgcagggcccgaatcccagcttaatctccggaggcagaggcaggcagatctctgaattctaggccagactggtctacagagcgagtttcaggccagcaaggatgacttaatgagaccctgtctcaaaaacaaacagaacaacctaaagtgtcaatcatttgatgggttggtgtttaaaatgtgtggctgtgaatttgaggccaacttgggctacccagcaggagcccttctcaatggggagggaaacctacaacacaggtatctatattctcacttacctgggaggctgatacaggagtccagaagttcaaacccattctggttccatatcatcattgggagcaggtcagatttgactctaagagtttgcctaccctcaaatcctcaaccccaaatcctcaaattctgccaatatcaagaaaacaaacagtgggagaaatgaaacacctattgttataggtgtttccctggccatcctaacnnnnnnnnnnnnnnnnnnnnggcctccctcagtctgctaacctagacctagtcctggaaactgctagcctctgtacagtctaatctaggcctagaatgtttccagcctctgagactcactgcgacatatgctcactctttattgttctttctgagctcagctcttctggctcaagctcttctctgtgctgaccgattcaaactggcctctttctccacctccgactgaattgatctgcttggcgtcaaactaactctggcaatctgttctcatcttctggctccttctcattctctcgctcaatctgtcttcacccgtgtctagtgtattctctctacaacctatctctgtaaaaggctcccattaaacctccttttttgctttctgcgctgctctctcttaagtagcctctcatttttttctctgttcttgtaagggttgggcatatcctgttctgtcaaatccttctctgagtgtctgccatttagttagatgtcactttcaaacatgggtgcttccttgtacaaactaactctactgtcgttgtttaggattaaaggtgtgttttaagggcatgtctgtatttcagcccgagtagctatattgctggattaaaatccctctacacagtatgggaatgggaaagtgccaccagaagacctggctcaaggtcatgcaatagtggcaagccaggaggctatattgaggcagtatggccagagagacaccatgacctaacatccccttttttcccactagggagagaagtcctttttcctccagccaggagaaaggctggaacgaggcatccaggatgtgtacgtgctgtcagagcagcaggggctcctgctgaaggcgctgcagcccctggaggagggggagggggaggagaaggtcgcccaccaggctggagaccgctggctcatccgagggcccctggagtatgtgccatctgccaaagtggaggtggtggaagagcgtcaggctatccctctggaccaaaatgagggcatctatgttcaggatgtcaagacgggaaaggtaccagctgtgggatgggaggtaccggtggtggcttcctctgggcaagcaggtagagttgatggagagaggcaggttgggagaagactcatacagcagcagccaggtggccatgccatactccatttgtcatctttgtcctaaatacctaattttacatttcagagactccagctgagaggatgggctaggctttaggacaggagttctgccctgatgcagatgtggtccgagcataaaggtcttggtggacttttgctgcttcacctaaaccttgaccttggttttacttggggtgacactgccaactttccccctgagactctaatgtagaaacaattcagagccagaggcagcactcgtgtatataaggcgcttcctaggatcacagctgaagttctgatgcacaccacattgcttcagcaaaggaaaaccctagaaataataccaggcacttactacataccaagtgtggttctttgaattagacgtgtgagcccttcctcattctgaaaccccagatggcccattgtacagatgagcaagtgaggcatgagcaatagcttgagaaaaagcgagcagacggcaaccaagctggaatgcagtcttcctgcagacacctgctttaaccaggacactgtgctagccctgggcagggtgggctcagggctgaaaggatgatggttctccctccagcctctctgaaaatgcctcccctaggtgcgggctgtgattggaagcacctacatgctgactcaggatgaagtcctgtgggaaaaggagctgccttctggagtggaggagctgctgaacttggggcatgaccctctggctgacaggggtcagaagggcacagccaaggtccttcagccctcagctgcaaggaacaagacccgagtggtcagctaccgtgtcccccacaacgcagcggtgcaggtgtacgactacagagccaagagagcccggtgagccagcagaggcctctgcggggtcccggggtccccagggaagctctcagggcggctgacttccagctctctccacagtgtggtctttgggcctgagctagtgtcactggatcccgaggagcagttcacagtgttgtccctttctgctgggcgacccaagcgtcctcatgcccgtcgtgcactctgcctgctgctgggacctgatttcttcactgacgtcatcaccatcgaaactgcagatcatgccaggctgcagctgcagctggcttacaactggtgaggctgggggctgcgggggggggggggggcagcctcagaaacagaggagggcccccaactcagacagaaggcaggccttgatgccctagcccacctctgtcgtttattactgcaaggtttgttttggttttgattttggttggtttgtttgtttgtttgagacaaggtttgtctacgggcctggatatcctgaaacatactctgtagaccagggctgcctcaaactcacagcgatttacctgcctctgcctccccagtgctcagattaaaggggtatagcaccactcccggtttctgcaagattttttttatttttatttttatttattttttaaaagatttatttattattatacataagtacactgtagctgtcttcagacacaccagaagtgggtgtcagatctcattacagatggttgtgagccaccatgtggttctgggatttgaactcaggaccttcggaagagcagtcagtgctcttacccactgagccatctccacagccctttttttttttttaacaccaagaaaacactttaatcaaactgcagaaacaatggttatagtacagaatatccataagcaaaagatacaccatgttttaagtacttacaaagttacaaaccatttgcttccttaacattttgattttttttaaaagttcacaacacaaggatgatcagatttaccattttgcattttttgagggaaggggggtatatttatcatcagctagatgtgctcactgtatgctccattatttatatgcaagagttttttcacaacctatgtgcatgagcagtgtgaataagtggtcagagcacctgccccagaacgcactgctgggtcctgtcccagctgtgctgtgtgctgtctggggacctgcacagggaacgttgtgttttcttcctttcccctagatggaaaatgaagatcacctacttcacggggtgctgagagactttaatgaaatagtgaaatactgaggtgctgggggcaggagagtaacttttcttcagtgatgtagccacccataaattacccatactctagtgaataaccctgcccgatgctcatgcaaacagccctagttaaactcagtgggtcatttttctaaagccatggagctaggagcaaggttgggaacaaagggtccatgggagggagaggaggataacagaaggaaattgggcatgatcaaaatacattatatatgttaaatatatataatgtatatataaatacatgtacatatattatatatgtgtgtatatatgtgtgtgtatatatatatgtgtgtgtatacacatatatacatgtatattatatataatataaatacatatgtgacatatatgtgtatatatgcattatatttgtttatatatttatatgtatgtatacatacatttatatatttatatacatatatacatacacatatatatgtatgtatgagattatgagataataaataaaaaactatttttcaaaagagcaagcagggcccatgaagtgcactgagcaccacctggcagcctgcgctccccccagaccccacggaaaggtggagagaggaaactgactccattggagcccatggcagtgcccctccacactatgtaggcaaacacacacaataagattttttttttaaaaaattaatggcccaaagctgggcaatgttggtacatggtttttaaatccagcacttgggaggcagaggcaggcctgagtttgaggccagcctggtctacagaatgaggtctacagagatagccaaggctatacagagaaacccacagcacatggctgtaatcccagctctccagaggtagaaggaggatcaggtattcaaggccagagtcctctgaaagagctcaaagccagcctgggtctctagtgtgaggaggttcaccagtgtctgggcctgttccaagttcctcaccttgtggtggagaagagctagctagtactgtgactgaggtagacggggtgctggcctagtgacagttaagagcacagaccttagagccatcttgcctgggttccaagttttggcttagcatatatggtgtgatctttggtatgccctgggatttagcacctagaaccctctatttcttcttctggaaaatgggataatacgcatctccacctgggggactctgggaggatttaatggaaacaggggcttgtggggcacaatttaacatctccgttgtaggaaggagcttcctttgagccccagaggagggtgttcagatgcagctcagtaagggtatcacttcttgtgggaaaatagcttcccccgctctgggcctctttgttcacaggcactttgaactgaagaaccggaatgatcctgaagagacagccaagcttttctctgtgcctgactttgtgggcgacgcctgcaaggccattgcgtcccgagtccggggggctgtagcctcggtcacatttgatgacttccataagaactcagcacgtatcattcgcatggctgtttttggctttgagatgtccgaagatgccggtcctgatggcgcactcctgcccagggctcgagaccgggccgtctttccccaaaatgggctggttgtgagcagtgtggacgtgcagtcagtggagcctgtggaccagaggacccgggatgccctgcagcgcagtgtccagctagccatcgaaattacaaccaactcccaggaggcagcagccaagtgagtggtgcagggacccggggtggggggtggagcagctcagctggggccaagacctgaacacgtggcacccacaaacattctgcctgttgccatctgctccacaagggtctattctctacccagcatgactaataaagctgtgagcaaggagggcatcccggctcctatctcccatggcttcctaacctttttgggcgccttcctcgctctccaggagagtttggcttccctgtcctctaccttcagcttgttcccaccttgggcctttggaacttctttgcccagtgtactttcccagccccaaggtcacctccttggagagagcccttcctttattttcactagctactgttgcagtgccctctttccctgctcacccacttgctctcaggtgctcatcaatgccctaaagcaccccagcttgttttcttggcatccagcatgtctgtcttccgtgggccgtggctgctcacagcttgcacactgtgctgggtcccagtgtatgctgaaggctctgagagggggcggggtcagtctctactccaggtgctcctttcttagctctgggtcaccctctcatctgcccctgctcttacccaggcacgaggctcagagactggagcaggaagcccgtggtcggcttgagaggcagaagatcttggaccagtcagaagctgaaaaagcccgcaaggaacttttggagcttgaggcgatgaggtgggtcaagaaatggaggcagaaagactggctggtctgagggtcttggaaaagctgctggctcaggcaagtgggggttgagaggcaagcagagcatgctgtgaggcataaataaaaccccagaagggatagggatgccgcttagcagtagagaacgtgcccaccatgcacaaggcctgtggctccatccctgatattggaaaaaaattaaaaatgaagggccagcaagaagaaggtaggtgaaggagcttgccggccaagcccgatcccacatagcgaaaggagagaactgattgtcacacgttgtcctctgactgtcatggtgtccctgggtaggcaggcgtctcttctaggctgcccctgactctgtttcccccgcagcatggctgtggagagcactggtaatgccaaggcggaggctgagtcccgggcagaggcagcgaggattgagggagaaggctctgtgctgcaggccaagctaaaggcgcaggcgttagccattgagacggtaagtggaggggctgctgctggggcactggggcctgcttgtcaaagactctgagacgggcagtggtggcgcacgcctttaatctcagcacttgggaggcagaggcaggcggatttctgagttcgaggccagcctggtctacagagtgagtttcaggacagccagggctacacagagaagccctgtctcaaaaaaaaaaaaccaaaaacaaaaaacaaacaaaaaaaaaaaaacaaaaaaccaaaaaaaccaaaaaaccaaaacaccaaaatcaacaacaataaaaaaagactctgaaaccaagtggcctgacaaagccctgctcatgctccctgcggtttgcctcagtcctgtagcaatgcacttagaacaatccctgaagacagggcgtcttacagccattccccagatgagcttcactgcccactttgttgtgtgttttacatctgtgacctcccttcatacctgaagcatgtatcacctccaaggcttgaatcgcaggactccttcccaaggttcactagctaaatagtggcagagctaggatttgcacctgagattcccttctgcctcagttctcttctttcagagttgctggacggacagttcccgggccccgtgacctaaaaccagcctggtctcccttttccaggaggctgagctggagcgagtgaagaaagtgcgagagatggagctgatctactcccgggcccagctggagctggaggtgagcaaggcacagcagctcgccgacgtggaggcaaagaagttcaaggagatgacagaggcactgggccccggaaccatcagggacttggctgtggccgggccagagatgcaggtgagaacagaagacacgggaggagatgggtgtttgcctcggaaccaagaaggctgaaggcaacctcggctggggaaatgttggaggatgggaaggggtgtgacctgtcactgagcactgtgcgatgaggcactgtcctagaccctgcagaggcagcagcactgctagggggacagtagcagatgagacatcagtgcctcgaaggaagtcaaaaggaacaatacgatgaaaagtgacggtgaccacttggtttagggagagctgctctgaaggtcggctccctggggaggcagctgaggtaaatggccatttctgacggtgtcggtgtcttcttttgctgactttatcctccaaccctgcaggtgaaacttcttcagtccctgggcctgaaatccactctcatcacagatggctcgtcccccatcaacctcttcaacacagccttcggcttgctggggctggggtctgacggtcagccacctgtacaaaagtgacctggcggcccagccccaaggaaggcttgctttaccaggtcctctgaagcagccactctgtgccttaggtagacactgactacactgacaatggataaataaaatgacaactgtagacatttatgtttcttttcccctcttatctccagcctgggtgatcagggatcttcgtggtgacctagagaaggtgccccctcaaatcttggtaaaattatgagactactttggtctccaaggaaacagggagaaaagtatctcaaagccacagtgataagcatagaacccagagtctttcaagcccgcagcttagactgcacctccttagcccctgggtaggcagagcacctgagagcattcccgcccttgcattggctctgtggctcgcagctggtttttccatgaatcctggccacctagtcaaggagtcacctcaggctgcagagcctgctccgcctgccatgggagactctcctttggcaccacctgccggcctcaccagcagcctgcagtaccagcaggtgtgccaggcctgccctgggcacggctgtgcttgcctcctctagggaagaggaccctgccaggggcagcaggatttcgagcacactctgcagcttccggtctgggctcttaaggagcactggggtgcctctttcctatctgccccggaacttgtaaaaggtcttctttacttggtagccgacgtaagctcagtcagcttggaaacaccagtgggggatagggtactgggttctaggccaagtggagctttaggcctgccccatcaccactgtggaagtaaaatgatcctggggtggggagagaaaatggagaaagttccctgtgtgtctatgaaggcaactgactcagtccctcctatcacctcccctgaaatgggcccatgctaccccagataagcaaggtaggtgatgtttttgttccttttccttcctgagtgcttttgagctgtatttgtatggttggtgtctcttctaaagcctgaacataaggccaagggtctgcccatattaactcacaactcacattctggcttggtgtgagtccctacctagaccttcccaagtctttcctcaagagaaccaattaatttacagctcctcaacttgtccctgctgcctactaaatgctgtgtattaccaagggcctctgggaccaagtaagattgtacttggtggctgttcaggtctcagctactggctcctacggctgtccttggacaataaccacaccaccacggacaacttgttcactgcctaacttggatcctgggctttgtccctacaaatgactcaaaaccggtgattccccaccgctagatgtctcccccatgcccactccccactgccctgggttagggatggaacccaaggtcctcacagcaaggtgccccaccactgaattataccctggcatttggttttcttttcttgcctcttcttcctttctctcactcccttctctctctgccctccctaccccttcccccccgcccccacctcttttgagacaggatctgcccatgaactcagccctccagcctccccgtgcagcgttaggatcatggcatgtggcatttgtccatcagctcctccttccctctgtcacgccaaagtgcagctgctagttgttggaggagaccccagcatgtgaccagtctccttttagacttcagccacaatctccagggagccgtgctccccctgtcttctctgagatcctccctctccagaacaactgctcaagcctcctctttacaccctcctcctcccctgcccactttttctcacctctttgaaaaaaatagaagcagagcgggcaggaaggctctctccttcccagcagcagatcaacacactgagccgctgaactggctgtccccaccactgtgcccatcaaggatttctcaccttgggccccaatcccacccatcttgtcctgagagctgattgcgaagcccatctgcctctgtcttcctctctttgaggccccagtctataaattcctccaactctataaaaacaaacaggtaagactcattccctgttaaagagcatgcggatctgagtacccacataaaaaggcagctgtgggggctgaagagatggctcagtggttaagtgcaccggctgttcttccaaaggacccaggatcaattaccagcacccacacggcagctctctataactccagttccaggggatctgacaccctcacattgacatacatgtagtgaaaatgccaatgcacataaaaaattcatcttttaaaaatttcaacacttgggaggcagaggcaggtggatctctgagttcgaggccagcctggtctacagagtgagttccaggacagccaagactacacagagaaaccctgtctcgaaaaaacaacaacaaaacaacaaacaaacaaaatttcaaaaggcaacaactatggccaggttgtaaggatataagcacaacactggggagctagggacagatctcggggcttgctggccagctggcctagccaaaaactgtggctgtagactcaatgagaggccttgcctctagggaatagggtgggaagtactagggcaggacaccagagtcttcgtctgtcccaagagttccccgactcctataccattcctgactttacctttctcttgttcttcacagccagatctctccagagtcctctgcagtcttagctcccattgctcacacctcgttggcttttcagaccgtcatagtatgtctccctgcctattcagttgagcctgctcctgtctggccttgcctgtcatttgacaggtcacctctttccacactgggctcccatgaccacacactctagttttctttttgcctcaccattgaccagtgatgtctctcctacatagctctcagggcagcgtccccttaccccccacccacacccccttttctcctacctacattctcagccagtaccactggcttcagactccacctctctagccttactgcctcagcggatccctgggttctcttccagatttgttatagccaatgaaatgctggggacttaacgtaaccactaaactctcttctctctttccatataaaagtatgaccagtaatatcccacacacaagttactccaccagcctgcatcctagatggaaaatggcagaggtaaaccaggataaaccacaggtaaaccatgacagacagacagtagcggagaggaatgtgtgccatgcaagacgggtgctgggtgttctgacagcttcacgagcctgacccgagtactgtgtgtactccatagggtttacagtcccaggcggtagggaaatcactctaaactgtatgcagcaaagactggtccagcctcatctatagtttgttgcaggacaggacagccacagccacacaggaaagttctattttggctttttgagacagggtctctttatgtagttctggatgtcctgaagttcactatgtagagaacgttggccttaaactcagagatctgctggcctctacctcccaatctctaggactaaagacatgcaccaccacgccaggttgaaatccttttatttatgtacatccctgtgcaggcgccgaggaacaacctggattccttccagttggagttactggtggttgtgagctgccaggactgaaactctgatcctctgtaagaacagcaagggcttctagcagctgagctagccctcccacacccagggtcacttttaactgcagcatgaaacagaggagattagagagcgcccaaagggacagtcagctggggatgtccatctcccgcccttcccaagacatggatgaactgctgccgtgtcttgcattttaccagaatgaacatagctgatttctaggaaattattacaaccatccttctgtacctgtgggggatgggtttgagggcacacccccaaaatggaacccaagatctgtccaggaccaaattccagacttcctcctgcctccaggtcaaaggcccgtgggtgctaggctgtaaaggcatgtcttgcaccctgcaggctcttccaggagtggagtccaaccaccaaatggtggaccaaaggtcccacgctgacttgaaactcaacctcaagggacacagaggcccttctgtgcacatgcctctcatgcagggttaccctttcaggcttcaggccctccctcaggtgcaacattctccaaagcatccactctctccttccccatcccccctgtgaagatcatacatagctagctgcactcctttatagggatgctgctggtatcaccataaatgatcacagccagggccctagagtcggtcaggactgtgagagcaaggacagcagaggacaccttggcttgaacgctcagaagatccatttggtgggagtgatggctacttccagaaaagcccttagggcctcctcacccaccctcccacctccacagggacagaccaggcagggggtcgccatcagaaatgagatcagttttgtgtgggtcacatacaaatacctcaggcctcctacatgtattctgcacatgcctccccaaacaggaggaagaagagttgccagcagtatctttaggtcatggcaggacctagttacattaggaatagagggcacttcatgttctagaaatttactgacatgaaacagcaaagaggatggactttggagccaaactggcttcctctaattatttgcctccagacaagcacagcaatagacagtcatctgacagaggaacatgcccaggagataagataatgttctttgataagaagcacttttagccgggcgtggtagcacacgcctttaatcccagcactcgggaggcagaagcaggcagatttctaaattagaggccagcctggtctacaaagtgagttccaggatagccagggctacacagagaaaccctatcttgaaacccacccccaccccccaaaaaaagaagcacttttaagcgatagccataaggaaatagaggtctaaagccctactgagctccttaggctgcccagctggctgctggtacctcagctttcaccagctcctacaccccagcacttagtgttccagacacatggatcaagatctatttcaatctctcgtaattgcctgggtgctctctggacccctgcctctgtgggctgtttgttctgccaagagcagtaacttccctccctgtcctcaccagctatcttcttaaaatatcagcacctcatcctactgggtgcagtggcacacacccagcattcaaagatctgaggcaggaaggtcttgagtttgaggccagcctgggctatatagtaagatcctatctccccaaagcccaacattgcacctgaatgccagctttcccaaacacaagttgtgtgaaacagccaagtcattatgaggatggaacaaatcctgtctgccaacaacgccaacaatgggggtctagcgctgcagcccaatgcacttcaaaatgaaggagcgctgagtttgctggcacctactgtagtcttagcacaagggagccggaagcaggaagatcagttcatggtcatcctctgctccctagagcggttgagacagcccgggtctcaaaagccagaataaagaaagcttgtgcaagctggtgctgacgcacacctttaatcccagaaaaagaaagctggtgcaaggtagtgacctgtccccatggtcccatggtcggctcatttgagcctagaaagagtaatataggaatgctgtctcaaaaccaaaccaaaccaaaccaaaccaaaaccaaaaccaaaaccaaaattcatatggtggcatatcccagcactcaggaggcagaagcacaccactttgggactcaaggccagtgtgggtggtgataccatctcaaaaataaataaaaataaaaagccttggggctagagttggctaagtagttaaaagcacttggttctttcacaggacgcggtatagttcccagcacccacatggcgggtctcaactgtctataactctagttccaggggatccaatacttttacagggacatgcaagcaaaacaccaatgtactaaaataataaatcattttttaaaaagcaatgaaaagtccaaaaaaaaaaaaaaaactttcagttggtatacagtgtacactaacccttaagtcagtacacagtgtacactaacccttaagttggtatgggtggtagactgnnnnnnnnnnnnnnnnnnnnnnnnnnnnnnnnnnnnnnnnnnnnnnnnnnnnnnnnnnnnnnnnnnnnnnnnnnnnnnnnnnnnnnnnnnnnnnnnnnnnnnnnnnnnnnnnnnnnnnnnnnnnnnnnnnnnnnnnnnnnnnnnnnnnnnnnnnncacacacacacactacacactctcagcctaaggaccatgctctgagaaaaccatccatcttcccatgaatatttattaagcagctaccacatgccaggctagttttcactctaggcagagacaagaaagacataagtctgctctcatgaagctcacattctcatgagggtagaaaatatcaaggttacaatcaaaagtggccagctagggacataaagcaggtgggcagagacaatgcctgtgaacctgaggagccacaaagcctctcgagatcactggaacgacagggaggagccagccacctttgggaaagcatccaggtggattctaatccagctcccatggaccctgggccatcatctaagagtgtctcaaagtaaacacatccaaaaagactgaaggggcccccctttattgtggaggtttccagagcaggacaggagagaggagctggcctcagggaaggatctagctggccccttccctccccagcctggtaccccaggtccaatgacatcagtctgactcctttgccctcacatgtccccaaagtctcactccagaccccaggactgaggcagcaggatgtgtggcaacacccagtcttcagtcaggcctcccggagcaccagctggatgggcagggcctcctgagcacccttcctgcttggcagtgccaggtccttggggtcacaggttgggtctaatcatcaggattaaagagatagtgacaacaccaaacagaaggtgacccctaatcccagcaggttagagaacacatgagaaagacatgacactgggacctcttaggaggagaggagtcacgtggtacagtagatacccagggcaggtggacagctggggatgggagaggatcatttcttcttggcgcggtctgctgcatccagggcagccatgtttcttgcagccgtgatgaggtggatgacactaatgacggacttgagcagcgcgatgggagctgtgacccagaggcccatccggaaaaggcccacagcagccgactacagggaggcaggaagaaagatggaaagcaggggatggaggggtgtgagagggaggcctctctctcccccagggcagggcagggcagggcagggcagggcggaaccccacccccacccccacttcttacctagtggtccctcggagaaattgaagagatacaggaggcagtagaagagttcatttccagcacacagggtgaacagagcaggctgcacacaatataaggctgcctaagacgtagggccatgtccctactgtaacccacagggacttctgccagacaggagagcgcctcacagccagctgcacactgcactatactgcatatttctttggtctctctctgactccacccacccccttcgccctctctctcttggggcttcactgtcactgctgccatgatgatgtcccaccaattatcctccatggaccactcctgctcagatggctgtatagcatctctcctggccagggttcagcctcagacttcctgttttcagatcaagttgaggaggggcaggaagtgcttaccctagaggtatagtagatccgaagcacagggttcccagacaggtcgatcatcttgtgactctcactgcctcgcaccacagaacttggggagaaaagcatgggacttcatgagcgttcactgagcggaggaactggtgtgaagctgaaaattatatcttgtgcaaaatcatacagttccctaggtgaggcagagccaggactgaatgccctatacaaagcacccatacgtcttcccccatttggaaccctaaattattcagccaggcccatgctagaaattgctcacaccacctataaaaatgacaagcccactcagagacacagggattacccaggggcttaaggacagcggcatgcagggatatgcctataacttcaggagtcaggaggctgacgtaggaagactgtcatgaatttgaggcctacatgagcacatactaaattctaagcaagccttggtctactgtctcaaggagagaggaaaaagaaaccacccacaagcctgaagccatcccagtccccgccccactgtaatgccttccactcaccagcaccccaagcatcaatcaaagcaaacaaacctgtgcagatgcagccagtgactggccacgtccaagctcatgctgagctggaagagaagggtggctcgtgggtagagcagggccaggttgaccaagagacacatggtggcgcaacggtccgtcagcatgtcgagcatggccccaaaccgggttcctgaaaaatgatgactactaagtggaaagggactgtttggcatagtggacctgtgacaggtacccgctctggcctatcactccaggctgacaataaaaggagtttgaaagtgcctaccatctactgccagagaaggaaagatggtgaggccagaagggcatgggttatgaggacaagaaatgagaaggcatggggctatggcaagaaagaggtattggaatggggaaactctatcttcaactcctctaacccaaaaccaggccccaaagaaaggcaagcagacccaaagtctcagaggcaattttagaagtgggtctggggaactcgattacaaaattaagtcagagctccaaacatcatctgctttcctcccaccgggcaccaacctctcttccagaatcccgaatgtttgtgcctagcaactacctagtaaacacctgttgaatggaactttgttatttacttacatttttaaaagtttatttatcttctatggtctcagtgtctatcagcgtatatatatatatatacacacacacacacacacacatatatatatatagcctgaagaggacattgattccttggaactggtggttgtaagccatcatgttggttctgggaatcaaatctaggtcctctagaagaacagtaagcattctttcggttttgttgttgttgtttgttttgtttgctttgtttgtttgtttttgagacagggtttctctgtatagccctggctgtcctggaactcactttgtagaccaggctggcctcaaactcagaaatctgcctgcctctgcctcccaagtgctgggattaaaggcgtgcgccaccaccgccaggcagcagtaagcagtcttaacctctgagaacaaacttagccttcagccccaatcacttatttttgcaggattttactgtgtagtcctggctcacgtggtactcaatatgacttctgacttggagcaatctacctaccttatcagtgctggcattacaagcatgagccattatgccacacccgaatggaattccatgctcacagctatgcagggtctaggtcttccacacccatcccaaacagagatcaatcatcaagagcaagcttatatcctaggcagctctcaacgaggttctgagaaagcagggaaaggacagaggatgttgggaccccagttagtgctggtggtggtaaagttctgtcaccttgattaagggctcgagctgcgtgtccatcgaaagcgtctaggagtccgctgagtagatagaaggaggaggccgtgaaggggcagcagggcataaagtagaaggaaatgatggcgaagacaatccgggcataaccttgggatgggatgggagaggtacagggtgtgattggggagccagcttagggtttctcgcgcccctccccacccccaccccgctggttttggggccgcaggca

SEQ ID NO: 637 - DNA, 1369 bp, Mus musculus
agcttaggggaggggaccagagaagaagggccgagcaaacccggaggagagaggaggggagacccgccacctcccttcattgctcacagacttgttccctccccggtctgcggctgctgcagcagcagcggcggtggcggcgggacgcaggagcagtcccgaggctggcagcggatgagactgggaccaactgagactgctgtactctatgtcccttgccctgggccatggaaccattgcaggcagcacagcagcgcctctgtctgaagaaggggaagtgacttccggcctccaagctctggcggtggaggacactggaggtccctctgtctcggctagtaaggccgaggaagaggggaaaggcagtcaggaggaggccgggcgtgagggatccaggcctgaggaggcactagaagctcccagcgctgcgagcgacgagcgtgcggagggagaagccgaagactggtgcgtgccctgcagcgatgaggaggtggagctgccggccaatgggcagtcctggatgcccccaccctccgagatccagcggctctatgaactgctggctacccaaggtactctggagcttcaagcagagatcctaccccgccggccgcctaccccagaggcccagagtgaagaggagagatcagacgaggagccagaggccaaagaagaggaggaggaaaagccgcacatgcctacagaatttgactttgatgatgagccaatgacaccaaaggactcactgattgacaggagacggacaccaggtacggatgagagggaagaactgaggggaggaagctcagcccggagccagaaacgggaggcgcgtctggataaggtcctctcagacatgaagcgccataagaaactagaggagcaaatcctccggaccgggagagacctcttcagcttagactcagagggccccagccccaccagccctccactccgatcctcaggaaacagtctctttcccagacagcggaagtactgactggtgctgctcctgcctacaggttaggccggggcttgggattcaccatggcaactgaagaggccatcatccgcatccccccataccactacatccatgtgctggaccagaacagtaatgtgtcccgtgtagaggttggaccaaagacctacatccggcaggacaatgagagggtactgtttgccccagttcgcatggtgacggtcccaccacgccactactgcatagtggccaaccctgtgtcccgggacgcccagagttctgtgttgtttgacgtcacaggacaagtccggctccggcacgctgaccaggagatccgactagcccaggaccccttccctctgtacccaggggagctgctggaaaagg

SEQ ID NO: 638 - protein, 269 aa, Mus musculus
DWDQLRLKMSLALGHGTIAGSTAAPLSEEGEVTSGLQAVEDTGGPSVSASKAEEEGKGSQEEAGREGSRPEEALEAPSAASDERAEGEAEDWCVPCSDEEVELPANGQSWMPPPSEIQRLYELLATQGTLELQAEILPRRPPTPEAQSEEERSDEEPEAKEEEEEKPHMPTEFDFDDEPMTPKDSLIDRRRTPGTDEREELRGGSSARSQKREARLDKVLSDMKRHKKLEEQILRTGRDLFSLDSEGPSPTSPPLRSSGNSLFPRQRKY

SEQ ID NO: 639 - DNA, 2808 bp, Mus musculus
attagggaagtcatcccaagtgttggtgagggaaattcctgacctgtggcctgcagcagccagctaccctgctaaatgttaggccggggcttgggattcaccatggcaactgaagaggccatcatccgcatccccccataccactacatccatgtgctggaccagaacagtaatgtgtcccgtgtagaggttggaccaaagacctacatccggcaggacaatgagagggtactgtttgccccagttcgcatggtgacggtcccaccacgccactactgcatagtggccaaccctgtgtcccgggacgcccagagttctgtgttgtttgacgtcacaggacaagtccggctccggcacgctgaccaggagatccgactagcccaggaccccttccctctgtacccaggggagctgctggaaaaggacatcaccccgctgcaggtggttctgcccaacactgccctgcatctgaaggcattgctggactttgaagataagaatggagacaaggtcatggcaggagacgagtggctgtttgagggacctggcacctacatcccacagaaggaggtggaagtcgtggagatcattcaggccacagtcatcaaacagaaccaagctctgcggctcagggcccgcaaggaatgctttgaccgggatggcaaggaacgggtgacaggtgaggagtggctggtccgatccgtcggtgcttatctccccgctgtctttgaagaggtgctggatctggtggacgctgtgatccttacagaaaagacggccctgcacctccgggctcggcaaaacttcaaggaccttcggggagtggcccaccgcactggggaggaatggctagtgacggtgcaggacacggaagcccatgtcccggatgtctatgaggaggtgctgggggtggtgcccatcaccaccctgggacctcgacactactgtgttatccttgacccaatgggaccagatggcaagaaccagctgggacaaaagcgtgttgtcaagggagagaagtcctttttcctccagccaggagaaaggctggaacgaggcatccaggatgtgtacgtgctgtcagagcagcaggggctcctgctgaaggcgctgcagcccctggaggagggggagggggaggagaaggtcgcccaccaggctggagaccgctggctcatccgagggcccctggagtatgtgccatctgccaaagtggaggtggtggaagagcgtcaggctatccctctggaccaaaatgagggcatctatgttcaggatgtcaagacgggaaaggtgcgggctgtgattggaagcacctacatgctgactcaggatgaagtcctgtgggaaaaggagctgccttctggagtggaggagctgctgaacttggggcatgaccctctggctgacaggggtcagaagggcacagccaaggtccttcagccctcagctgcaaggaacaagacccgagtggtcagctaccgtgtcccccacaacgcagcggtgcaggtgtacgactacagagccaagagagcccgtgtggtctttgggcctgagctagtgtcactggatcccgaggagcagttcacagtgttgtccctttctgctgggcgacccaagcgtcctcatgcccgtcgtgcactctgcctgctgctgggacctgatttcttcactgacgtcatcaccatcgaaactgcagatcatgccaggctgcagctgcagctggcttacaactggcactttgaactgaagaaccggaatgatcctgaagagacagccaagcttttctctgtgcctgactttgtgggcgacgcctgcaaggccattgcgtcccgagtccggggggctgtagcctcggtcacatttgatgacttccataagaactcagcacgtatcattcgcatggctgtttttggctttgagatgtccgaagatgccggtcctgatggcgcactcctgcccagggctcgagaccgggccgtctttccccaaaatgggctggttgtgagcagtgtggacgtgcagtcagtggagcctgtggaccagaggacccgggatgccctgcagcgcagtgtccagctagccatcgaaattacaaccaactcccaggaggcagcagccaagcacgaggctcagagactggagcaggaagcccgtggtcggcttgagaggcagaagatcttggaccagtcagaagctgaaaaagcccgcaaggaacttttggagcttgaggcgatgagcatggctgtggagagcactggtaatgccaaggcggaggctgagtcccgggcagaggcagcgaggattgagggagaaggctctgtgctgcaggccaagctaaaggcgcaggcgttagccattgagacggaggctgagctggagcgagtgaagaaagtgcgagagatggagctgatctactcccgggcccagctggagctggaggtgagcaaggcacagcagctcgccgacgtggaggcaaagaagttcaaggagatgacagaggcactgggccccggaaccatcagggacttggctgtggccgggccagagatgcaggtgaaacttcttcagtccctgggcctgaaatccactctcatcacagatggctcgtcccccatcaacctcttcaacacagccttcggcttgctggggctggggtctgacggtcagccacctgtacaaaagtgacctggcggcccagccccaaggaaggcttgctttaccaggtcctctgaagcagccactctgtgccttaggtagacactgactacactgacaatggataaataaaatgacaactgtagacat

SEQ ID NO: 640 - protein, 866 aa, Mus musculus
MLGRGLGFTMATEEAIIRIPPYHYIHVLDQNSNVSRVEVGPKTYIRQDNERVLFAPVRMVTVPPRHYCIVANPVSRDAQSSVLFDVTGQVRLRHADQEIRLAQDPFPLYPGELLEKDITPLQVVLPNTALHLKALLDFEDKNGDKVMAGDEWLFEGPGTYIPQKEVEVVEIIQATVIKQNQALRLRARKECFDRDGKERVTGEEWLVRSVGAYLPAVFEEVLDLVDAVILTEKTALHLRARQNFKDLRGVAHRTGEEWLVTVQDTEAHVPDVYEEVLGVVPITTLGPRHYCVILDPMGPDGKNQLGQKRVVKGEKSFFLQPGERLERGIQDVYVLSEQQGLLLKALQPLEEGEGEEKVAHQAGDRWLIRGPLEYVPSAKVEVVEERQAIPLDQNEGIYVQDVKTGKVRAVIGSTYMLTQDEVLWEKELPSGVEELLNLGHDPLADRGQKGTAKVLQPSAARNKTRVVSYRVPHNAAVQVYDYRAKRARVVFGPELVSLDPEEQFTVLSLSAGRPKRPHARRALCLLLGPDFFTDVITIETADHARLQLQLAYNWHFELKNRNDPEETAKLFSVPDFVGDACKAIASRVRGAVASVTFDDFHKNSARIIRMAVFGFEMSEDAGPDGALLPRARDRAVFPQNGLVVSSVDVQSVEPVDQRTRDALQRSVQLAIEITTNSQEAAAKHEAQRLEQERRLERQKILDQSEAEKARKELLELEAMSMAVESTGNAKAEAESRAEAARIEGEGSVLQAKLKAQAIETEAELERVKKVREMELIYSRAQLELEVSKAQQLADVEAKKFKEMTEALGPGTIRDLAVAGPEMQVKLLQSLGLKSTLITDGSSPINLFNTAFGLLGLGSDGQPPVQK

SEQ ID NO: 641 - DNA, 8382 bp, Mus musculus
gatcatcacagacctcggcctctacacccacgacagctacgagcagcacggtagtgatgctgaccctggaggcctcacccgaagccgcgaagacgcaagagttccccgcaccagcggcagaaacaggagccgagacgtcggtggctttggctttggggacagacactcaaaagacggaagaggttcgagcctctcctgtcccaggaccagggacccccactcggacaccttccagaatggcgcctggagccctgactgccaaacccccgcttgcccccaagccggggaccacagtggcttcaggagtgactgcacggggtggagtaggacaggtggcaggtgggcatgaagctgcgacctcagcatcagcagggtcggtgcctgaggacccctcagggcctgtcacaggccctcccgggacatgcgaggctccggctccgactccggtggctgtggtgacagtgaccccagctccggagcctgttgaaaactttcaagacctgggctccacgtccagtctaggacctggcatctcggggcctcggggtcaggccccagacaccctgagctacttggactccgtgagcctcatgtcagggaccttggagtccttgccggatgatgtgagctccatgggttcagactcggagataaatgggatggccctgcgcaagacggacaagtatggtttccttgggggcagccagtactcaggcagcctagagagctctattccggtggatgtggctcgccagcgggagctcaagtggctggagatgttcagtaactgggataagtggctgtcacggcgtttccagaaggtaaagctgcgctgccggaaaggaatcccctcctctctgagagccaaggcctggcagtacctgtctaatagcaaggaactcctggagcagaaccctggcaagtttgaggagctggagcgggctgctggggaccccaagtggctcgatgtgattgagaaggacctgcatcgccagttccctttccatgagatgtttgctgctcgaggagggcatgggcaacaggacctgtaccgaatcctgaaggcctataccatctacaggcctgacgagggctactgtcaggcccaggccccagtggctgcggtgttgctaatgcacatgcctgctgagcaagcgttttggtgcctggtacagatctgcgacaagtacctcccaggttactacagtgcagggctggaagccattcagttggatggagaaatcttttttgcactcctgcgccgggtctctccgctggcacatcgtcaccttcggcggcagcgcattgaccctgtgctctacatgacagagtggttcatgtgcatctttgcccgcaccctcccctgggcttcagtgctgcgtgtctgggacatgtttttctgtgaaggcgttaagatcatcttccgagtggctctggttttactgcggcacacactgggttctgtggaaaagctgcgctcatgtcaaggcatgtatgaaaccatggagcagcttcgaaacctaccacaacagtgtatgcaggaggacttcctggtgcatgaggtaaccaacctcccagtgacagaagcatggattgagcgggagaatgcagcccaactgaagaagtggcgagaaactagaggagagctgcagtatcggccctcacggcgactacacggctcccgagccatccatgaggaacgcaggcggcagcagccacccctgggcccttcctctagcctcctcagcctccctagtctcaagagcagaggctcccgggcagttggaggggctccttccccaccacctcctgtccgcagggctagtgctgggcccgtccctggggctgtcgtcattgctgagggactgcatccatcccttccttcacctactgctccaagtacctctgaagcccagaatgccagcccatcagtttctgtggggtcagggacagtggactcgaaggagaccatcagcccctgggggcagaccacaatcccagtttctttgacccccttggaaactactgaattgtcttctttggagacttctgctggtgccagcatgagcacccctgtacctgagcctactgcctctcaggaagtttccagcaagacatcagcactgcttccagaaccatcaaatgtagccagtgaccctcctgtcactgcagccaatcctgtgacagacggacctgcagccaatcctgtgacagacggaactgcagcatctacatctatctctaaaggaaccagtgcaccccccaccactgtgacaacaagctctaacgagaccagtggaccctctgtggctacaacagtaagctccaagaccagtggtccccctgtcaccacagctactgggtctctggggccctcgagtgagatgcatggactccctgctaccacagcaaccagttctgtggagagttccagtgtggcccgtggcacctcagtttccagcagaaaaacatccacgacgtctacccaagatcccataaccaccaggtcaccaagccaagaatcaagtggcatgttactggtgcccatgcttattgccttggtggtggttttggccctcgtggcgctactgctgttgtggcgccagaggcaaaagcggaggactggggccctgaccctgagcggaggaggaaaacgaaatggggtggtggatgcctgggctgggccagcccgggttcctgatgaagaggccacaaccacatcaggggcagggggcaacaagggctctgaggtactggagacagaaggctccgggcagagacccacgctcactacgttcttcagcagacggaagtctcgccagggctctttagtactagaagagctgaagcctgggtcgggtcccaacctgaagggggaggaagagccgcttgtgggcacccaggcacgtggtccaaaggtggttgctggaggagatgtgcaagaggaagctgttgagtcagagggcgctgcccttgagaacagactgacctacagaaagagatgtgtgcgtgcgattgtgtgtgacctggatgggaaaggggaaggacctggccgctgtgtaagcaaaggagggcttggccggcgtccgcctctagctcgagtaagggtggctgtgcggctgcgcccgtttatggatggagagacagaagcgaaggagctcccctgtgtccgagccatagacagctgctctcttgaagtggctaactggaagaaataccaggagacgctcaaatatcagtttgatgccttctatggcgagaagagcactcagcaggaagtctatgtaggttcagtacagcccatcctaaggcacttgctggaagggcagaatgccagtgtacttgcctatgggcctactggggcagggaagacacacacaatgctgggcagcccagagcaacctggagtgattcctcgggctctcatggacctcctgcaactagcaagggaagagagtgctgagggacggccatgggacgtttctgttgctatgtcctatttagagatctaccaggaaaaggtattagacctcttggatcctgcatcaggagacctcgtgatccgcgaagactgccgagggaacatcctgatcccaggcctcacacagaagcccatcaccagcttctctgacttcgagcagcacttccttccagccagtagaaatcgagctgtaggagccacccggcttaaccagcgctcttcccgtagtcacgcagtgctcttggtcaaggtagatcagcgtgaacgtttgactccatttcgccagcgggaaggaaaactctaccttattgatttggctggttcagaggacaaccgtcgcacaggcaaccagggcattcggctcaaagagagcggagccatcaacacctccctctttgtactgggcaaagtggtggatgcattaaaccagggcctccctcgcataccataccgggacagcaagctcactcgtctgctgcaggactctctgggaggctcagctcatagcatcctcattgccaacattgctcctgaaagacgtttttaccaggatacaatttcagcattgaacttcactgctaggtccaaggaggtgattaaccggcctttcaccaatgagagtctacagcctcatgccttggcacctgttaagctgtctcagaaagaactgctaggcccgtcagaggcaaagaaggccaaaggccctgaagaagaatcaactgggagccctgagtctacagcagctccagcgtctgcctcccagaaactaagcctcttacagaagctaagcaatatggatccagccatgttggagaacctcctgagtatggaacgtttgctgggttcccagggaagccaagggacccccctactgaataccccaaagcgagaacgaatggtgctcatgaagacagtggaggaaaagaacttagagattgagaggcttaagatgaagcaaaaagaactggaagccaaggtgttggcccaggaggcaccggatccaagggaaaaagagaacactcccacaattctccagccgcctgcctcttatagtggcacagtggcaaagcccctgaaaaaggctgtagtgatgcccctgcaacggattcagaagcagcgagagtcctcaaaccaaatccagctcctgaagaaaggccccaaaaggaagctggagccatcccctgagtcagaagctgtggaaaaggatgaggactactgggaggtacagattagcccagagttactggcacatgggcgcaaaaaattattggatctgctgaatgaaggctcagctcgggaactgcgcagcctgcagcgcattggccagaagaaagcccagctcatcgtgggctggagggagctccacggccccttcagtgaggtggaggacttggaacaggtggaaggcatctctgggaagcaggtggagtctttcctgaagggtcacgcccagaaccccctgcaggtcggggctgagctccagtcccgcttctttgcctcccagggctgcgcccagagtccattccagaagaagacaaagagcaaggggccctacatttgcgccctgtgcgccaaggagttcaagaacggctacaacctccgaaggcacgaagccatccacacgggagccaaggctggccgggtcccttcgggtgctatgaagatgcccaccatggtgcccctgagcctcttgagtgtcccccagctgagcggggccagcgggggtgggggagaagccggggctggcggcggcacagccgcggtggcggccggtggcgttgtgaccacgactgcctctgggaagcgcatccggaagaatcacgcctgcgagatgtgcggcaaggccttccgcgacgtctaccacctgaaccgacataagctgtcgcattcggacgagaagccctaccagtgccctgtgtgccagcagcgcttcaagcgcaaggaccgcatgagttaccacgtgcgctcacatgacggcgctgtgcacaagccctacaactgctcccactgtggcaagagcttctcccggtgtgcaggggcctcgctgcccactaggccgaaatgtgaggcagcttttgctacgaaggatcgcctccgagcgcacacagtccgacacgaggagaaggtgccatgtcatgtctgtggcaagatgctgagctcggcttatatttccgaccacatgaaggtgcacagccagggccctcaccatgtctgtgagctctgcaacaaagccaatggggctcccccccgtgtgctgcagaaactcgttgaggaagacagaataggaagggcacacggtgggcatccaggatctcctcgaggtagcctaagccgtcatcccagctcccagctggcagggcctggggtggaagggggcgaaggcacccagaaacctcgggactatatcatccttgccatcctgtcctgcttctgccccatgtggcctgtcaacattgtggccttcgcttatgccgtcatgtcccggaacagcctgcaacagggggacgtggatggggctcaacgtctgggccgagtagccaagctcttaagcatcgtggcgctggttgggggggtcctcatcatcatcgcctcctgcgtcatcaacttaggcgtgtataagtgaggggctctgccctgcattccaagacttttcttcctgttgggagctgtcttgggtccatccctgtcctgggagaatcccagtccatggccctggcccccatctctagggaccaagggagcctgagcggccttgtttacagcttctttccccctgcatcctgccaggctcctctgccagccataggcttcctttctccctgcacttttgcctgcagacccccaccccactcctgcctcttgacctccctaaccctgcactctgaaaacctctctgcacttctggaagccttcctgaacatctaaattgtactctgcacctctgcatctctcccagcctccctgcacttcttcctgcctctggaatcctctgaaccttatccctggcctcccaacgttcattgtcttggtatctaacccatcccgttctccccttccttaacaccgtttttccccttgccacgtcccctgaccctttctcccttttcatctcccccttagcgtcttcaccctcctgccaacacttagtctgcaaaaactgcagtacttaggtcaggctgagggaagaaggatggtgtggggagaggagcctagctgggggctctgactgttctctactggggaccacccaggcccagaccataccctacccctacccctaaggtgcctattgggtcccaaagctggcaagtgagtcctcacctgggggaccttctgagagtccttattctgaacatccaggggaggaaggggcatagctgcgcctgaagagtcagcctgaattgatctgcccgtttgggctttttaacctcagagtttcttgtttgaaggtctatttatgtgctttgtaaacagtagaattcaaaacaaaacaaacaaacaaaaacaggaccaaagttcccagctgcagggagcaagggaagggtgggggagctctgtaattattctctaagaggatgagggaggtttgttgcacgcgacagccctctgaggaggcagagagccagctgcgatgcatttcagagttggcggggttttttgtttgtttcctttcttttttaaaaaaaaaaaaaaaagttgggggaaaactaaaattccttttcaaaaaataaaactgagtctccctttttgtatgctgaatgctgcatgagtcttaaacactaataaacagagaatgcatgagactggcctcagttggtccctgtgtttgcagagtcaaggtactgctttctggcaggccctactgaacggaatacgcatgcgctgccgcagtggccatctttagtatgggccgaggttaatgagtcctaagggccaaattgcgcatgcgcaagtcttctctttcctcttccaagtagctttgactaccgcggagcctccgcgcgccatttctctgcgcctgcgtactgagatgctgcgcagcctgggaggcgggttttagctccaggtttgtaccgctgctgagtagacgcgaactaggtttgcccggtctaaaaagatgacttccatcccggtgatggagaaggcgatgtgaaagcgagaaaacaggcccttccctttccagctccgagcgtgtttcctgcgggtccctgggaacggcagaattctgggtccgtggggtggggtctgtccttgcaggggtttgagcgccccctcctggggacggtgctctggccgcagtcagctgttggactgactggcgatttcctagacctagaaaggctctccagcctttcgggtgaggcgcactggtttggtactctagaatctcctctattgctgggcttcttctctagtactctatgtcccttgccctgggccatggaaccattgcaggcagcacagcagcgcctctgtctgaagaaggggaagtgacttccggcctccaagctctggcggtggaggacactggaggtccctctgtctcggctagtaaggccgaggaagaggggaaaggcagtcaggaggaggccgggcgtgagggatccaggcctgaggaggcactagaagctcccagcgctgcgagcgacgagcgtgcggagggagaagccgaagactggtgcgtgccctgcagcgatgaggaggtggagctgccggccaatgggcagtcctggatgcccccaccctccgagatccagcggctctatgaactgctggctacccaaggtactctggagcttcaagcagagatcctaccccgccggccgcctaccccagaggcccagagtgaagaggagagatcagacgaggagccagaggccaaagaagaggaggaggaaaag

SEQ ID NO: 642 - protein, 2005 aa, Mus musculus
SSQTSASTPTTATSSTVVMLTLEDEAAKTQEFPAPAAETGAETSVALGTDTQKTEEVRDVPGPGTPTRTPSRMAPGALTAKPPLAPKPGTTVASGVTRGVGQVAGGHEAATSASAGSVPEDPSGPVTGPPGTCEAPAPTPVAVVTVTPAPEPVENFQDLGSTSSLGPGISGPRGQAPDTLSYLDSVSLMSGTLESLPDDVSSMGSDSEINGMALRKTDKYGFLGGSQYSGSLESSIPVDVARQRELKWLEMFSNWDKWLSRRFQKVKLRCRKGIPSSLRAKAWQYLSNSKELLEQNPGKFEELERAAGDPKWLDVIEKDLHRQFPFHEMFARGHGQQDLYRILKAYTIYRPDEGYCQAQAPVAAVLLMHMPAEQAFWCLVQICDKYLPGYYSAGLEAIQLDGEIFFALLRRVSPLAHRHLRRQRIDPVLYMTEWFMCIFARTLPWASVLRVWDMFFCEGVKIIFRVVLLRHTLGSVEKLRSCQGMYETMEQLRNLPQQCMQEDFLVHEVTNLPVTEAWIERENAAQLKKWRETRGELQYRPSRRLHGSRAIHEERRRQQPPLGPSSSLLSLPSLKSRGSRAVGGAPSPPPPVRRASAGPVPGAVVIAEGLHPSLPSPTAPSTSEAQNDSVSVGSGTVDSKETISPWGQTTIPVSLTPLETTELSSLETSAGASMSTPVPEPTASQEVSSKTSALLPEPSNVASDPPVTAANPVTDGPAANPVTDGTAASTSISKGTSAPPTTVTTSSNETSGPSVATTVSSKTSGPPVTTATGSLGPSSEMHGLPATTATSSVESSSVRTSVSSRKTSTTSTQDPITTRSPSQESSGMLLVPMLIALVVVLALVLLLWRQRQKRRTGALTLSGGGKRNGVVDAWAGPARVPDEEATTTSGAGGNKGSEVLETEGSGQRPTLTTFFSRRKSRQGSLVLEELKPGSGPNLKGEEEPLVGTQRPKVVAGGDVQEEAVESEGAALENRLYKRCVRAIVCDLDGKGEGPGRCVSKGGLGRRPPLARVRVAVRLRPFMDGETEAKELPCVRAIDSCSLEVANWKKYQETLKYQFDAFYGEKSTQQEVYVGSVQPILRHLLEGQNASVLAYGPTGAGKTHTMLGSPEQPGVIPRALMDLLQLAREESAEGRPWDVSVAMSYLEIYQEKVLDLLDPASGDLVIREDCRGNILIPGLTQKPITSFSDFEQHFLPASRNRAVGATRLNQRSSRSHAVLLVKVDQRERLTPFRQREGKLYLIDLAGSEDNRRTGNQGIRLKESGAINTSLFVLGKVVDALNQGLPRIPYRDSKLTRLLQDSLGGSAHSILIANIAPERRFYQDTISALNFTARSKEVINRPFTNESLQPHAPVKLSQKELLGPSEAKKAKGPEEESTGSPESTAAPASASQKLSLLQKLSNMDPAMLENLLSMERLLGSQGSQGTPLLNTPKRERMVLMKTVEEKNLEIERLKMKQKELEAKVLAQEAPDPREKENTPTILQPPASYSGTVAKPLKKAVVMPLQRIQKQRESSNQIQLLKKGPKRKLEPSPESEAVEKDEDYWEVQISPELLAHGRKKLLDLLNEGSARELRSLQRIGQKKAQLIVGWRELHGPFSEVEDLEQVEGISGKQVESFLKGHAQNPLQVGAELQSRFFASQGCAQSPFQKKTKSKGPYICALCAKEFKNGYNLRRHEAIHTGAKAGRVPSGAMKMPTMVPLSLLSVPQLSGASGGGGEAGAGGGTAAVAAGGVVTTTASGKRIRKNHACEMCGKAFRDVYHLNRHKLSHSDEKPYQCPVCQQRFKRKDRMSYHVRSHDGAVHKPYNCSHCGKSFSRCAGASLPWKCEAAFATKDRLRAHTVRHEEKVPCHVCGKMLSSAYISDHMKVHSQGPHHVCELCNKANGAPPRVLQKLVEEDRIGRAHGGHPGSPRGSLSRHPSSQLAGPGVEGGEGTQKPRDYIILAILSCFCPMWPVNIVAFAYAVMSRNSLQQGDVDGAQRLGRVAKLLSIVVGGVLIIIASCVINLGVYK

SEQ ID NO: 643 - DNA, 23310 bp, Homo sapiens
cactctagcctgggcgaaagagtgagaccctgtctcaaaacaaaacaacaacaataataaaactcatacataactacgtaaataaagttacaaaagcaactttagttcgttacaaaggacctgaagagagggatttaactgacctgcaaggtggaatggggctggagcagggccagtgggtcagacacctatgattatgccaggcaaaatggatacatgaagaaataaagttatagcatctccatgtagtaatagaaaaaaaaaaggaataacgaaattagcacactttttgggaatgtggacccaccagtagaattgagactagaaaaagttaaaagcattagaagtgttctctttctgagatcatgacttgttggggaaagggaagacttattgttcatgacaaacacttctgtgcttataacatgcattagcttaggaaacagcacttttctttttctctttttttttttttttttttttttttgagacaaggtcttgctctgtcgcccaggctggaatgcatgttgcgatctcggctcactgcaacctctgcctcctgggctcaagcgatccttccaccttggcctcccaaggcgctgggcgctgggattacaggcatgggccaccgtgcccggcctggtgcttttcagtgaataaataagtatgtaaacttctcttttctgactagacggaaattccccagaggacaagggtggcgtgacttgtcagtccttttcattgacagcgctgtggatgggaagaaagggcccctggtcccaagcaagccccagtcctgtggccctggaggatcagaagggtaattaagtgtcaaaggaaaacatagccagacatgagttactgtggtgaaaacagattttattcagtaactactcgtggtaggagaaagagctgagctccattctgatttgtgcagaggtgatttaggcatttaattagttaattagtttttgtgggacagggtctcgatctgttgcccaggcttgtgattgtgcctgttgctcagattgtgcagtggcacaatcatggctcactgcagcctcgaactcccaggctcaagtgatcctcctacctcagcctcctgagttagctgggacccacaggcgtatgccactgcacctggcttttttttttttttttttttttttttgaaacagagtctcgctctgttgcccaggctggaatgcagtggcatgatcttggctcactgcaaccaccacctcctgggttcaagcaattctcctgcctcggtctcctaagtagctgggattacaggcgcgtgccacaatacccagctagttttagtttgttttttatttatttattttttttagtagaaacgacgtttcaccatgttggccaggctggtctcgaactcctgacctcaggtgatccacccacctcggcctcccaaaatgctgggattacaggagtgagccaccgcaccagtgtctctctcttataacaccagctagtccttatcaggctttgactgtgggcccctcacctgtctaacttatccttcccaggaactttgaagaatactattattattcctattttgcaaatgaagaaactgaggcagattaaatgcctgacccaaggccatccagacggcaggcgatgcaggcaggagtcaagctcaggtacccctccccttctgtggcttccctgcctccaggcttctgccagcccctgtctaccttggtgtaggagcggcccctcaaagacctgcagggagccgggcacggtggcgcacgcctataatctcagcactttgggaggctgaggtgggcgtatcatgaaaccctgtctctactaaaaatacagaaattagccgggtgtagtggtgggcacctatgatcccagctactcagaaggctgaggcaggaggaacgcttgagaaccccagaggcggaggttgcagtgagccaagatcgagccactgcactccagcctggacgacagagcgagactccatctcaaaaaaaaaaaaaacctgtagagggaaggaggaactggggcctggggagggcagagctattatctcaggagaagcaggcaaacctctggtgacctctgatgacctcagggcaggatgggcaggccttcacaacagctccaggcacacccagcctcccgtccctggcctcatcactcccctctctgccctccaccctttggcctccttgcctttgtccacagttctgcagcctgataccctcttccttgtctcaaccagagaagtcttcagtcaataaacgtcatccaatgcctactgtgtgtcaagcacttcctgggtgctggggcactgtgcaagcacacacgcacagctgtgaggccatggggctggcattccagtgtggggagagcgacggaagcaaaataagaaagtccattacatggcgcatttgaaggcgcgaagtgctatggggagaaagcaaggaggggggttacagtccagagggaggggggtgcgattttttttttttttccagacggagtcttgctctgtcacccaggctggagtgcagtggcgtgatcttgcaaactccgccgcctgggttcacgccattcttctgcctcagcctcctgagtagctgggactgcaggcacccgccaccatgtccggctaattttttgtatttttagtatagacagggtttcaccgtgttagccaggatggtcttgatctcctgaccttgtgatccacctgcctcagcctcccaaagtgctgggattacaggcatgagccaccgcgcccacccgggggtgagattttaaatacaatggccagctgggctccgtggcacacacctgtaattccagcactttgggagaccgaggtgggaggctcacttgagtctaggagtttgaaacaagcctgggcaacaaagcaagatcccatctgtatgaaaaatttaaaaattaggccgggcatggtggctcatacctgtaatcccagcactttgggaggccgaggagggcagatcacttgagctcaggagtccgagaccagcctggccaacatggtgaaacactgtctctactaaaaatacaaaaaaattgctgggcgtggtggctcacgcttgtaatcccagcactttgggaggccgaggcaggtggatcacctgaggtcaggagttcaagaccagtctggccaacatggtgaaaccctgtctctactaaaaatagaaaattagatgggcttggtggtgggcacctgtattcccagctactcaggaggctgaggcaggagaatagcttaaatccaggaggcggaggttgccgtgagccgagatcgaaccattgtgctccagcctgggcaacgagagtgtgaaactccatctcaaaaataaaaataaaaatacaaaaaattagccgggcatggtggcgcgcacctgtaatcccagctactcgggagactgaggcgggagaattgctggaactcgggaggcggagttgcagtgaaccaagattgtgccactgcactccagcctgggagacagagcgagactccatctcaaaaaataaaaaattaaaattaaaagttagactggtgtggtggcatgtgcctgtagtcccagctacttgggaggccaaggcgggaggatctcttgagcccaggaggtcgaggctgcagtgagccatgattgtgccaatgcactcaagcctgggtgacagagtgagaccctgtgtctaaaacaaacaaataagtaagtaaataggttggccaggcaaagccatcctgagaaggtgacatttgagcaaagactgagaaagcagccaagcaacatctgggtggggagccctggggcagccaccacagatggcgcaaaggccctgggcttgctttctccagggacacatcagaggtccgggtggcaagggcgtggatggcagggccatgggtggaagggcagaagcaacgtggataagagaggtaggcaggggtcagatcggatgtggccaacttggcttctaccctgagtggggtgggagtggtctcagggctccaagcagaggaggggtggggtcagatgtttcatctgggtccctctggctgctgtgtggaaaacagcccggaggaggatgagatctcacacagggagaccagagctgagatgactgcaccagtccaggccagagaagacagaggctcaggccagtaggcagcagtgacggggcgaagagggatcagattctggatctttctctctctctctctctcttttttttttttttttttttttttttttttacagacaaggtatcactgtgttacccagggtggagtacagtggcgaaatcatagctcactgcagccttgaactcctgaactcaagcgatcccttctcctgagtctcccaaagtcctgggattacaggagtgagccactgtgcccagggcaggttatacattttttttgggaacaccacagaagccaagcacagtggctcatgcctgtaatcccaggacttctggaggcgaagatgagaggattgcttgagcccaggagttcaagaccagtctgggcaacacagcaagaacccatctctaaaaaaaaaggaatactgctgggcacggtggctcatgcctgtaattccagcactttgggaggctgaggtgggtggatcacctgagattaggagtacgagaccagcctggctaacatggcgaaaccccatccctaataaaaatacaaaaattagctgggcatggtggcagggacctgtaatcccagctattcaggaggctgaggcaggagaattgcttgaacccaggaggcggaggttgcagtgagccgagatcacatcactgcactccagccagggtgaccatgcccagccaactatgtaaatatcctatacacacacactcttctgatttcaccaatggttttaacactcactcttacctgaatccattattattatattggttatgtttatcattttttaaattctacattccttttacaattgttagctttcctacagtaaaataactttccagtggccgggcacagtggctcatgcctgtaatcccagcactttgggaggccgaggcaggtgaatcacgaggtcaggagttcgagatcagcctggccaacatggtgaaaccacatctctactaataatgcaaaaattagccaaacgtggtggtgcgcacctgtaatcctagctacctgggaggctgagggaggagagttgcttgaaactaagaggcggaggttgcagtgagccgagattgcatcactgcactccagcctgagcgacagagcaagactacatctcagaaaaaataaaacaaaaacaaaaaaaacttccatactgtcctacctcccttccctgctccctccctccttctctttgtctctaatattttcagaatcagtatgaactcattttcttttcttttttttttttttccaagacaaattctcactcttttgccgaggctggagtgcagtggcatgatctcagctcattgcaacctctgcctcccaggttcaagcgattctcctgcctcagcctcccgagtagctgggactaccggcgcccatcaccacacctggctaattttttggtaatttttagtagaaacggagtttcaccatgttggtcaggctggtctcgaactcctgacctcaggtgatcctcccgtctcggcctcccaaagtgctgggattacaggcatgagccactgcgcccagcctctttttttcttttaattaaaacaattaaatagagatggggttctctgtctgttgcccaggttggtcttcaactcctgggctcaagcaatcctcctgtctcgggctcccgaagtgctgggattacaggagtgagtcaccacgcccagcctaagtattgctcttctgtgatgatttgcaggcaacaatcacctcttgttcatattttcattatctttccctccaccccgagcctatagtctgtcttggtcagaccccatttcttgagtgcaccaggctggagtttggacccatccacatcctcgcagctctcctgagttggggcccaacatctggcttggggaacagacagctttgccgacagcagtaacaatttggttgaaatgataactttgtcaaaaatgaattttgccttagtgtttttttaaaggttgagaatcttgtacattcttacaacatttctattttctacagttaaaaaactgtaggctgggtgcagtgactcactcctgtaatcccagcactttgggaggccaaggtgggtggattgcttgagtccaagggttcgagaccagctaggcaacatagcaaaatattagctaggtgtggtagctactcgggaggttgaggcaggagaattgcttgaacccaggaggcagaggttgcagtgagccaagatcatgccactgcactccagcctgggcaagagagctagattgtctcaaaaaaaaaaaaaagtaagttccaattactttgcagccaattattcttgctcttctatttgcaatagcagaagattgaaatagcctcctagatgtctgacagtggaatgggttcttttctttttcttttttggtagagatgagggtctcactatgtggccaggcaagccttgaactcctggcctcaagtgatcctcccgcctctggaggcaggaggtagggtacagtcccagactcaaagcactgggattacaggagtgaaccactgcgtgagcctggtttcttttctttcccctccctcccttccttccttccttccttccatccgtccttccttccttccctccttctctcctctttcactctacctctttcttttcttcttttttctggcttgttaaaacagaaatacataataattatagtgaaataaactagggtatttactgcagcagttagtaataatgaaatgttggaaaacaatctaatgttcatccgtagggaatatttaaaatatagtgtatttctgccgggcgcggtggctcacgcctgtaatcccagcactttgggaggccgaggcaggtggatcatgaggtcaggagatcgagaccacggtgaaaccctgtctctactaaaaatacaaaaaagttagccgggcttcgtggcgggcgcctgtagtcccagctactcgggaggctgaggcaggagaatggcttgaacccgggaggcggagcttgcagtgagcagaaatcgcgccactgcactccagcctgggcgacactgtgagactccatctcaaaaaaataaattaattaaaaataaataaataaataaaatatagtgtatttctggccgggcgcggtggctcactcatgtaatcccggcactttgggatgctgaggctggcagatcacaagatcaggagatcaagaccatcctggctaacgcggtgaaaccctgtctctattaaaaatacagaaattagctgggcatagtggcatgtgcctgtagtcccagctacttgtgaggctgagacaggagaatcgcttgaacctgggaggtggaggttgcagtgagctgagatcgagacactacgctccagcctgggtgacagagcaagactccgtctcaaaaaaaaaaaaaattatagtgtatgccatggaatattatgcaactgttatatatgtgtgtgtgttcccaaagcattgttcagtaacaaaggaaaagtgcaaaacactaaaatggatgaatacatgcttgtgtaaacacagacactgtcaggaatgtttgtctggaggtgatgggtatggagcctttttgtctgatatattgggtgtatcaagaatgccaggtcctgagcagttttttttttttttttttgagttggagtctcactctgttgcccaggctggagtgcagtggcacaatctctgctcactgcaacctccacctcctgggttgaagcgattctcgtgcctcagcctcccgagtagctgggattgtaggcgcccgccaccatgcccagctaattttttgtgtttttagtagagacggggtttcaccatgttggccaagctggtctcgaactcctgacctcaggtgatctgcctgcctcggccttccaaagtgctgggcttacaggcatgggccaccgtgcccagccgtttatatgtattaactcttaatcatcaaaacaaactatgtggtattaccataattatcgccatttatacaaagcaacagagggataaggagattaaggcacttgcccaagtgcaagaggtaggacaggaacccagagtcccgtgctggtagctgcttttctgtgcacttaacattatctcatttaattcttgcagtcacttcatgaagaaggtggcggtcctagggcattggagaagttatgtgcttgttcaaggtcatgcagctggaagatggtggtggtaggacaggaagtctgtagggcctgattctgcagccctctagtctatactcctttgctcctgtgtccctcatcccccctgcagaatgggcaccccgttacctttctgagccactgtgcgcagaaaagagagcatgttggccaggctggtctcgaactcctgacctcaagtgatcagcctgccttagcctcccaaagtcctgggattacaggcgtgaaccaccacgctcagcctctgaatactttgtactcaagccatttttcagtgctgtgtttgcagtgagcacacccgagggatgaagacacgtctccctgtgggaacctgggcttaccagggcccctagaggaggggaatctctcaagctcagagctctatggctgcggtgcaggcccactgtgtgcatggtgtcagtctgggcccttccatgttgcccccgtgggacttggggtaaggggaactgatgcaaacatcacgctgctgttgcttggtgtgagcaattaattcctgtggctctcacccaggagtctcatgtctttgggtcagacaaactcatcagcttgtagaaatggcacagtcccacgggcctgttagaatcttctattgtgcacatgttgctcttaaaatatacaaatcagttttgattttaaaaaattatttatttttttagtgataggagttttgctacgttgcccaggctggtttcaaactcttgggctcaggaggtcctcccactttggcctggactgccagcataatgtatcaccacacccgggactgattttcgtttttcaagaacaaaaaccaaaaacatacacaaaccgagagtcaaagcttgctaattagaggaaagtcaggaaatgggaaccattcaaagaagaaaatacccccacctcctactctcacctatccaaagacaattaggtgaatcccttagtagatatctttccagacggttttccatatagattcccatatctggccaggcgcggtggctcacacctgtaatcctagcgcttggggaggctgaggcggatggaccacctgaggtcaggagttcgagaccagcctgaccaacatggagaaacctcgtctctacgaaaaatacaaaattagccgggcacagtggtgcaagcctgtaatcccagctactcaggaggccgaggcaggagaattgcttgaacctaggaggcagacattgtgctgagccgagccaagatcatgccattgcactaaactccgccttaaaaaaaaaaaaaaagattcccacatctttactagtttgcagaaataagatcctagcatatgcagtgtgtaggaaccaccttggtttagccacgtctctgtgactgggggccactgtggtgacccccagctccccggacagagtcaagagctcaccagcctgcaaaggttttcacggcccccagccagactcgggggcttcctcttgccctgctacttcctgggagctctgagggcaggaaatggcgccactcagctcctggcctaacagcttggggaccacaaatgcaaaggaaaccaccctcccctcccacctcctcctctgcacccttgagttctcaggctcacattcccaccacccacctctgagcccagccctccctagcatcaccacttccatcccattcctcagccaagagccaggaatcctgattccagatcccacgcttccctgcctccctcaggtgagccccagacccccaggcaccccgctggcccctgaaggagcaggtgatggtgctgtcttcgcccagcagctgtgggagcaggcgggtggggcaggatggaggggtgggtggggtgggtggagccagggcccacttcctttccccttggggccctgtccttcccagtcttgccccagcctcgggaggtggtggagtgacctggccccagtgctgcgtccttatcagccgagccggtaagagggtgagacttggtggggtaggggcctcagtgggcctgggaatgtgcctgtggcttgaaaagactctgacaggttatgatgggaagagattgggagccattgggctgcacagggtcagggaaggccaggaggggctggtcactgctggaatctaagctgctgaggctggagggagcctcaggatggggctgatgggggagctgccagcatctgttcctctgtcatttctgataacagtaaaagccagcatggaaaaaaccgttaaaccgcaggttgggcctggccgttggcagggaagtgggcagaggggaggcccggccaggtcctccggcaactcccgcgtgttctgcttctccggctgcccacctgcaggtcccagctcttgctcctgcctgtttgcctggaaatggccacgcttctccttctccttggggtgctggtggtaagcccagacgctctggggagcacaacagcagtgcagacacccacctccggagagcctttggtctctactagcgagcccctgagctcaaagatgtacaccacttcaataacaagtgaccctaaggccgacagcactggggaccagacctcagccctacctccctcaacttccatcaatgagggatcccctctttggacttccattggtgccagcactggttcccctttacctgagccaacaacctaccaggaagtttccatcaagatgtcatcagtgccccaggaaacccctcatgcaaccagtcatcctgctgttcccataacagcaaactctctaggatcccacaccgtgacaggtggaaccataacaacgaactctccagaaacctccagtaggaccagtggagcccctgttaccacggcagctagctctctggagacctccagaggcacctctggaccccctcttaccatggcaactgtctctctggagacttccaaaggcacctctggaccccctgttaccatggcaactgactctctggagacctccactgggaccactggaccccctgttaccatgacaactggctctctggagccctccagcggggccagtggaccccaggtctctagcgtaaaactatctacaatgatgtctccaacgacctccaccaacgcaagcactgtgcccttccggaacccagatgagaactcacgaggcatgctgccagtggctgtgcttgtggccctgctggcggtcatagtcctcgtggctctgctcctgctgtggcgccggcggcagaagcggcggactggggccctcgtgctgagcagaggcggcaagcgtaacggggtggtggacgcctgggctgggccagcccaggtccctgaggagggggccgtgacagtgaccgtgggagggtccgggggcgacaagggctctgggttccccgatggggaggggtctagccgtcggcccacgctcaccactttctttggcagacggaagtctcgccagggctccctggcgatggaggagctgaagtctgggtcaggccccagcctcaaaggggaggaggagccactggtggccagtgaggatggggctgtggacgccccagctcctgatgagcccgaagggggagacggggctgccccttaagtgtcggtgaatagtgaggctggaggccggaatctcagccagcctccagcaccttccctctcaccatcccactgccccctcgctcccatgtttccacccggcaccctgatcctcacccgaatctcctttttttttttcttttgagacagagtttcgctttgtcgcccaggctggagtgcaatgcacgatctcagttcactgcaacctctgcctcctaagttcaggcgattctcctgcctcagcttcccgagtaactgagattacaggcacccaccaccatgcccagctgcttttttgtatttttggtagagatggggtttcaccatgttggctaggctggtctcaaactcctgacctcaggtgatctacctgcctcagcctcccaaagtgctgagattacagacatgagcctccgcgccttgcctcctcacccacctcttcactctgaatcctcatgaggcttctcagccctggatttcctgctgccatcctcacccagcacccacaactagcgcctgggcagggcagggctggcacctctcaacgtctgtggactgaatgaataaaccctcctcatccacccctatttatctccatcaccatttccccctctttcttgttcctggaaacggctgctgagtctccatcggccaaacttatctgccctgtgatttctttgacaattctccttttcccccagaacccaccctgggttgaccagagtctgggaagaaggacaagagaacccggcaaactccctcctaggattaactttgtaaagcacccttgccctgtagctgcaagggctgtggaacctgggcagcccgcaaccacctttagctctgggccccccaggccagcctggagcatggctgggtggggccaccagcccatgctctcaggcgggcctgtgatctttcccagggcacatggactgtaggctggccctggcccacaccaccacactctccccagccatggacagaggcagccagaggcctcacggtttctcctccgagtttctggctgggtgtagttctcagaaaccccagtgcctgcgtgtgtccactcgtgggtgtggtttgtgtgcaagagctgaggatttggcgatgcttgggaggggtagttgtgggtacagacggtgtgggggtgggaagtggtgcagagactgaagagggtcaacctgggcatgggggacacagggactgctgagaacgtgcgtgtcatctttgctctgatggggtggacatagcagaaaatctaactctgtctgtagccccatacagaatgccagggtgagcacagtggctggtgcctttaatcccagcactttggaaagttgaggcaggaggatcgcttgagcccaggagttcgagtctgaagtgagctgtgattgcaccactgcacttcagcctgggcaacagagtgagcccctgtctcaaaaaagaaaagaaaaagaaagccaggcttcatggaaagatcgtatgtgtgacccaaatatgagttcttcagctcagccatggtaatcccttccttgaagtctccatttctgcagtacacatgcatgtgcgctctctctctctctctcacacacacacacacacacacacacacacacgcgcgcgcgcgcgcgcgcgctctcctgcgaacagaggcagggggagaggggtttgccctggtctcggggactggtctggctggcgcttccccactgcacgtttccaggtttagtttgtctgtgtctcctcttccatcccaggggctgagccccttccatcctccaagaggaaccagtgagagtgagtgaaggaggggcctggagccagggacttcccctgtggggcctgggtggagaggggagaactcaatggtgctgcctttgagaccagcccaggctacagcccaggagcacacatgggccagggcagttggtatttcccgaggacaaagaggaaattttcaaagaggaagttgttgagttagagcttgcggtggctgagagcagacaggttgacctgcaaaaaaagacaggggaggcatgtgagtgtgacagccctgctctgtggcctgggcaggagatgggggaaagggtcaggtgggggatgggctcgtgcagtgggagaggagacggagggagggagcgggaaggggcttgcttagtgggtgggaagagctgagctcggatggaaccagcttctaccagccaggctgggcacccactgggctgcatctggtggccttttctgattgctatttggactcactgcagctgcagaatgacagaggccatgtccaaaatcccttagagacactgttgtcttagagttgttaaaataagagcccccatatcaggtttagaaaatactgtcaccgaacgaacgtcgctgtcctcagctccacctccctttcctttgacagatatggttgttttctaagccaggactggttttagtcaggtcctgggcgaatcctgaaaaaaagaggtagtacgggtaaggaaggcacccaacagggctttcacaatccagaaaatatcaaaatataagtgttaaaagagaggcacaggccgggtgcggtggctcacgcctgtaatctcagcactttgggaggccaaggtgggcagatcatgaggtcaggagtttgagaccagcctggccaatatgatgaaaccccgtttctactaaaaatacaaaagttagccaggcatggtggtgtgctcctgtaatcccagctacttaggaggctgaggccagagaattgcttgaaccctggagtcagaggttgcagtgagccgggatcatgccactgtactccaggctgggtgacaaagtgagactgtctcaaaaaataaaaataaataaaataaataaaagagaggcacaaacagtgttatgaatgcaccaaggaaaatggtgcattcataactctcaggtgaagcctaccaagccatgcgtgtgtgcacatatgtgtgtacgtgtgcatgtgcgtgcgtgcatgtgcgtgcgtgcatgtgcctgtgtgtgtatgtgtgcacatgtgtgtgcgcatgtgtgtgtgtgcgcgcatgtgtgtgtgcatgcatgttctcccatgcatgtgtactgtggcaagggagactttgaggaagagattccagtggctgagcagaagggctcgcattgccctggcgaaaggttggaaggcttcacctgagagtgtgtcgtggcctttgtcatatccactgcttgattcctttctttaaaaattatttttattgttttctacatatgagaaccaccacacctggctaatttttgtattttttgtagagatggggtttcaccatgttgtcccggctggtctcaaactcccgggcacaagagatccacctgcctcagcctcccaaaatgctgggactataggcatgagccactgcacccagccactgcttcattcctggtggctgctgtgcctggcatgttgcagatcctccatgaatatgcatttgaatgaatgaatgaatgaatgaatgaatggagatgacgcctcagagattctttcttttgagatgaggtctcattctgtcacccagactagagggcagtggtgcaatcacagctcaccacagcctcaacctcctgggcctcccaagtagctgcgatcacaggtgtgcaccaacatgcccagctaattttttttttaatttttaatttgtacagacagggtcttgctgtgttgcccaggctggtctcgaactcctgggctcaagtggtcctcccacctaagcttccccaaatactgggattataggtgtgagccactgtgcccaggcttgcctcagatatttgaaggctgggaaggattttgcaaagctgggaaaaggaaaaggcattcccagcagaggggatagcaggtggaaatacataattaaaaaaaaaaaacgtggagcagatccagcgcagtggctcatgcctgtaatcccagcactttgggaggcagagcagggaggattgcttgaggctaggagttcaagaccagcctgggtaacatagaaagaccctgtctctacaaaaacacaaaaaattagccaggcgtggtggtgcatgcctgtagtaccagctacttgagaagctgaggcaggaggactgcttgaagccaggagtttgagaccagcctgggcaacatagtgagaccccgtgtctacaaaaagtaaacatttatatatatattttttaaagtggagcagttcaatatagagtcttttttgaacaaacgtgaaatagatgtcttttttttttttttgagatggagttttcactcttgttacccaggctggagtgcaatggcgtgatcttggctcaccagaacctccgcctcctgggttcaaacaattctcctgcctcagcctcccaggtagctgggattacaggcatgcaccaccaaacccggataattttgtatttttagtagagatggggtttcaccatgttggtcaagctggtcttgaactcccgacctctgctgatccgtatgcctcggcctcccaaagtgctgggattacatgcgtgagccaccgtgcccgacaatagatgtcttttaattttctggaggaaaaagcaaagcaaaagaagcagtggatattttaagactaaaaaggaaaacaaaaaaaggagatagagcaggccagacgtggtggctcaacgtctgtaatcccagcactttgggaggccgaggcaggtggatcacctgaggtcaggagttcaagaccagcctgaccaacatggtgaaaccctgtttcaaaatacaaaaaattagctgggcgtggtggcgggcacctgtaatcccagctacttgggaggctgaggcaggagaatcccttgaacccaggaggtggaggttgcagtgagccgagatcacgccattgcactccagcctgggcgacaagtaaaaaactccatctcaaaaaaaaaaaaaggagatagagcaaggaacagtaagaaaatagttgggtgcagtggctatgcggtggcactataggaggctgaggcgggcagatcacctgaggtcaggagttggagaccagcctgggcaacatagacccctatctctacaaaaaatttgaaatatgaaaaattagccaggtgtagtggtgtgcgcctgtggtaccagctactcaagaggcgaaggcagggaagattgcttgagcccaggagtttgaggctatagtgagctgtgatcatgccactgcactccagcctgggcaatagtgtgagactctgtctcaaaagaaagaacatggccaggcgtggtggctcacacctgtaatcccagcactttgggaggccgaggcagtcagatcatgaggccagtttgaaaccagcctggccaacatggtgaaaccctgtctctactaaaaatacaaaaattagccaggcgtggtggcatgcccccgtaatcccagctacttgggggtctgaggcagaagaattgcttgaaaccgggaggcagaggttgcagtgagccgagatcgtgtcattgcactctagtctgggcgacagagcaagactccgtcttggaaaaaaatttaaaaaaagaaaatataaaatatggtataagattaaatatattagttatgaaaataattgtaaatggcttattgaacttatagtcagtaaaaatcatgtttttgaaaattatgtaatgactttggaaaataccagcaatataatgttaagtggggaaaaaagcaagttactcctctgtaatacatatgattttagttttgtaataaaaattcccaaccatatatgcacttatagggaaacaaaggacccatcgcaaatgttttccatgctgatctccaaagtggtgagtttatgtgtgatttttattttgtttatgctcttctgtattttccgaatttcatacaataaatatctgttacttttacaatatgaaaaaatagtggtcaaaaaggtgttcaagggggtggcctgggggtgtctggtttgaggagagtggtaggggatgaggctgcaagtggaggttggagccatgctatgaaaagttcaagagtttgaattgagttctgaggtttgtttttgtttttgtttttgttttttgagacggagtctcaccctgtcacccaggctggagtgcagtggcacgggttcatgccattctcctgcctcagcctcctgagtagctggaaccacacgcgcccgccaccacaccaggctaatttttttgtatttttaggagagacagggtttcaccatgttagccaggatggtctcgatctcctgacctcgtgatccacctgcctcggcctcccaaagtgctgggattacaggcgtgagccacagtgctctgcgtgagccatagtgctctgctgagagtttgaattgcattctggaagtagtggtgaaatcaacacacctaagtctgctcttctcctctcttctagtccccagagtggtgagtagcatcgttctggtggcccaggcaaaacgccttaggaccaccgtgcagccccactctttccccattcctgctctccaggtgccaagtccctggctcttcttccaccgacccttgcatcccttccttctcttcagtcctcatcgcacctcaccgggatcctattgacacttcccctttgatttccttccgctctctgctagtgatggtcccagggacccttctaaaaggtcactgtgggctgggcacagtggctcacgcctgtaatcccaacactttgagaggctgaggtgggccaatcatctgaggtcaggagttcgagaccagcctggccaacatggtgaaaccccatctctactgaaagtacaaaaattagccgggcgtggtggtgtgcacctgtagtcccagctactcgggaggctgaggcgggggaattgttggtccccgggagatggaggttgcagtgagccaagatcgcgccgttgcactccagcctgggtgacagaatgagactccgtctcaaaaaaaaaaaaaaaagaaaaaagaaaaatagctgggcatcgtggcacacacctgtagttccagctactcaggaggatgaggtaggaagatcacttgagcccaagaggtccagactgcagcgagtcatgatcacaccactgcactccagcctgcgtggcaccctgtctcaaaatataataataataaaatttaaaaataaaataaaacgctgctctgtctaggtgatattcctctatccccaaggctgtcagggtggaaccctccttccttagcgtggcatataagcccctcgggacctggccctatctctcctctgaccacccctgcccggtcagcccttgttacagacagtctgtgctatccagccccatcaaattcctgttgctccctaaatatgccacacactttatttggaggagaggggtgaagaagggtagtttaacatgttcaaaatatttattttttccagacagtaaaataacattttttcctgttttgcaaaagttaattatcagcacattgaagattttccttttttttcttttctttttttttttttttttgagtcaaagtcttgctctgttccccaggctagagtgcagtagcgcgatctcggctccacctcccgggttcaagtgattatcctgtttcagcctcccgagtagctgggactacaagcacatgccaccatgcccagctaatttttgtatttttggtagagacggggtttcacaatgttggccaggctggtcttgaactcctgacctcaggtgattcacccgcctcaccctcccaaagtgttgggattacaggcatgagccactgcgcccggccagcagtcttaaataacagaattcacacacacacacacacacacacacacacacacacacacgcactgtattatatttcatcttatactttaaaatgtttccttttttttcctcaaaagtacacattaagatcatgtttacaaataaagccttgtcatccaaagtgaaaaatccagatggcaagatttggatggggaaggtcttgagaaatctgcgaatggagttcacttttgcagacaggaaatgggccctaatatatggttctaaggacattccatttctgaaaatgtacatttccacccgcttttcctctccttccttcctccctccctccctccctctctctctctctctctctctctttctttctttctgacaaggtcttcctctgtcgctgacgctggagtgcaatggtgcgatctcggcccattgcaacctccgcctcctgggctcaagtgatcctcccccctcagcctcccaagtagctgggaccacaggcacacgccacggcacccagctaatttttgtattttttgtacagatgggttctcaccatgttgcctaggctgatcttgaactgctgggctcaagtgatcctcccgcctcagcctctcaaaagtgctgggattacaggcgtgagccaccgcacctggcctgcatccccatttctgacccttgaccatgttcaagtgggaaggggaagccggggaagggaggacgggctacctgagggctgcgggtagaggtgactcctgtgagctgtgagccctcagcccttgggcagagggaacagaacagaaacagaccccatctctgagccaccaagctcagactcgtgtggcaggagacagatcacacaacactatcaacaaaacaacacaggtcgcagtggctcacacctgtaatcccagcactttgggaagctgaggtgagaggattgcttaaccgcaggagttcgagaccagtctggccaacatagcgagaccccatctctcaaaaaaagaaaaaaattagctgggcctggtgatgcacacctgtagtcccagctacttgggaggctgaggtgggaggacagcttgaaccagagaggtcgaggctgcagtgagctatgattgtgccactgccactgcactctagtctgagcaatagagtgagaccctgtcttccaaaaaaaaaaaaaaagagagagagagagagaagaatataatcaaaagtttctaaattcccaaagtagtaacaaaagcagacccaaacaaaagtagagagaaaatcttcgaaacttaaaaggctatttaggctaaggagcccacccagtggtgaccacctagttctgggaggtttggggcagggccattagacaatggaaactcaggttattttggagacaatcaacttgctcccaaaaatgagctgcaagcaggtgcctgtgtgctcagcccagtctggagctcagagcctgcctgccccactgcaccatcaccagcccagctgaaccagggtcccaggcaagccgtacaggctctgcgttggccttggagagaaccgccgactcccccgagttgcctgagctcggcctgaagccagccctccccacgctggctcacaataaatgccttgacttcccgccaactcttcctcaaccattaagattcagctcaactgtcacgggctctgtgcagctgccctcgctgccccaccccacgcagactttgtgttccttctccactcctgcagcaccccttgcgacagcatgaataacccggctgtagtgatgtgagggtgacactcatcaccagtgtgtgagcccctccaaggccacatgtcctctttgtgtttccagagcccagggcccagcatgcggtagctacctagtatatgtttactgaatggagggatgaataaattcatgcacaaagaatagttttatttatttatttatttttgagacagagtcttgcttctgacacccaggctgtagcgcagtggtgcgatcttggctcattgcaacctctgcctcccaggttcaagcaattctcctgtctcagcctcccaagtagctgggattacaggcatgcgcgccaccacgcccggctaattttctatttttagtagagacgaggtttcaacatgttggccaggctggtctcgaactcgcgacctcaggtgatctgcctgccttggtcttccaaagtgctgggattacaggtatgagccaccgcgcctggccttatttgtttattttcataaacaaatttctgttgcccaggctggtctcaaactcctggcctcaagtgatcctcctgcctcagcctcccaaactgttgggattacaggcacaagccacagtgcctggcccagttctgtcctttgagttgacctggtcatccaggaggatgttctgaggaagtgtgaaatgataatattattctagcccacgctggatacagtggcagtctggaaggtgaaagaggttgggtttgaaatagatttattggccaagtgcagtggctcacacctgtaatcccagcactttgggaggccgaggcaggagaattgcttcagcctttaaacatggcgaaaccctgtccctattaaaaataaaaaagttcgatgggcgtggtggcattcacctgtagtcccagctactcaggagggtgaggcaggagaatcacttcagccctataggttgaggctgctttgtgctgtgatcatgccaatgcacgctagcctgggtgacacagtgagaccctgtttcaaaaacaaaaacaaaaacagaatagaggcctggagcttgagagggaactcaggatagaagatatagatttaagagtcggctggatgcagtggctcaaggctgtaatcccagcactttgggaggctagggtgggtgtatcacttgaggtcaggagttcgagaccagcctgaacaacatggcgaaaccccatctctaccaaaaataacaaaaactagctgggcatggtggcatgcgcctgtaatcccagctacttgggaggctaaggcaggagaatcacttgaacccgggaggtggaggttgcagttagccgagattgtaccactggattccagcctgggtgacacagtgagactccctctcaaaaaataaaaataaaaataaataaataaataaataaatagtgatacagatagatagatacataaattatatcattcactgggtagattgagaagagagctgtagagagaatctgagtgtaatagtcagggcaggctaactgctgtaagaaacagtgcccccacatctcagtggtataactcaaaagaagttttttccttcttatgacagtcaattcctgacatctggagcatgacctttcacaacattattccgggacccagtctccttccatctagtggctctgtcatcctcctagggccttggagtggtctgcttttgaccagctaatgggaggggagaggcagaataggatcctgtgaagacttctagggtcaggtctggaaatatcttttgctcacactccattggccagaacaaga

SEQ ID NO: 644 - DNA, 2646 bp, Homo sapiens
gcctcgggaggtggtggagtgacctggccccagtgctgcgtccttatcagccgagccggtcccagctcttgctcctgcctgtttgcctggaaatggccacgcttctccttctccttggggtgctggtggtaagcccagacgctctggggagcacaacagcagtgcagacacccacctccggagagcctttggtctctactagcgagcccctgagctcaaagatgtacaccacttcaataacaagtgaccctaaggccgacagcactggggaccagacctcagccctacctccctcaacttccatcaatgagggatcccctctttggacttccattggtgccagcactggttcccctttacctgagccaacaacctaccaggaagtttccatcaagatgtcatcagtgccccaggaaacccctcatgcaaccagtcatcctgctgttcccataacagcaaactctctaggatcccacaccgtgacaggtggaaccataacaacgaactctccagaaacctccagtaggaccagtggagcccctgttaccacggcagctagctctctggagacctccagaggcacctctggaccccctcttaccatggcaactgtctctctggagacttccaaaggcacctctggaccccctgttaccatggcaactgactctctggagacctccactgggaccactggaccccctgttaccatgacaactggctctctggagccctccagcggggccagtggaccccaggtctctagcgtaaaactatctacaatgatgtctccaacgacctccaccaacgcaagcactgtgcccttccggaacccagatgagaactcacgaggcatgctgccagtggctgtgcttgtggccctgctggcggtcatagtcctcgtggctctgctcctgctgtggcgccggcggcagaagcggcggactggggccctcgtgctgagcagaggcggcaagcgtaacggggtggtggacgcctgggctgggccagcccaggtccctgaggagggggccgtgacagtgaccgtgggagggtccgggggcgacaagggctctgggttccccgatggggaggggtctagccgtcggcccacgctcaccactttctttggcagacggaagtctcgccagggctccctggcgatggaggagctgaagtctgggtcaggccccagcctcaaaggggaggaggagccactggtggccagtgaggatggggctgtggacgccccagctcctgatgagcccgaagggggagacggggctgccccttaagtgtcggtgaatagtgaggctggaggccggaatctcagccagcctccagcaccttccctctcaccatcccactgccccctcgctcccatgtttccacccggcaccctgatcctcacccgaatctcctttttttttttcttttgagacagagtttcgctttgtcgcccaggctggagtgcaatgcacgatctcagttcactgcaacctctgcctcctaagttcaggcgattctcctgcctcagcttcccgagtaactgagattacaggcacccaccaccatgcccagctgcttttttgtatttttggtagagatggggtttcaccatgttggctaggctggtctcaaactcctgacctcaggtgatctacctgcctcagcctcccaaagtgctgagattacagacatgagcctccgcgccttgcctcctcacccacctcttcactctgaatcctcatgaggcttctcagccctggatttcctgctgccatcctcacccagcacccacaactagcgcctgggcagggcagggctggcacctctcaacgtctgtggactgaatgaataaaccctcctcatccacccctatttatctccatcaccatttccccctctttcttgttcctggaaacggctgctgagtctccatcggccaaacttatctgccctgtgatttctttgacaattctccttttcccccagaacccaccctgggttgaccagagtctgggaagaaggacaagagaacccggcaaactccctcctaggattaactttgtaaagcacccttgccctgtagctgcaagggctgtggaacctgggcagcccgcaaccacctttagctctgggccccccaggccagcctggagcatggctgggtggggccaccagcccatgctctcaggcgggcctgtgatctttcccagggcacatggactgtaggctggccctggcccacaccaccacactctccccagccatggacagaggcagccagaggcctcacggtttctcctccgagtttctggctgggtgtagttctcagaaaccccagtgcctgcgtgtgtccactcgtgggtgtggtttgtgtgcaagagctgaggatttggcgatgcttgggaggggtagttgtgggtacagacggtgtgggggtgggaagtggtgcagagactgaagagggtcaacctgggcatgggggacacagggactgctgagaacgtgcgtgtcatctttgctctgatggggtggacatagcagaaaatctaactctgtctgtagccccatacagaatgccagggtgagcacagtggctggtgcctttaatcccagcactttggaaagttgaggcaggag

SEQ ID NO: 645 - protein, 396 aa, Homo sapiens
MATLLLLLGVLVVSPDALGSTTAVQTPTSGEPLVSTSEPLSSKMYTTSITSDPKADSTGDQTSALPPSTSINEGSPLWTSIGASTGSPLPEPTTYQEVSIKMSSVPQETPHATSHPAVPITANSLGSHTVTGGTITTNSPETSSRTSGAPVTTAASSLETSRGTSGPPLTMATVSLETSKGTSGPPVTMATDSLETSTGTTGPPVTMTTGSLEPSSGASGPQVSSVKLSTMMSPTTSTNASTVPFRNPDENSRGMLPVAVLVLAVIVLVLLLWRRRQKRRTGALVLSRGGKRNGVVDAWAGPAQVPEEGAVTVTVGGSGGDKGSGFPDGEGSSRRPTLTTFFGRRKSRQGSLAMEELKSGSGPSLKGEEEPLVASEDGAVDAPAPDEPEGGDGAAP

SEQ ID NO: 646 - DNA, 2696 bp, Homo sapiens
cacccacctctgagcccagccctccctagcatcaccacttccatcccattcctcagccaagagccaggaatcctgattccagatcccacgcttccctgcctccctcaggtcccagctcttgctcctgcctgtttgcctggaaatggccacgcttctccttctccttggggtgctggtggtaagcccagacgctctggggagcacaacagcagtgcagacacccacctccggagagcctttggtctctactagcgagcccctgagctcaaagatgtacaccacttcaataacaagtgaccctaaggccgacagcactggggaccagacctcagccctacctccctcaacttccatcaatgagggatcccctctttggacttccattggtgccagcactggttcccctttacctgagccaacaacctaccaggaagtttccatcaagatgtcatcagtgccccaggaaacccctcatgcaaccagtcatcctgctgttcccataacagcaaactctctaggatcccacaccgtgacaggtggaaccataacaacgaactctccagaaacctccagtaggaccagtggagcccctgttaccacggcagctagctctctggagacctccagaggcacctctggaccccctcttaccatggcaactgtctctctggagacttccaaaggcacctctggaccccctgttaccatggcaactgactctctggagacctccactgggaccactggaccccctgttaccatgacaactggctctctggagccctccagcggggccagtggaccccaggtctctagcgtaaaactatctacaatgatgtctccaacgacctccaccaacgcaagcactgtgcccttccggaacccagatgagaactcacgaggcatgctgccagtggctgtgcttgtggccctgctggcggtcatagtcctcgtggctctgctcctgctgtggcgccggcggcagaagcggcggactggggccctcgtgctgagcagaggcggcaagcgtaacggggtggtggacgcctgggctgggccagcccaggtccctgaggagggggccgtgacagtgaccgtgggagggtccgggggcgacaagggctctgggttccccgatggggaggggtctagccgtcggcccacgctcaccactttctttggcagacggaagtctcgccagggctccctggcgatggaggagctgaagtctgggtcaggccccagcctcaaaggggaggaggagccactggtggccagtgaggatggggctgtggacgccccagctcctgatgagcccgaagggggagacggggctgccccttaagtgtcggtgaatagtgaggctggaggccggaatctcagccagcctccagcaccttccctctcaccatcccactgccccctcgctcccatgtttccacccggcaccctgatcctcacccgaatctcctttttttttttcttttgagacagagtttcgctttgtcgcccaggctggagtgcaatgcacgatctcagttcactgcaacctctgcctcctaagttcaggcgattctcctgcctcagcttcccgagtaactgagattacaggcacccaccaccatgcccagctgcttttttgtatttttggtagagatggggtttcaccatgttggctaggctggtctcaaactcctgacctcaggtgatctacctgcctcagcctcccaaagtgctgagattacagacatgagcctccgcgccttgcctcctcacccacctcttcactctgaatcctcatgaggcttctcagccctggatttcctgctgccatcctcacccagcacccacaactagcgcctgggcagggcagggctggcacctctcaacgtctgtggactgaatgaataaaccctcctcatccacccctatttatctccatcaccatttccccctctttcttgttcctggaaacggctgctgagtctccatcggccaaacttatctgccctgtgatttctttgacaattctccttttcccccagaacccaccctgggttgaccagagtctgggaagaaggacaagagaacccggcaaactccctcctaggattaactttgtaaagcacccttgccctgtagctgcaagggctgtggaacctgggcagcccgcaaccacctttagctctgggccccccaggccagcctggagcatggctgggtggggccaccagcccatgctctcaggcgggcctgtgatctttcccagggcacatggactgtaggctggccctggcccacaccaccacactctccccagccatggacagaggcagccagaggcctcacggtttctcctccgagtttctggctgggtgtagttctcagaaaccccagtgcctgcgtgtgtccactcgtgggtgtggtttgtgtgcaagagctgaggatttggcgatgcttgggaggggtagttgtgggtacagacggtgtgggggtgggaagtggtgcagagactgaagagggtcaacctgggcatgggggacacagggactgctgagaacgtgcgtgtcatctttgctctgatggggtggacatagcagaaaatctaactctgtctgtagccccatacagaatgccagggtgagcacagtggctggtgcctttaatcccagcactttggaaagttgaggcaggag

SEQ ID NO: 647 - protein, 396 aa, Homo sapiens; identical to SEQ ID NO: 645

SEQ ID NO: 648 - DNA, 68960 bp, Mus musculus
atttgactcagctgattgtgtcacatcttttaaatactggtaaatatggatataccaagtatttaatgactaatgcacatagaaattaatattaatacagtgatcttttgaatgttccaggtataggctttttaaaaagtgttaagagtgtctgtctgtctgtctgtctgtctgtctgtctgtacgtttaattgatagcacctctgccgtgtgtcatcaactactagacagccaggctaagccttctcattctgttctgaagattctaaaaaaattcgaaccatcaacaatagtatgtataatttgaacttccatgattgatccttgatataaataataaaagaaaatatttatgatgaaatattttaattaggtcaattatctagaattacctagttttgtctatatatcttttccatgaaattatagctatctatgtatttgtagttgtttctttcaaaaacaatttttaaaaattggaaagggatatatatgagaagtgattactccaaagaatattaatcttaaaagaaagcagtatagatgtcttaccatgaaatacattactctaggctaaaatttcaactgttttagtcatagatttttagcatctttgttagatcagcatataattcatataactacttaagtttttatgatgtatcatcaattttattactttctgtctatgtttgcaaaagtagtagagtttaattcaccatatgaacctcattctgatgtttttgatttgatagtcttgatctaaaaataatgttttgttaatatgtcactaaatttctaaaaactgtattcatgggctgctgagatggctcacaagaaaagcacttgctgccaactggatgacttgagtttgttccctgggacccaaatggaaggggagacttatctcctgcaagttgtcttttaacctgcgcatgtgtgtgcacatgtgcatgcgcatacacacacacacacacacacacacacataccttaaaaattttttaaagtacatttgttgttgcttgtaaattaactactcgtagtaatatttcacttttacattataataaaaagtttggaaaagttacttttcttgttttatttttacatcatattcattctgtcagaagtaagcatgaaattactcagtatccatgtcaccaccaagttgttgttttcaagccagtatattttttcataactccagtgctcagacctagagtaataaagcttttcttacagaaaaccatcacagcgacattacctcatgtttgtatgtttagttttgtgtctcgtaacagtgttcacatttgtgattctgatgtcagtattgtgtcacctgagcgggatgattacctgagtaccataggaactttgtaccagttggaatttaagtggactgtttgctgcttttgttcgcattggaacgttggacatgccatatgatactggcttagtaatcaataccagtaattaccatagaactttatctgactacccaaccatatcaaaagagtacttttttctgggttaataatactagctttgatacataatcatttaagttatatttgtttaaaattatatattttcttagtaatagtcaagttggtgcttaggaataaacatgtagaagtttatgcagtatgtagggcagaggtcagtgaatgtatttgcttggcttggaacttaagattgaaccaattttacaataaatcaaattggaagaaattggtaaaaggcattttagtaatattggaactttttgaagtgtgtgggactatgagaagaatttcttactaacatttccaatatctgtaagataccaaaggactgagactaactgatcttttaatggaatttctttgaaatcaaatccataactgattctattaagatacaatagctaaagttggggaataacttcaggtaaaaactgcaagtcttgaagatttttggcattcttttaagtatttaaacttaatctttatagctgccccatacagtaatctatgacctctctgaatcactcttcaatcttgggcctctattgccttacttcaaatattgtaccttgtttagcctacctcacagggctgttgtgaggagtgtagtgaaacggactctcatgtgaactgggtggtttccactaagaatggttgtgtttggatacttgtaaatgctgtttagttagaaaaagcatgttaagttggtataagcagtgattttaaatgatttttaaaaataagacgtccttcaaaatgtcttttagtatcaattaagtttgtgcatgattgtttttatatttctcatcaactacacaacttttccaagttataaagtctactgcagcattcatgtgtagcggggaagcctacgtaagcaaacgactacagctccttccccccaggacttgcacttgcactagagcagccggtgcccatgcagagtgaacgtggctgaattaacttttccaacaaccaagtgggtcagcaatttgatgcccttgataaatatcaactttattgaattgtaccttttattaaaaaggaaatacttcaaaaccttgttcattacctagaccagttattatctgtctggacatagttgtgttcctctaaattggatgtactaaatagtttacaagttatcctactccacagattttggtatgtttgttatctggacatgattttgctatgcagttgtgataataaaaattccagctcctcaggtttaacctctaagttgtggatggagactatttaaagtacacatgatgtattcagtgctgcaagagtgtttgaaatgagcacactgcctcattttcctcaccaacaagacaaagcctttccaatgatttttttttaaactttcaaagtggttgttcaaagtgtagcaacttgtatgttgaaatgattgtatgttctgtatgaaatgttccacttgagatttttacaaaagcacctgtattatctcttttaaaaattaaactttttttttgctttcttctgtgtccattttttattttttatcaacttttatttaaatatttatagttttttttattgataaagagaatgttcaaaaagtcattgtcgccaggctgtggtggcacacacctttaatcccagcactcgggaggcagaggcaggcagatttctgagttcgaggccagcctggtctacagagtgagttccaggacagccagggctacacagagaaaccctgtctcgaaaaaaacaaaaaaaaaaaagtcattgtctcatttcctcaaaatatgttagacaacgccatttaatagcattttatgtaatgatgggaaatcctgcactcactagccagtagtcataggcagctactatgaataatgtactagccaattgaatttctaatttatattaatttaaaataaggacatttcactagtagctcatgttttatatgttaaagatgcagtagttagctcatcacatcctaggttacatttttgtagaggggtcactaagagagtcagacccagaacccagtcctttttacagtatgtattctaacctgaaagaaagtgaaggggaaaagaatacgcaatgattgattctatttaggttgtagttcctgtgtttaaggtctttgttggcaagagaaagataaaggggaaacagacagtcttgcattatgagaagcatgtggcaggttttgaggggcagtccttttgttagaaggcctatagatagctgcaactttcgtgaagtcaagattttaagtgcacttaccctccgaaggttaagttattcgatgatttctcttgcatatatatgcacagataagacagaatacattgtagtattgtgaactaaaatagaagcaacctgattgttagagaaaggcgagcatggatcagtcatccttttgtgtggctaggcaaagaactggcctgcacagctcagttacttgaataataatagacttaaataatagattagcagaattttgaaggttcccctttctgacttgtgcctgcaagttaactatttttgtatgataccttgtatatgttctttgtatctcttcctgcagttaacattataaatacacagacagtttatcattaagatcaaatctctgacaagtaactgccttcagggaagaaagatatgtttgtgttttcaggggatggaaatcctgtgtgagaaggcatggtgggtgaacaagcaagagactgatccagaagtaagctcgtagcctttaagacctgcccacaaacaacccgttcccagtaactgtaggttccataaactccaaaacagcaccattatgaaatgtaagggctagagggacacttcacattccctccataacataacataaatcatgtggcagctggtttcttcaaaagttgttcttgtccttatttaattaggtcctctctcttttttttttttttgaaaattcaacagcttgttttgtttttttttaaatagtaactttcatataatagaatgctagccaaattcagtactaatatataaacttcttaggtcaaaatatgtggtcaggcaaattttctgaatctcataaaagacagttttccaaccatataaaatatttagaaacaatatacagcaaaagcataccacaatttaaaccaaacaaaagctttgaaaatatcccaatccttgttataatttagaacacctattttcaataacttaaaatattatctacacttcccatctctaaattctgttaagaaccactagtctagatttaaataatccaaatatttactcatgctaagagattctgacattaaggagtctacagaaattcaaaaatcagtacattagattataacaagtccttccaagccctagataataaaggcagtattttactttctaatcacacctaaggtttatctgcataatgtaattcattggctgaccaataataaatagcttaaagggactttattcacctattcagtaatgtttcattataaaggatattttgatcaatatttcaaatttataaattcaattatgctgacatttctagaattattgtgctggttagtttttcagcttgatagagagtcatctaaaaggaagtgaacctcaattgagaaaatgcctccataagatttggctgtaaggccttcttttaattagtgattgatgggagaggacccagcccattgtgggtagtgccaccactgggctggtggtcctgggttctataagaaggcaggctgagcaaagccatgggaagcaagccagtaagcagcagcctccatggcctctgcatcagctcctggctcaggatcctgccctgcttagtccctgccctcactgcttgtgatgaagaactgctatatggcactgtgagtgagataaaccatttcctcccccaaggtgcttttggccatggtgtttcatcacagtgatggtaaccttaactgcaacaattgttagcaacaaatcatctttatagggccacttattaaactgatgagaaagatgatacattctggcttttatttaagaaatgatttaattcaatggtttgatttgttactacttgagaagttcatttgcttcccagtagtgggtggtaatgaggtgcaaatggccttcctggtcctcacttccctctaacagaaagcaacacagagactcagcagtaaacatcttctgctgtttatgtaaaatcagctccagaaaacagaaagtgagaacatactcaagtcctgtctgaggtgttcccagctccaatagtgtgctataataacagtataccagccgatccatcgctgactagtgaactctcagtgaagaggaagataacagtgtcctctctgatgccattcatggtgaaatgtgtgcatataaaccttttgcacagactttagtgttaagaacagagaatgaacatagtacatgtgtgttaaggagagctccagagctaaccatctcaggagccaaaccaccttctggtgctttcacttcttcttactcctctaattaggctaaggagaccactgaacactacaggcaagaatttactaaatactggtgatttctactagccaaactcagctctgcaagccaacaggtgaaccaggaggctctttgagttcattgtccattaggagtctgggaaacattttcaattcttcggtggctacccatccaacatcagcaaaagatgccaccacatcctctccaggtgcatggggactccattctgttacatgactggtaagctcagctgtgcagcagccctcaccctcccagctactctccattttaagttttatggtgaagtttcagttttgcacggtactagttgcttatacccacttcactcaaggtgagcaccagagagattgacaaatccagtgataaaacatatgttaagggaaggctattcgtattctaaacagagccagccagtactataaacagtacgatacaagatcgtacatgcaccagattcttgggctacagatcctggccttgtctccgctagactgctcttcataaaatcacaattggaaggaagccaaggatcatgtcttccatatttcttccatatttattgacctgagtcaggataaaaatggaaacttaagggtagggatcttgttttttattaagctgttggtacagtgcttggttaacccagctctactccatattgactcatcctgaaactccgtgatggaaatcaggctcctagcttcacctagtacaattccctaagggtgtctgatggctggctctaattgtctacttggcccaatgtagaatcacatgaaacaggtgtctccatgagggattgtcttgggttcatctgtgggtgtatcaatgggtgggggtagggagatctatcctgagtgtggacagccccatttcaccagctgggtcctgcactgaagaggagagagctatctgaacaccagcatgcattctttgttcttacgctcctttctgctttgggatgagatgtaaccagctcccttaagctttcgctgctttgacttcctaatatgatatgccgtaatccgagactgtgagacaaaaataagccttgccttccattgccctgtcagagtattttatcaccgtaacaggaaatgaaactagaggttggattcctcaggccagtaccccaggtggtcatctgtaagtttcccttgaggacctgtgtaggcatgtttccaagatctaccagaaaaaaagacacacacacacacacaccatggatggcagtatgtggagaatggatggagtgaaaaggatgaaaggaaaaaaaaaaaaaaaaccactgtgacttgaccccaagaccaagacaagggccaagaaacagaatcccaccaatccccgagcttccccaagctcaggaattgaaatcttactaatcctcactctagaaatctccaccctggaaagctctgccctgcccctcaagaaaccccatataaaccctgcctgcttctctcaagtggaagcagccaccctgctgggttttccctcctaataattctcttgtgtgaggtttgttgtgcagtgtgactttgtgttattccttggctctgggtggagtagagctatttaacacttttgctggggaaattccccctgctaaagcagaaccgttagacttgccttggggaaaacttttcctgcagccccagtagagctggaacacttctgtaggggaagccattcccttcagagctgtaacacttacagcttggatatgccaacgggagtctacatgcatgtattccaggtcacacagtacttacaccatcacttttcaacattgtctgaggaatttgagactcccctatttgaatctggatttatgatccttcagaaaaaactattaaggatggatattaaagacacttctgtattcattttatttaggtgtatgtgtatgttacataagtgtgggcaccctcaaaggccagaagaggacattagataccatggaactggagttacagaatagagcttggctcctttgggagaatactgagtgttcttcagtgctgagccatttgtctggtccctgaatatggcattttgatggttaagctcttggttccttaaatttgttagtgctggtatcttctacttttgccataggataccacaaactttaccaggccagaatgtgtagatacacacacctggatgattcttgaaaggtgaatgtttacttctgctggaagctttttttattcctccttgtagctttctcaacagctttagatttcgttcactagattaaaagactttttacggtgagtgagtctcccaaattgtctctccaaacctgcttgagaagtactactttctagttacaggacgggatctgatagcaagttaaggaaataagcattccctttggctcagagttggggaggttaaagtctaccatgggaggggggacatggcagcaggggcaggtggctgagtctactcacatctggatggactggaccaagaagcagagagcatactgaaaggggagctgggctgtaatccttaatgtctgacctctctaatggcccacttcctccagggtgtcagaatcctacccctccaaggttctaaaactgcctggagacaagggattccaacagaagcgtctggggagcatttcacattcaacccatcaacaaggaccatcgatgtcagcgtgcttacctggttattgtccaacttccggtgtaagcagggcttttactttgtaagtttatattaaaaagaataaggttacttgcaagtagaggaaaatttagaagtaagtttcaaaaaaaattgctgacaagttaaatctaggataaccaaaaggattgtcaattttctttgaagggtgctaaatcccttcctctaaatcccagtccactttatagaaacagaaacttgataatgtagatggcacattatgactgtgcttatatagggaaaacagtgagatctaaacttaaacttagctcaaatcagaaaactggctagaaagctggctagtcctctgcctcctgcaaggtttatgcaggataatatttactatgcacttgaaatctattcacttctaaaacccgggaagtttttttttttcctccttataatttccagacatagttgagcataataagcattcctaatatcttttaaaatatcacctcttagtactccaataggcatcaattatattgtgtgcatgtgtgcatgtgtgtgtgcgtgcgtgcatgtgcgtttgcatgtgtttaaagacaagagctcactctagatcctcttgccttggccccccaaatacttgaattgtaggcatgtcagacaatagaaatttttgatacagccacattccatcacaactttttgaaaaattctgttttaagacaagcatggcgatgcacacttgttatctcagcacttgagatgtggaagatgtgtaggatcagttgaacaccatattggctgagtagaatttaaggccagtctgagctaaatgatatagaacggggtgcgtaggtaaattatttcatttttttctatacgccgttagtaattttcgtagaaagaacgtaaaattacaataatttctttagtgctttttaattttcaaaaattcctatcaaaatccacatctgctccttgccaataactctttaaatggctctgctaaaagcaaagatgctaggtgccaggcccagaagcatctatatttctttcaagccccaaactgaaagatcgcatcttctagacctggatgtcaagtaggcacctcaacttcatgagtacttgcatcactacatagtgctcttccccattctgtccccaatagcagaatgtagagagaggagaagggggaggagggagggagggagggagggagggagaaaaaaaaatcgttatccaccctaggtttgcactttctgcgctctgtctgatgagccgtacactacgggggacagttctgttttttctctaaactccaggcagcctcagggcactgccggagggacggctgattgcagatttctgatggccaaataggccacactaataggagcgctcggagaacaaagcaacagccagcgtacgccgctgcgcgcttgaccgcttctttgcgacagttgccgtaaagcgaggcctccgccgcagctctagagttaggtaagatgagggcaccggggccgggtagccgagcctgggcgtgggcgggttccttcaggcactgtcgctggtctactggtataccctgagtagcggtcgtccacctttggggtaccctccctacggcggcggggaggagtccgaggtcggccgcagtccgtgcacgagcttgctgccgccgtccccgctgtcccggcgacagatcgttcccacacgcccatgctgtccgttgatcgtcctgacccgcgagggttcgattttggaggttcatggagacgcttaagaggccgggctgggacagtgacgcttgagctggttggcgagagcggacgatgcggggagaccgatcaggtgtgaggaccaatgcatgccaaggtggctccgccggggaggaactgatgcagcctgctgctgctctgagtgcatccgacgccgtggcatgaacttacagggaaaggaagggggttggcagggcagccgcccagggagggttccacctgagaaggactttgatgctgcgccaaagccaagttctgtgtacagcaagcagcctgctgcaactgcttcgaagagaggtggtggttggcttaccagtcgctttcctctcttcttagactcctcagtagtcattcttagttcgtttgaaggagtgctcactatgcttaatagtatgatgacgatggtaataataataagtaacaataataatgataaggtgggcgcggttagcgatgcgagataactgcatgtaggaacgttcctgtcttccgtttacattatcagttggggaatatcgggaaagatttgataaaaatggggccgggtagttaaaagctttagataaaagtcgtccagagaactgaattcagatttcatcacgatcgccaatttctcaggtagtacaaggcaagccgctttcttgtatgtctcaagctttctcggctataaagaatgatattccagtctttctagtttgaagatttccattaagtaaaagtcagcctgtgagccaaccatggtaacacacacctgtaataccagcactttggaggccaagacaaaaaaaaaaaaaaagcactaggaaacagagctgcataatgatcgacagaccagccttgggtaaatgctctcaaccaagcagttagtcacttgcctcttgagggaaaggctttactcactgtcttagttagagctaatactacagtggtgaaataccatgaccaaaagtgactggggaagaaagggtttggtttgctaagttttagattacagtttatcatccaaagcactgagggcagcaacctggagcaggagctgatgcagtgaccatggagggatgctgtttacctgctctcatggtttgtttggcctgctttcttgtagaacccaggaccaccagcccaggaatgacaccacccataatgggctggaccctcccacatcaaatcacaacttaagaaaattctctacaggaggcttgcctacagtctagtcttgtggaggcatcttctcaattggggttccctcttcccagattattctagcatgtgataaggtgacataaaattagctagtacactcagttaaaaataacatgaaatgtaaatcaagtaacttgatttgagctggctcaactcactcactaaagtgcttgccattgtaggcatggtgatacgacttctgccctcttctagaaggtactttaaaaagctgagcatggtagcctgaacgtataatctcagagctggggagagggagatagaattcctaaggatccctggccatccagcccagcctgcttagtgaattctaggctagtgagagacttgtctttggggtgtgcaggagtggggggagggggttggagaggtggctcagttactaagagcaagcatgagatgaggacctgagttcagatattagcactcacatagaaagccaagcatggctatgtgcatgcctgtcaccccagcactagggggagccagcagaaatgagaggattgctggccaccaaccagcctggctccaacatcagtgagaggctctgtctgagggagtaaggcagagtgtgatagagcaaatactgggcattttctggcctgcacattcctgccctctcacacaaaggctggtggtacccagagagtgaccccagaggtagtgtgacctccacagacttgcaggcactgatttactgatttgcactcatcccctctgtgcacagtaacaactgatttagcacattccattctagcagtgagaacattggcaaaataaggttgctggtggtagtgggtttcttttgttttgttttgaaacagagtctcattgtgtggccttctctggcctggtagaggaggctggcctctaacccagaggtatacctgtctctgtctcccaagtgctcgaattaaaggcttacaccaccatgcctgattgaaagtagactttattctattttatttgtattgcagaattatgttcaaataggaaagacattaaataaaaagaaaaacatctacatttcttcacctgaaagtcaaccttacctagctaactttttatgcaacctctcttccctaggtcctttatttcctcaaagaactttccttccagcatattcagaaaggagtcaccatgtgcttatgattcttctggatagtcacatagacagagtacagtattttaccttgtcatcttccagtgacaatgtggcaaggtagaggttattttgtaaaggatgaagaagcgagtgaacattaattaggtaaaggtctatcattatcatcagtcctgggactgaatctagggccttgtgtatgcaagcactctactgctgagtgacattcccagctccgtgttcagtttgtattttgagatagtctcactgagtttctcaggctggccaggaactctgcagcatagtcagcttttgaatttaccatcaccctgtctaccttccagactaggtggtattatatacaggtctgtgccatgaggccctactagactttgtttttttcatactatatattttggttatattctttccccaccccaaattcttccctgataagccactcaactttctcttataaaaagcaaagcaaaacaaaaatacatgggggtctattttgtgttggctaactattaatgaatatgcagtctatcctgagctacgtttgatacatgctgtcactccatttaagaaaaactgttttctccccctgcccttcagaagttattagttacaaataccttcttggctcagggtgggacttcatgcccacttccccttctccgagctgggatttttgtctgacttgaacctgtgcaggtcttgttcatgctgtcacagtctctgtgagttcattggccttgttgtgtctggaaaacgctgtttcctctggctcttacaggctttctatttccttttctacagatatccctgagccttgaggggagggctttgataggttttccctttaggagtgagtgttccaaagtctctcattctctgtacgttgtctagtttggagtatttatgtttgtggtcaggacatgtagggaagatgtgagagcagtcacagctgtttggcagcatgaactagcaagaagagaagcaaactgtatgcacaaatgctctgtccgtacagcagcaaaatggagagattgtcaggcactctttgcgacttgttcctgataacatgaaggagttatgttttaacttttcacatataatgtgttctctatctttctcacatatgtacacatgtgtataaatttttctgtcataaaaaaaccttccatctagtctagaacatgtttcctactaccccagtgttcttatgaataactgatctgggggaggtctggtcatttaaagataagaaactaaaataaaatgaacatttaaaaatgttacagcgggaagaaaataaatgagaaaataagtgatagctgtgtaggtcaaaggggacaactaatggaagacggggaagtccgtggttaagggcatgcactgctcttcccaggggtctgattttgcttcctagaacccatgacaggcgactcacagctaccacctgtaactccagttccaggggaattccagttcctctgtccttcacggggcctgcacacatgtgagcacacccacgcatttactaagagtaaaaactcattttaaaatgacagtgttgtgctgtccttcaggggtaatgtgctgaccagtcctggagagagtgaggccttgggttcaattagcagcattgcaaaaaaatcaggcaacgttcattggctcaagtgctaggagttggttgtaagacagcagtctggcagagttcaggaagaaaggacacacaaggagacacagatttcataacagcctatgaaatggaaaattgaccttgaagcttcggcaaggtgacatgataacaggctttggaagttgaacaactgaaagggcagtgaaggagttatactttagttctggaaatagagaatccagtgtcctaatgaagttatttaaacataacttcaaaaagctttctataatcattataagtttaaagaacactcgaagactgaagaaaatgaatatacagttaccaccatcattatatagtctaggtaaacaagagttgaattttacaggtagggaatatgtttgcatactttgtacatcctgtcaaaacagatcagattctctgtatgtggggctgtggtgttgactgttatcaaaagaacatttagctttacagggcagtgatataaatcctgtaacctatcaggggacgtgaagtatgacctcccagccaaacttttctgacatcgtgttttaacaataccaacactaacagtagtggtaccttcacagtctcttcttgatgagctgcggagatgagtgggcacagggtatggcagtaggatcactgtggaataagagtcaaatagcataattacgggacagaataaaataaccaagtagaaataagtaggaaaaagaaagaaagaaccatagtttgtcagtttctcattataaccagggaacaaaagaaaacgtaaatgttaagtaaaagctgtattaatattgaaaaataaagctaaatactaggggatctttaaatctacctaactaaaatcatttttttggagagggggtaagaggatatacatattaaatttcctatactaaaaaggtaatcagaggtacccagggtgaaagatcaaaatgtttatcaaagtttcctttttctttgcaaataccaagttaatatatgaatatcctatacctcacactcatacacacatacacacgtctcacaaaataaacagctagatactatgatccttgactaaaggctgtctcacgtttttccttctttagtcagcgtggtcagaagtagcatcgcctttgaactggtcagacatagaccctgcggcccagaggtcccaggacagctctgttgagtcagactcatggagaagcctccctccgcactccttcttgccatggtgctctcctgaactgcagatagcctttcctgtctttcattttgtcttttctacgtttgcttttcatatttgttggtttgagacaaaatctttttgtggagctcaagctggccttaacctcattatgtagccaaggctggccttgtacttgctatccccctacctcagcataccaaatgctgacgataaatgtgtactgccatacttgggtaaatataaataactgtgtgtgtgttgtcaataattattgaagttaatttttttgttgtcaaattggccttttttctttgcagaagtatctctggtcacaggaaacaagattctgtttcatgaagaagatgaaaacaactgggctactgttaaaaaccacccaagagaacaccatagaccaatgagtagaatcaataagaacgtggtcttggcccttttaacattgacgagttctgcctttctgctgtttcagctgtactactacaagcactatttgtctgcaagggtaattgtcttttcttattcgacataactgtggctctgtgttttcttaatatatttaaatttcagtatagaaaattaataatgtttattttttaaagaaacatttctcagtgggtttctcatctttttagaatgtaataggcagtttaaaattcagttaaatgtttttgtaattatacaattaaatcaaaagtaatatttcaatagtatttaacctattcatattccctgttgaataataaattgttatccctaaataatatcagttaaattaagtcactgataagtaattttgataacctatcaaaattattttatctgctagtgtatattttgattcggaatgtacttgaattgtagtgtaacttacccttgatgctgtttgagggaatgaagtcaagatactgggctggagtcagtgggttggagtcgtagcagtgaatggctgtagctccaggtcgggatgagtacccagcattccagggtcttaggagagattaccctgagtgggtcgtggactagggaagggggctatttgctgtcttagaataaagaaggcctatttctgcttatgtttggagcaagcattactgtagatatcctcttggcccttgctgcttatttagatgtttagattttctgtgctctacaaataaaatcaatctaattatctaataattaaagataaggagcaaatacactgtatttcatagagggataggcttgacagaagacaggtttttaaaatgcaaactttctttggatgttctgtgcgggagcacaacttctcatatgcctttggcccaacagcagtcctcctcttgaggggaacgttgtcatttttgacagactgagtgcacagcttcaagaggggcaaacatggagcagtgagggaggaaggggacacttgcctctcaatcgacttgcgacagccaagtcaatcctggcagttagtggggtaacagagagcacagcaaggtcccctcacatcccgaaacaaactccagtggaatagcagcatcgtgagtactgagtagcctgccccgggggagatgaaattccaaacataaagtatcatttccgtgcagtgcatagtagtactttcatgtcattataagctcaaaatgttgtgagtctgcccactgtaagctgggatccatccagagtcagcttacagttcacaccaagaagacatatttctagggaagtttcaaccatgcattgtttttttcttactagacccaacaggttaatgtggctttagctcagtgtgcttattgaatttgtatttactaatcacttgttaatgcatagggtacatagcaggaaaactgagattaatagggcaaagctcttactttcaagatactcataatttgatagtaattcttgagtatgggttttgagttcaaatcttagttcagtcgtctgactttttgcagatcacctctttaagctttggtttctttgactggggcacagcaacattgccagttgaggtaacctagttgatgtgatgcatctcactcactgttttctacgtagtacatgctaaaaaacaatagtgtttaataacttctgtttcataccaatggtttacattacaatttttaaaataaagttgagaggctggcaagaggctcagtgcctctaagctaaacaatcctgaattcttttttttttcaaaaacattttttattagatattttcttcatttatatttcaaatgctatcccgaaagtcccctatacactcccccgaccctgctccccaacccacccactcctgcttcctggccctggcattcccctgtattgggacatatgatcttcgcaataccaaggcctctcctcttattgatggccaactaggccatcctctgctacatatgcagctagagacacgagctgttcctcctataggtttgtagaccccttcagctccttgggtactttctctagctcctccattggggccctgtgttccatccaatagttgactgtgagaatgacaatcctgaattcaattcctagaacacattcagtagagggagagaactggctcctcaaagttgtcctctgacctccacatgtgggtcatggccttctctcacccctgaatgaatgattgaatgaatgaagtaagttattagagtccttgtgaacctgtattttcactgttttatcagtgagttaactggactctagatagaatgtttctcgctgatgattcaggacctaaaactgttacctttactcgtagagctattctgatgtgtaaggaaaactatatttaacagaatatgttcacattggcagataggtaataaactggctctcagaatgctgtaggacaattgaaaatattaagcttaatggctgagtagagacagagcactatgtgaggcaaatcgtgcactgtgctttctagtcagattcggcacaccagcgccttcagcaatcactgttggtatcaacagtggccatcacagggtgctagtctgggctagcttcccactatgctgagtaatttgttttcagttagagggagagctttgaaagaagaatggcagcaattattcacagtgaacaattttgtatgccatcattaagagtgggaattaatccttacagccatgtatgtagcacatgtgcagcaaaggctcagaatagttttaagttcgctgcttactaaaatttgcaaagattttcactcagtctttgacttttgccttgctttatttttctctaaaggaaaatatataggttattcctggaatggaagtatactagacatacactagactacagtctagtgtaatatggcaaatttgggtaaatatcaccccccattattcctccatccctccagtttttcattacccagaaaaatagtgaatttcttttattacagttttttacacatggtttttattcttttgtatagtgtcaggatgtagattattggttttcagatggtttactaagtcaggcagctttcttccccttgctgataacacttaggagtccatggagaactggagagaagtgttttgtgtgaaggagcagcactgagatgcagaagaaggcagctgcccagacagatggggattcgccacagttagggccttccagctttatctgtgcaggcttataaacaattgggggaaaaaattaagtattgaagaccttaaagtttttaacaaattagtagccatgtgactctaagtgggcatgtttaaacagtcatacaaattaagaatttggattcctgtaagaatttgattattagatactgtgcatcagaaatgacaagacttttttttttttttccaagtcttagtatcttgtttctggaatgccttttctttaattacattatagttgggtcactggacttcagtagtcaccaactattcttctaccagttctttctagaatctgggtcagcccatctacttcttggtggcccttaacttttcagtatcactatccagtaggaaatatttttgaaatatctgtaggcttgttttcttaaccccttgacttgttttgtggaaactgtttaagcagagcacagtaatagactaactccctaagctcacaatttgaggcgctttggaacatatgaggaaatagaggagtaatttagcatttacttcttcagacttcttcagtgggttgacccaaggttgtttgtattttaatgttaattttggacctttaagattggttgtcctagagatgagagagtctgcatgtaagacgttgagggatcttgtctttaagttatatttgattggtaaataaagatgccaacatccaatagctgggcagaagagacataggtggggtttaggctttggggacttggggttggagaagaaccatgaggagagaagaagagtgcaggaggaggaaggagaagctgccatgggttaggagtcaagagaatgtgcctctgaggactggccaattagagttaagagcagcccagatgaagcatagtaagtgataacttagggtaacaataggaaagtagattctaatcacatagaggctagacagctgcccagctattgtgctgtttaaggcttattgaaaatataaaggttgtgtgtgtcttttatttgggaacttaaataggcaaggtgggagaaaccttgggctggaatttaaataaatttctacaagactccattctgaatattttactagttaagaattcttctatcccctagtgtttagactttgtaattcttatgtactgttagacttatttctaaaattcaaattttagaatttttgatcaagttctctgcatagcatagcataccaatagaattaaccaaaagtccatagcatagtatgaggctcttctctgtttgcctctccagatctctcctcaccatgctctatgccctgggaggctgacctctatggacttcattagctgagctcccttgccttttggtttccagttgggttcaaccaatgggaagcatcagctggagactggagactaggaagaagaggtcaggttatttacttttttggttctctgtttgtatggtcattggttggcagtggctgcagttttcttattcatttacagttgtagccactgggtaccagtagctgttcttcccatagatagaacaactattaagataatgaaattttaattctaggaccaaaaactacatagtttttagaacatttgcaaaatgtacccttgcttttcttttcttacaagaggccattaaaattatatggtctttaagctttataagactagatatccatagtgttcttagctttgactcttcaagttaagttttctggaagaaaaaaaaaaaaaaaactgaagagtagcatccttggaggacggggttactggatagttcatgggtgcacaatattttaagttggtcttatgggatgtgtaggagttttccagatgagcatgaggaatgtagaaggcctttacaattaagaaaaagcttgttggaaaagaatgaattgcgtggatatctataggagaagagttctgtgtagaacgagaggaaatagagcataaaaaccgaggtagaaagtgtctggaataacctgggtgttattgtagttggagaggagtgagagatgagaggagggttgggaaaactgaagattttgctgtcgttgagagtgttatcgaccaccatgagaactttgggtcttattggtaagattgaaccataggaatgagctattaacatggcatagttgtgactaacctatctgctctatttaggaatagattataggagcacaggctgaaagaaactagttaaaagcgactgtagtttacacaagaggtagcaatagcttagacaagggaattactaagaaaccaaaagcagagctgtgaggatctgtggattgttagatgcagggtgtgaatgacaggagggaaccaaaagttacttgtgttttgacctaggcaatagaagtgagacattgagactttgcagtttattgagagaaaaactagaaaagcaagtctgaagcagggtggagggaaggctttgcatatgccagttttaggtgcctagttgacatcctggtgacaaacagacagccagatgtacaagtctgcaattcacaggactctggtttggagttataagcaggtagatggtatatccagttctacgattcgggtcaagctggctctggtaaaggtaccttcctgagggtgagcctccgaagaagccacatagtggaaagaacaaactttcacaagttgtcctcagacccccatgcatagcatggtgcatgtgccatcactaaaataagaaagtattaaaagaagaggagggccgggcgtggtggcacacccctttaatcccagcacttgggaggcagaggcaggcggatttctgagttggaggccagcctggtctacaaagtgagttccaggacagccaggacaatacagagaaacactgtctcaaaaagccaaaaaaaaaaaaaaaaaaaaaaaaaaaaaaaaaaaaaaaaaaagaagaagaagaggaggaggagcagcagcagcagcagcagcggctatgggcttgagacacagcttagcagttgagaacatttgctgttcttcaagaggatctagatttggtttccagcacctgtggggtggctcaaacctcctataactctaattctaagagattttatactcacttctggcctctgcaggcactgcacacatgtgatacacatgtataagcaaaacactcatacacatataataagtaaatctttaataaaaataaaacgcaacaagactcaatgagataccaaatactaagtgaacatagatttaaaagagagactatctcgggatccgagctttggcccctgaagctcctttcaaggaattgagaactagcgagtgagactaaaaaggaataaccagagacacacagcaagagtgtagtatgggaatcatgagagtccagtaactgaagtacaccagtgaagcagaggttaccaggtcttgttagaagaaatgaggaagagctaacaaccaacggaattactattgtggaagtcagtggtaggtgtgagtgtttggcagagtggatctgagctcaagtgatctcgtaggaaggaaaggcaaggagagcaaccattgggagttttttatttcgttggttggttggtttttaatagagggtttcctcagtgtagccttgactgtcctagaactagctttatagcccaagctggcctctaactcacggagatcttcctacctctgcctcccaagtattggggttaaaggctgtaccaacacaactatccagcataaaagagaacaagaaattgttgaggaaaagggctgttaagagttttttgtttgttccttgttttaattatgtttagtgggaagaataatgttgtgtgtatatactaagaggaatggtccagcagagaaaggaaagttctggagcagtgtctttggccaagcaaaagggcatgcaatttagtaagtagagtaactataaataggaatatagacagtttatctcttatgagaaaagcaaagtcagactgtgtgactgtcatttcactggggagcaaactattgggagtgcttgaaagttcttttttcttttttttagagatttattcatttatttatttattttaaatacactgtagctgtctttagacacaccagaagagggcatcagatctcattacagatggttgtgagccaccatgtggatgctgggaattgaactcaggacctctggaagagcagtcagtgccctccatctctgagagccatctttccagcccttgagaggtctttaattccttttctcaagaaagagagagctatgctactgacagatagaatgaggaaatgagttaaaaaggcagaaagagcagaagtcacccaaggggatgagaattagtgggcaagagagtgtaggtgctccacagaatgaaggcctactcaacatctgtcgagaattggcagtgacagcagtgaacagccatggttagctgtgtgctttcatgtgcagacaactgagtagctggatttctgttgtttatcttgatttgctttttgactaagaaactcacagtgtcatgcaggttggacgtcctagaacccactaatgatcctctggcctcagccctcccatggattatatgtatattaatgttagtgtggtggcacagtggaagactggtggtcagaatgtggtttggacaaggtggagtgttctaggtagacgtgatagtaacaactgtaaatatatgtttaccattctagtcggtggcatggacctaagagagcaggcctgaaaatgaggtgaccaaagtttcatgcgatagccaaccttattcatagcatcaggcaatttacactctgagggctaaggaaagtcacctgagtaaagtgtacaatcacaaagaccaacctcatgtgcctagacacacatgaataacaacagctcaggtaaactcactgttaccctctgcacctaggaagagcacaaaaacacattccagggacacttctgagtttgaacaaacaggtcacaagactcttgtcttaagagtttctttacaagctctcagaattctccttgaatgactccattcttggactgtgttctgacaaccatacatgcagtcaactatacagtttaaaagagtagaatttgctgggcagtggtggcgcatgcctttcattccagcacttgagaggcagaggcaggtggacttctgagtttgaggccagcctggtctacagagtgagttccaggacagccagggctatacagagaaaccaaaacaccaaaaaaataaataaataaataaataaataaataaataaataaataaataaatgaataaaagaaaaagaaagaaagaaagaaagaaagaaagaaagaaagaaagaaaaaaagaaagaaagaaagaggtagaatttctgatatatgctcttaattccaaagaaaagctgtaatctactagctcactgaaatgtacttattccaagtacaacatattcagtgtcctctcctaaagtagggctgtagtgaaaagatgaggatctgcctgcagtttccaacccttgtcaagactgaagataacaaagttactctttagttttgttgtttatttttctcaaatgtacattgtattcagctattactcagttgcagatcttggagacactgaatccagctctgccttagttactcttcctcctgtctttctcctccagttagcaattcttcctgacatttaaccaagcactatggcagacatgctaatacagacagcttggcttgcgcacccgtccttgaggacgcaatttaatgagaagacaaacgttctttttaagaatgttgagggcattgtgtttgtaggatgaggcagttctcattatcagcatcctcatttataattcacaggtataaaaacattgaaaacataaggagctgtcagacttctttgagtttgagacagtcttctgatttctagaccatcacattctttcttctatttagttttaaagcattttggggctaatcatatgaatactgataatattgctttcttccttctgactctctaaaccacaacatttaaaaagcactattgtaagtaacctagagcatgtgaaataatagtgtacatcatgaaaagtgtgggcattggggcccatctctcaactagaaataatgaccttgctttgcaggaatgttgagggggtgtggatgagagaggaaccaccctttttcttttctttctttcttttggaagtatgaaacagaccctgacactcgggaactgctcctcattatacttttttgccatctcttcaccaactctgtgtggagatgaagttaggaatatgatgcaagatggatgaccctaatttcagagagacagctggttctagctgtaatctcagggtttaagggactggggcaggacagagagaggtggtggggaggggaaacagacaaacagacagacagacagacacaggaatgtggatgttcttttttaatgggcattaattggttcagaaatgctggccatagcattgaactatttcagcaacttgtgttactctttcaatgttttacatcttggattgtagtataaaattatattactgtttggttctgagtatgaaaataagcatgtagatattgcccgctgggctatgaatttactaaaatacctttttccccctctgttagaatggaccgggttcatcaaaatccaaagggaatcgagttggatttgatagcacacagtgggtatgtacaccagacaagaagtttcagttacaatgttgtctgtagctcactcattgattactcctctaatatgtgttgaaggatggcagtaacaataactaccttggttattgttatgagggtagaacttctaccaagagctttacatgcaatatctcactttgtccgtgtggaaaccttataaaatcagtatctattgctgttctcagtttagctagttagagagagtaaggttagttggctagtaagtatctgaatccagatgaaagtgttccatctctaaaattcttgttcactgagctatattgcttccccaaatcaatgaacaaatgaatcagaattgatctacaaacataaagggaaattaataatcaggaataaaaatctcggtgctttctttggaagaggaaaggaacagataatgaaatatatacactacatcttttgttttacaaaatttcataacctccgtattttaaaaatgcattttttaaactttttttaaacctaattaaaaatgcaaaacaatgctgagagggtggagttaaactgtagctcagttgacagagcgtttgcctagcatgcaggaagccctgggttcaatctcaagcactgtataaaccagacatgatagcaggggggccaggagctcaagatcaccttcagctacagacagacactgtgcaggccagcctggcctgcatgagatcctgtgtcaacgacagttcttaacactgaaaagtaatgctggtttactaaacaaacaaacaaaagcctttgatttaacagttttctttgtttgtttattgcttctttgttttgtcttatttatgtctgttattttgagacaactgtagccttggttggcatggaactttctgtgtagaccaggcttgcctctcaagctttgtgatagtctcctgcctctacctctggaatgttgaggttacaggcggtcatcaccatgcttggcttttgtagtgacagagcacttacctagtaagtgtgagatccagggttcagttgccagtactggaaaaaaaaaatctattgacttaatggcttcatagagattattttcctctgaaacagcgtgcagttaagaaatttattatgctgacatccagccaaaatgtgccagtgttccttattgacccatggattctggaatcaattaataaaaacttcgaacaagtgaaaaatgcttctcaaggcccggcttcagaatgcagatttttctgtgttccgagagacttcactgcgttcgcactgcagtatcacctgtggaagaatgaggtgagtgggctgaaaatgtaaaacatctacagtcatattgggaagatttccacagaaggacgttgctattaagttcattttgccaactcattataagttcaaagcaacagtttcacatggccttgccttatagtgctcacctgtggctgcagcctcagagttgacttagaatgaatgtttttccttgaacacaaatctttcccaagcctgtttctccctttagtgtaattgtgacagctcattgtattccttattatgcagcctttacttactattctatgtggagtagcacattctaacattctattcttgattctaactttattacatctttttagcaaaacagctaaaaccatctcttaaaactttcttcccagaatcaaatcaggaattctataaaattattaatttatctaaatagtactaattaaagttcatcttcatgttgatctataggaaatttgctcagtagggtaggctaatgcccaggaaccctcaggctatgtaatagtgacaggaaaggcatatcttctacaagaagcaatcctgagatgattctcttgggaccttgcctctcagagttcacccatcttagggcatgcaaaaaggttggccacctccaggtaggccacctgctagtcttagcctttcctaaatggctcctgaaacttttacaatataataaaataatggtggttcttgatgttaatttgcctctccactgagaccagggctgaagttctatctccatttccactgttgttccagcataatcagtaccagcatagaaacattatgctcaagaccagagaacgagaggcaggaacaagaatatcagcctttccaagggaaatttttttctcagaagcttctagtaaactgctgttcagatattctattgggaaattcagtcttgactatacttaaggaggccaacatggatgttcagtctgtagacaggcaagcaggggtcttatgctgcattcccactctgttgcagaaggtacatctcagtgtgtgatttttgtctacagcagtgttcctccattttgtatgtacacagtactagtttgatagtcatggagtagtttttagatgtttccaaaagttgaacttatatttccatcctcctttgtagtttcaagatgaaaggcagacaggaataaggaggagaggtgcttctttatttcaggtatctgtcatcattttcatccagtgtagatgttgttcccccaaggtttatatgttgtaaacttggtccccggagcagaggtagggatatagaccataagtggtagagtctggtgggaaagagattaagatagcttgaatcagaaatatgagcactagtagtcagccatcatgagaaatgcagacattctatagcggatctggtaagtcatgttgactctggcaggttggactccttctggagtggcagtgtactctgggacagcagtatatgctgcaggttcctcggttgcctcaaagtcagtgtcagagatcgtgtcccacggttctgcctaggcagtgaagcaggtaagaaacaggtgaagtgtgtgtatataaggatatggtctttgttggcttgctttttttctcattttatattctaaagatgtctcaacctatagaaaaatgagaatgtgatattttaaacttcatttttatttttaagcaaaaataatactggtattgattgagttcagcaggtcagatagtaacacagacctcagtaagctagggcgctgtctgcctttccttttcctgcttactgtgagccttggacccggtcccttttgtcttgtttattttctcactcaaaaatgcttatgtgttaactagcatctcacttagataaggagttaggagaattctcctatcgtcactcattttatagttacatgatagtcagtcagtcgaccttatcataagtaaatactaactagcttactctgctcataggattctctgtgttttttagattggtgttgtgagttcagctgtgctgtcttgcagacagatcattccagctggccttgactgtttctgccctcttggagggatagacagggtctcaacagttacctaacaactgctgtatgcaacactgccttaatggcaccaggtgaagctctggggaggggctgcaggacataaatggtgaggacataaacaggatggtcactcacaacaccagtgttctgacctcagcctctaaatgccagtttattgatctaggaaatattcctccacctttccaaagtgtcccttgagtgcggtacactgctacttttaaaagaaagcaatatgctctatagttgtcaagactaaaacaacagagtccgtggacgaagcaaaggtcagttagagactggtgagatgacccatcaggtgagcttgctagctttgatcgtcaatatttgtttctgaattctgtagcagagaggtatactttcctaaagctttatgttccatgactgtaggttagtcataaataataccttcctggctgacctcacaaagtttctgtgggtatcaaaggagatcatcagtgcgcatgcaccttgtacagtttaagtgcctctgtattattagccgttttgaaagttgactttaaatatgtttccatacttaaaatactcatgctgcttcttatatagagtagatatcatatccaaatgcatatgtaagaatataagtaaaagttctttggagattttaaatttctagtgaaatgaaagattttttttgtttcaaatttataatctttctgtaaggattatagttcacagggcaccatacttagcagatactcatgtggtgtgtgtgtgggtgtgtctgtgtgtgtgtttaattgaaacagaattatatcagccatttctaggaggactgtttcccatcaggcttcctggtattctggcttttacaatttttcagaccccaccctgcaatgttccctgagccataaatgcttgagttgtgatggatatatatccactgggtcagcagatactcttaataatatttaatcatctactaaaatctacatataggataatcttaataagatttaaatcttaatggttttgaaaagcatccattgtcttacagtttgctgggctgggtttcctgatgtttgcgttgtggtgcgggttctgttaaagcatttttaaagccataggagataacaattgcaagtttgcttttctgttcctgctcctaacatccacttcatggacatcagtgagagaacgctaaatgagcattctcatcccatggggagaagtttgcattaatttttagagtccttagggacagtctccattctccacagctttcttttgctactttagtctttccgtgctaccttctgttcactactctcattaaaaatgttctagcaaaaaggcaaggataaaaacatggcctaattaatggtataacagctgctttcatcttgtcactaatatttggttttaaataatcatgcttgatccttgtcttatgctaggatggctggtttcggatagctgagaatatggggtttcaatgcctaaagactgaaagcaaggatcctcggctagatggaatagactcactttctgggactgaaatccctctgcactacgtctgtaagctgaccactcatgccatccacttggtagtctttcatgagaggagtggcaactacctctggcatggtcacctacgactcaaaggacacatggataggaagtttgttccttttcgaaagttacagtttggtcgttatcctggagcctttgacaggtaaatctataacaataaacagtaataagtcaataatatgatatgtttatatttatatatacatgtatgtatagatacacacattgaagtattataactcagggaaatccactgtgattctgcagtagtgtggatgggtcccacagtggtgagtgtctcaaggcaaaaaagactgacaggatagaggtatactgtgttcgtggatgtcttagtcagggtttctattcctgcacaaacatcatgaccaagaaacaatttggggaggaaagggtttattcagcttacaattccacattgctgtttatcaccaaggaagtcaggactggaactcaagcaggtcaggaagcaggagctgatgcagaggccatggagggatgttctttactggcttgcttcccctggcttgctcagcctgctctcttatagaacccaagactaccagcccagagatggtcccacccacaaggggcctttcccccttgattactaattgagaagatgccttacagctggatctcatggaggcatttcctcaactgaagctcctttctctgtgatagctccagctgtgtcaagttgacacaaaactagccagtacagtggatatatttaaaatagaataatggtactgagactagtaaggaaaagttactccaaagcaagatagagtgtatccctggatagggaggtagagggggagctactgagtggggtacacagagatctctagggtaactggcaaatctcagtgtatgtgatgaaggtgagatcgcaagtgttgtaactcatggtcttacgtctttatgtcttatacatacacttgagtgtgtatgcatgtgttattattactttatttccaatatggcctgaggtggtggctcgcaactgtaaatcctagcactcaaggtgaagcagatttgccagccacaggtgaggctgggctaaataacaagatctggccagcctagatggaatcacaagacattgcctcagaaaactaagaaattataggaataaaactaaaaataatactgtgtattatatgatacccttaactatcacaatgataaaaataatactgtgtatagtagtatacccttaactatctaccaaaatgataaaaatactgctggcaagaaatgggtacctgatgagactcatgtaaaattagaccataaatgtcaactttataacccagagtagtacttttctttccctttggaagtcattaataatgatgttataatatgttaatatactagaccttgatgtaaatatagcaatgaatgtcttttgctttcaacttcgtcatttataagaattttcataacaaagtccttttggggcacttttcagagatacactgctcactgttatgccatagaactataaggcacatttattctgtcttcatcttagtgtttaaaactacccatgcgagaaagagctgaaaaggtggtcagaactggagaagtcaggaatatcgttggccaaaatgattccgggttgtcagaaacagtttgttgacatcttcggctacttatatttatgcattttttcttattttgtgttttaaacaggctttttaagtaagccatttagttcttcaactagtaaaagtttacttcaaagtttagttaataatttagttcaaaatcaccgaccaaaaaataacttgtgagtgtgacatgtgccagcctgtagataaagccgtctgtgtgctttatagtttcacatagaggagtagaaagtgcccaagcagtattcatgcgggtgggttgcaggcgtctctccggtcagcgaggcttctgggttaccatgattcacttggagtttataactgtaagaactgtaactgtaactgtttataactgtaactttaaaataagttagtaactgaaaatgatgtcattcaactttcatttctgcttaaaatgccagagtacctggaaaaactattgtagacgcagaggcctgtaatccagttacctgggaggctgaggcaggagggtagcaagttcagtgccagcttcagctatttaagcagagcttgttcccccccaccccccaaaaaaagaaaaaacttttaatttaaggtgctagggtgtagctcagtggtagcatgtacaaggccctgggttccatccctcgagggaaatcgattctccttcccctcagatttagctacataagtgaaaatacttaaaactcaaactctgtgttgctacttgatgtctgattttcaaggtcctaataaagttgctgattgatgcccaaaagatttgaagaaaactcacatgatgtttagcttctttgttggtgtttactgtcttaaaaggctggcagtgctctgggttaaatcttgatagtaaagtttctttttaacttttgtttttcaggccagagttacagcaagttactgttgatggactagatatgcttattccgaaagacccagggcgctttctagaagaagtacctcactccagatttatcgagtgcaggtataaggaagctcgggcgttcctccaggttagaaacaaccaaaacctgcatttctaagctaaagctaaggagaggatttgcttattttagtttataagaggagatggagaggcttctgcagactaggctcaaatggcttcttaagtcgatcactgattttcctctcatttaaagttaaacactaaactctgtttccccgagtgctggggatgtagtctagtcggttgagtacttgtctagcatgcacagggcttgagtttgctctccgtctccacatgaaccaggcatggtaacaggtgcctgtaatcccagcacttggaagatagtggcagagagttgaaggtgacgctccactatgtggtgagttcacaggcaaccctgaccaacagacgctatctcaaaagaaaacttgaattctgctggctaatacggcaggcttgtaaccacagccagcactcagccagagatctcaagttaaaagcagccctgaacctcacgcatgggcgcgcgaacacacacacacacacacacacacacacacacacacagaggcaggcaaacttttttcttccctgaatggagaatgatcatatacttattactttattgttttatttcattagatcctgataggattaacactggcttattccacagctatgatagctcattaactgttttaaagttactttttttttttttaaagaagtccaagttggcttagaatatagccactgaagaggggtcatgtgaatttagaaaggtttttttttttttcctaagtttggcactgagtatgtgtgtgtgtgtgtgtgtgtgtgcgcgtgcgtgtgtgtgtgtgtgtttggcaaagagctatacaaagaccggctgaattttcagcttttcctctactgttctaactttgtaggtttctgactgtagtgatataaaaatgattttggtgggcgtaaaagttcaactgtaacaagtcatatgagaccagaaaggcagtgaaaacaggccgttggactgtggggatttggtaccccagttctacttgcccttcactttctggggttctctgcctctcctcacagagatctgcctgcctctgtgccatcatggccagctctccagttcttcacttgagtgctggccccgattcccctcaggcatgagctgtgactggtgagctacacccttttctcccccaagttgccctttgattgtagtgtttatcacagtactggagagcaagctagagcacataggagctactaagtgccagctctttcattgctgccccaggtccaagactcaaatacaaggcttctcacatactgtatgctgatacccaagacagcccaagaggttcttctagctcttcctggtcttttgaatttattactgtaaggctgtcaaatttactgagcttcgtggtagaggctagagagcagcatgtgtgttaggcctgttgtgcaggcaagttctgcctccaccacacagtgataagaggtaggagggatggattcagtgcttcttcctgccctatgggcattgcccacctctgccctagcagttgccatggtgaattgtgagtgtcttgcttcctcctaattttgggagcttcctggtagcaggcgtcttagtttattcacgacagtcattgcagccatgtcattagtgatgcctgacttgttttcaccgctgcccttgtgatgtgcagtgactagagggcttggtcatggtcttactttatcctcttacattagaaccatgagtaagataccaggagtgtacactttcaaattaaagttggcatacacccatttgaacacttgatggcgccaaacagtcttaaatggttgtagagatgaactaatccaataaccctagtagagtaccccctagcattctcgtttgttttaataatgatattttaaaagcagtgtctgacttatgtaacagttgccagtacaatagaaataatgcctctttttttctggcacatttgagagtaatctataaaccagtatcccaaagcctcacatagcttagttctttctaaaaacacaacagaacaaaactagactatttcctatgtctgaacatgaaaatcaagaattaacataaattgcttttaatctcaatctaagctgcgtatgatggcacatgcctgtaatcttcatgtttggaaagccagggccggaggattgccaaaagttccaggcaagccaaggcatatggcaagaccaatttaaagacaacaacgaaagtccacattcacatcttgctggttgtcctcataataggtttgtattgaaaggattctgtttacaatcacatgctatactgatttcctgtttctttaatttcttgtagtctgtgctgggttctctaccagtttgggtaactactctcatagctttgataattttggaggttatattattttgtagactgtccctctggttttcctcataaagagcatggcagtgctgctatgcttgctcttctcattatgtcccagaaggtgctacctgaccccctgttactgcttctcgcctggcttttcctgaggaagcgtgaacaattagtgttcaccccagataggacactaacagcacactgaaaaccgattccacccgagtctagcgtggtgaacccctgagtttgttaaggttacttccgagaccatgggtgagaagttccaggagtctgatgtctctgtcagctgcatcaccacgaagctcacctctgtgtgaggaacacttagaaaagctgtgtaccctgaagttccacacagcaccagggggcatcatcagtctcagcacctactatgactgcctaggggcaaggccttggggatctcctgagacctttagttctcatgacttctcgagtcctgtggcctcccttctccctctggcgggaatgttcagaggaaggccacagaacactgctggggttgcatcctgcctcttacctgctgccttcacttttgtgctattgcatttttccctttgtaatcagaagcatttgtttgcaagctactttgtaactattaaaatattatatttcttatcaaatttattgttaagataagagactcatggtttcctgtttaatgagttattttaatcttcagattggtccacatttggccagttaaaaactcttccggatagcttttgtatcttctggcttatctcattctttcttccattttagtaaaatacagatattctaggctcatcctgtgattttcctatcccagctctggggtcagccatttctcctgagtccttgtagaagccgacatctggggagtaggtagtatgcccattgctctttgggttttgctgtacacagctgtctcacttaatagaaacattgtgcatatgtctgtatatatttatttctgtgtctatttgatgaaatctgtaaattcaaatcattatttccaccctgattaagttataagagctagctaaacaacattggataacctatcaggggactggagaaaactgtttgtccatctgttagcagccattcactgcctatagctcttcatctagggattagggccttatgagatttctcccatccacactgtaatgtcagtggtactcattgtacctgtagtcctgttgaggtgaccatattgttaaagtttgggggttcatgtcgtgtcctctatagaggatgctgtctgacagtgtgatcttttcactctgagtcctgcccctcttccatagaacagggattgggttgtacatgtattggctgagctaggcaccccacgttcagttctctgcattgtggctaactgtgactctctatggtggtctccatgtgacgtagaaagaagcttcattgatgaggggtgagagctatgcttactgtggctgcaaggcaaatactcgtattcagaattcagtagaattacactggcttaggaaaggggcagtagtaggttctcctctaggctccatgacctctttcctcccctggccgggtttacaaaaccaggcacgagatccttcctactgagcaagccttaagtccaattaggtggctgttggttactcccaagatgtaagtgccactgtggaatccttggtggcatctcgccatgcggctcattgatgtggtgtagggtttgtagttgagtaaggctgttactgcttttctcctttgcagtttgcatgagcaccttcagatgctatgagaggcagtcctcaggaataaggcttccaggtcatttttagctagattcctctgagtcccgtgaataaagtgtgtagtgtcttcagctagtgccttcccttcatgttctgaaaggcaaccaaggacaatggcttatatcgtttgggagtttcttggactcctctgatcaacagcttgaagaaaggtttctcataaggcaagaattttttaacagaaaggaaaattgtagcctcaagatatcacttaacactgtcatattggcttagcatgtagtctacatggcagctgggtctgtaaactttagctctaggcattccttataacaagcataggaacatatatctcccaatccagtcgtgtgctctaaaaaaagcagtggctcaggaaagggatattttatttcaggagattctttatagtttgcttaatccataagaacaatttacctgcaaggagcgctccttcataagacactttgttcctgaagagagccatttagtggttccattccttattgtcccagtgacatctctgtaaactgtatctctcctgcattcttgtaaaggaacccagttactttaggacattgtcagaagtagttacttcctcctttagtctccctacagtatttgctgctcacctcctcaggagcacacgacattccagcgttatagattccgtggggagaagtgcggtgcctgctctcgtgtgtacagcctcactgaggagactgagacaaaaccaacagtaacaactaaagtaagaatgaacatgcggggccagagagacagctcagtggttaaaagcgctggttctcctccagaggaccaaagtttgatgcccagcacccacgtggcggttcacaaccatctataacctcaagagatttcatgttctcttctatctccatggataccaggcatgtacatagtacacagacataaaaaatattaattttttaaagaatttaaaagtatgtgtgagtggtgactgttgtaggttaatggaggagctgactgatgtatttggctttgtgtattagtacatgatcagtgggaacactgggaaaataaactcacctgtcttttaggaaaactgggttatttctcagagactggatcgaaaacatgattttcattgtattcagagtcagaggcacactaaaaaagaaaacagcatataaggtcacataggctagaaaggctgtgccatattgcttttgtttgggtggttacttgattttgtttttgtttttttttttttgagatagggtttctctgtgtagccctggctgttctggacctcacttgctctgtagaccaggctggcctcaaactcagagagatcgtcctttaaaagcatgggccaccactgccgggctgagaagttgcattttattgctataacaggacatgtaaaaagaggctagtgatgaaggcagagcagaaggcaggagggacctgtgtccttgctcttctaggccaaatagcttacattttgttccatagtgagctatcactgaagaattcatcctgttttcttcagttacaggataaaatgcagtaaatccaaacaagcaacatgactaagtaaagatgatattatacaaaactgtgtattttacagaaggctttcacttagacctgtagagtggttctgcaaagcacagttactgtctttaagttataaataaatgaagtcagtagtggcaatgaaatttgcttcctccgttctcttgttcattcatgagacgtggagatactggtgtagacatgggtatttgatgtcttttcttcatcaagcttacactcttgtgaaaggagatggacctagagccaaacacaggttatctgattcagaaagtgtccttccctgcttgactacccagtgtctaaagagaagtaaatgactgtacaatggaaacatcatgtaatctattttgtttaatgcttctagctgtgtaattagctcttcttttcccccagctgcccagcctgctaaattctgatgtgcagagaaaagtgataacagttgaagtctcatcattggggaatactagttccttccattctttccttctaaagtggttcttctagaatctatcctaattgttttaatgtgtgactaggaaactctgatttctgggcgtgttgggtctatgagtttgtgcctgtgtatatagatgtatgggcacagttgtgcacttgtatctgtgaggccagaggctaacacttggtgtcttcctctactacatcttgtttctgtccactcccaagtctcctgcactcctgcccaatgcacccccttctgccttcatttccttcatgtttataatccacagaatccacttagtacttgtacatgcactttgacatgggccatccaccagagcttggacaagttagcagcagacacactccttcaccttaggttttagataggtctctcactaaacttggagctgctggagactggttggccagtgagctccagggatctgtctgtctgtccctacctgcacagcatgggtgttgcaggcacacacaccaacactcccagcttctatctgggtgtttaaaatccaggttcaggccctcatgctcccatggcaacacattacccactgagccaacccaggccccctaaatttggatttttttacaatggaaaaacgatgcactgttaatttctcaatttgattcaaatatcgtattagtgtttctagaagtttagggattgttataatagataactgtttgttaaccctgcagcagtacattgatgataatactgtggatgctatggtctttcgaaagagggcaaaggagttactgcaactagcagccaagacgctgaaggacctgggagtgcccttctggctgagcagtgggacttgtctaggtaaaaatgctttactttttctctctctgtctctggctttaggagtaaatgcttgtggtaatcaggcatcagtaatattgacagtgtactatttataatcagaataagcattagtgtacaaagcaaagatgcattgactgctttaaaaaagtaattgataaaatataaaatagaaccttctttaaaaagatttatttatttatttatttattttatgtttactagtgctctatttgcatgtacaccttcacaccagaacagggcatcaggtcacattatagatgattgtggaccatcatgcaagtgctgggaattgaactctgaacttctggaagagcagccaatgtacttaacctctcagccatctctccagccctataaaatagactctaaggtcacttgtatttactacaagttataatgtgtacaaatttacatcagacatgtatattatggttggttttcaggtgattcttaaattacctttgttatcctgaacacctttgttttctcaaatattattattgctttacattaaaataacaacagaaacgtttacattgcaggagacatttctagtgagaggaagattgaaggcatgctctgaggtcatccattagcatttctaggtcactgagggcatcactggtttggcatcaccactcacttgagatggggaaagatacttttgtagtcttacgcagcagctattaaactctggagaaggtttccagatacacattcattaggtcagcttcttggaatttagaattatgtagatccttaaggttgttctttttatctgttccttcgcaattattactgtaggtgatatctatgttttgattgtgactatatttgtacaaaggttaattcatcttttaaaaatgacaccatagaatttgatgtccaattcaggacacttagagactgaaaggaaatgccttaaataattgtacggcaggttgtaacctaggattcgtggctctcctacagagtaggttatgtgaaagattacacacttagactgggtgtggcacacacctgtaacccagcacaggaggtagaggcagaaggctcagaagttcaaggccatagctacatagcaagttcaaagccagtctgggatacatgagaccctaaattagaaacaaaataataaaaacataaaagatcacagtggtaatctcttgtatatatgatatttgctttaaagtttaactttttagagaagcaaggttgttttatagtcagtaattaaaaattcttagtcatttgtcatgattcgagtttttagcctcgagtttatttcatttataaaataagagaattgtatttgatggtactgtgtattaaatgatatttatagtatttaaggagccttcgattttacattttggtgggcggttttgtgggtgggtggggttaattttgttataattcaacaaataatattacccagtagcaatgcctatcagggtgcctatcagacatttccatacttcaaagccatttgaatagaaacattagaaggtaatagggaagactcaggagctattagtaatgttagggagtaagctttcttagaatcaacattctgaggcatctaaacaaggagatgcacaggaatcactgggaaatagctttgctggacatcagaccttaatcagatctttttaagtgaccattgcttatgagctgtttggaattgataagtgctataagttatggactcaggaaagtccattaagagaactaaatattcttagcacatcttaaggcagtctcagtcatgaaatgttaatgattaaactctgaacagcagttgtttaagtggatcatctgtttaccatattattaaaggtaatgatctatccagaagttattatggatcctgaaaactttttcttatttccataggattcattgtgtagctttggctgttttgaaactcactgtgtagaacagaacaggctggcctaaaggtgtgagccaccacgcctgacatcattaaagcctttgaggaagctgagtactcagaccagggaaataaagaaaaagggagagaaagagggagattggttcttcaaggaaacgcctagtcgtttagtttgggatttaacttttaaaaaataatcttgccaaagcatcccaactttaaccctatgaaatcatataaccattactataaagtttgttcattataatgactaattttccaaatataatttaagccttttatccccttcccctactttaggatggtatcggcagtgcggtattattccttacagcaaagatgtcgacttagggatttttatacaagattacaaacctgatattattttggcatttcaggaagcaggacttccactcaaacacaagtttgggaaggttggtaatagtcaaattaatattgtaaatagtgtgtctctattgtaaagtttaccttatctactgtatatatacttaaatttgtgacaaacatagttttatcacccagtacttatcaggataggcttgtggaagccattatcccttaagatttctgtgctccttaaagggaagctagaaaattcagccttttattaatagtgaagaaagaaggttctttggtccttgtaagaggctgtattgctgttttattaggcgatggtatggtacaaaattaatataaagctaagatatctgaagttattttttttttctgagtatcttattctatgaccatttaggacagatttcataataacatcagcacaaatatccattgcttgctaagggatagaaatttggagtcatgtcttgtcttactcatctgtcctaaggtgagcaacttccttagaagctagcaagagccagggcaccatggcctagatgaactcttactttacaccgtttgattactgttctagaagcccatgatcctttgtgataatcctgctcttaatttgtccacagaggagtattatcctgcaaagcaatttttaaaaaaaagggaaaagttcattcctggaaaattatttctcacaataggaaataatcattctaatttaaaaaatacacacacacacacacacacacacacacacacatttaatgttttctgcagccaagcaaagcaatagctttattcgttcagcagccacgtgccacgcgctggtgtgtggccctgtgctttgcagtggagcatacgcatggatgcattagcttttacttccgtgagggtcacatgagttgttaagtgatgctgttgaaggcacacacgcatcaagtccagcgtgaaccacacttttaggataagtttcctttcttctttagttagaaatgggcttgggaatatgatgtttccattttcccagtagagtgacagttttaaataccaggaggcatttactcaggaagttttgtcagtttaagaaccgttggtttatatgcatttaagaaaagttagtatagcatcccactttctgaagctgctatttcgcagaacttaaggttaaaatcccgtgcatcttagaattaatgctttctacataaaacattaacatatttccttttttaaaaaatgaaagtgtgttcctgttgtttcagtctgtaaaggttttcactctcctataggtggaagacagcttggaactatccttccaggggaaaaatgatgtaaaacttgatatttttttcttctatgaagaggctgaccatctgtggaatggaggcacgcaggccagaacgggaaaaaagtttaagtatgaatcagataagtgcttactaaacaaaaaggggctctgggggtcactccagaaacgagaaagtctgctactgtgctgtcgcttacctagagcccagctttcctgtgaagctctcagaactcactgtggggagtgcatgaggagggatcaccaaggctgctcagctgaggacttatgaccaaaatcttgagttaccataggacaaacagcaaaatatcaagcccacagcctaaggcagaagtatgtctgtcagagttatagcgcttgataatctatagcaatgcacaaacaactgttccagacagtggactctatagacttcgtattttcggccactgttccacatggcctccataatatacttgacagtaagaagtacttagcatagtacttagcacttagcaagttaacagcatgtaggattatcactgatgcagtcacctaatgtcatgattcttttatagttactatcattgctgctattggtagtcatgtgaccacaggcatcaatttgagtcattaagcaggaaggagactattctgtatacatagaggaggaattctagacttacagtgttgctgttcttaggttcatctatcctacgagggtccctgagtcttcacgtgaagattgtaaagtaaatttgttttggaggtttgagagtaatccagacctttttctgaaagtcataaattatctccaaattgactctcatcgtagagcatattctttaaacttttgttagttataaaaactactttgctttatgacaacaaatgctattgagtaaatccaattataaagtacataggaatacagatttttataggaagaaaaatgagccagagagatggtttagcaggtaagacacttcctgtcaggctaaacaacctgagttggatcattggggacatacatggtgggaggagagaccaactcccacaagttgtcctctgatagccacacatgcagcacactgtgcccactacaggtgtacatacaaacacaaaaaacgattaaaatttttaaatatacttagaaataagtaaattaatgagcatataagtgtcttggtcatggttattactgctgtgatgaaacaccatgaccaaaaagtgagttggggaggaaagggtttacactttcacactgtagtccatcatcaaaggaacttagggcaggaacctggcggcagaagccatggacggtactgtttaatcatggcttgctcagcccgctgtattataaaccccaggaccaccactcacaatgggctgggccctccccatcagtcactcatttaagaaatgctgtacagggttccctacagtgtgagcttgaggaattttcttaatggagcttcctccctctcagatgactttagcttgtgctgagctgacatcagctccccagctgaatagtaagtagtacctaaagttagttaggtgagggggtgggggttggaaatatgcacagtttgtctattcaaaatataacagagatgtgaaagttggtgtctagagttttttccttacagactgcacaccatagaagttaggatcccagagccagcttttgagtcccagctgtatgtgttacacaacagcaggtttcttatttggcctctctgcataaggtttttccactgagaagtggaaataatattagactttgccatgcagccttgttttaaggattaaaactattaatatgctgggagggattttaagagtgtcatgatatcctgaatgctattagctggtgttaataccactacagtaatagcaacaaaaaattatgcctttcttaggcttatgacagatgtactaatgagctcgttatgaagtagcttcgtctgctttttgagaagtcatgtaagccgtcactcttctgtcttagatttcccactaagggtgagtttgtcttctcccgggtgtggtcctgacccataatccccaaaggaggcgctcgtttcagccgctgcgcttctggtagagacaactttggttctcctcacagctcgttccagtcgcagtgtttgggaagtgtgaagcgctctcactaacggagaagtgagcagtgagggagctgtctgcacagatggtgtgcgtcccacacttcctgtcatgaaactatgaccttagaaggcagagaaaagaacaggggaggctgtgtagagtggtttctttggaagactccccaaccatatgccatagtcagcactatttactttaaggaaatacaggatgtaccacacggccattttcaaaggggaaaacctgaaactgtgatggggtccgcttcagtccagtgtaactcacacaccagctcaatgcagatgacaacaatgtattgtaatgaagctgctgctgatccatcagggccgcgctgggctgcagcaatgagccagactctcccagagtggttaagcttgcaaatcataagatccatgccaaatcattgtcacattctcctaccaatcaggatgggagtcggttcctgggcctgggaatatgaacgtttaaccctgtcagcaagatggagaagttgtccctgagatggctgaactctgacaactgtctccttaaaacagaagctgttcagctattaggaagcccccagctcccctggggcctgggaccttgaacctaatttctccctatgattaatggagtctgaaaacaatacggcagtacctaggacaagcttattttgctagtttccaataaagagtaagagttggtttttgtttttaattttatagtactgtttaaagcaaaacaaacaaaaaaccatgtgttgttcatgttgagaaaaaaaaaaaaaaaacctgtggaatgcttagcattttttgaaggaaggaactccatgggaaacgcttcttgtactacactgggctccacttgccttcagactgaaaaattgaaatctaagatttaataaaaattttactattagtagcaactgtaaagatggagttaccagaatgtctgctagatgtggcccactgtatatagttttagataattttatattacacgtgcttgaggaagcttaagacagtgatatgaaggtaattctgtctaaagctgtggaccattaataactgtgccactctctaacctcaggcttgttttgctcttcctaaatacttggcttaatagcataagtgagttgatccttgtcaagtacttagaacagtactgtattagccttaagtactgcttctgttaccgctactagattatcactactctgacttcctaaggtgctggcctggcacagagcacggcacctcaacaggtgctgatggcttagttaccctttaggtgagccttttcctcccaggtatcattcagtctttcgcttctttagtccccattaagtcttttggtttttccacttttatatcttctaaaggtatatattctgtaggtttcattttcaacattgtctatgtttctctcatctgcatttcatatatagagtccagatcaggagtagtaagacgtgatgacgctctaacagggtttatgaggggtggtgggagggagagggtaatctgtttaattttcctgcagactttgtaagcattattattagcattatataagcacaattatataattatacaagcataattattagcattattgccttctaacgtattcagtggaatgtacagataaagctatcttagcccaaagttcatggtaggaagttttttctttttaaattttattagcaagctgggcgtggtggcacacgcctttaatcccagcacttgggaggcagaggcaggcggatctctaagttcgaggccagcctggtctacagagtgagttccaggacagccaaggctacacagagaaaccctgtcttgaaaaaacaaacaaacaaaaaaaaacaacaaaaaatttattagcttgtattaattgtaaacagtaatgagtttcataagtgcattttatttcaaacatttgggtcaggacgccttttttttgttgttgtttttttgtttttgttttttttaagacaggttttctctgtgtagccctggctgtcttggaactcctgacagttaaataccctgttaggactgacattgtaaagtactgtttccattattttttgagctgctgattccctgtgggccttaaaccacctactgtgcttcagataatgtcatgaaaggcaataatcttcttcttcttcttcttcttcttcttcttcttcttcttcttcttcttcttcttcttcttcttcttcttcttccttcctcctcctcctcctcctcctcctcctcctcctcttcttcttcttcttttcttcttcttcttcttcttttcttcttcttcttcttcttttcttcttttcttcttcttctttttttgtcacagcagcaggtttggccaggcagtggtggtgagagcctcccagcacttgggaagcaaaggcaggcagacctctgagtttgaggccagcctggactacagttctattctagacagcctgggctacacagaaaaactctgtctctgaaaagcccaaaacaaagaacaaacaaaaaagcagaattgtttacacccacttgtaactcattaagttatatggcaactaacttaatagaactaattgcatgtggtttgaagttgaagcaaacaaacttttagatatatattttataaataacatttctaacctaaacaaaaatcagtaattatgaatttggaatagcaattactgcagactgggaaagggagcctaaagttggtccctacatgctgtatgcatggaccatattgatatgcacattaactgatatgtattagtcaaaagtaaagcagaaatagggtcatgttgtcatcatttggctatgctatatcatacaaagaaatctaatatccatgcagttcagatcttaagcaatcatgtcacatttttatgtagtatcctcagagctaagacccatccttcctcatcagctattgaactaataaatatggatgaagaaataaattaatagggttatgatatatattgccagattgtggtcccaaaaagttattaaaatttttgatagttaccaataataagtgatacttttatgctactgaattttacattgtaatgttggtctttgtaagactgttcctttgagtcattccccccatagcttttcattaatatagcatatcataaaacaggatcagttattgatgagaggttatgaaagttattacctggcaactatttcaaaatccataggctctttggtcccactagatacatatctcccactattttctagtctccatttcaaagttcagctatgaaacattttaacactttatattatatcattttaaatattagttgaccactatgtagaaacctctatctagactttatacaagtatgagtttaggacagtgggtccaggaagtctgttagccctggattcaagcctaagatcagtgtttcaacctaagcctctgagcttcagattttcctcaatgaggagaaagacactgcgtccctcacagcatgtactacttagttgcgtactgcaaagtcaccggttgtaggactcagctcacaatagctctcatctcttcctaattcctagaagtctgactcagtatcatctagtaattaaggggaaatgtattagtatactaaagtctaccgtatgttccaggaggaaggccgatttctgacacactgtgacagagagatgaattgtagacctacaaagggtaaaggttgacttagtacagttggagtggggattgctagtaagttaccttgagttgactcttaagaactggtgaagcgtaggagcgatgctgaggacgctagtgaacagcagttgccaaggtcttcatgctgagctgcagacgcactggctgattttcttatgcatatgtatgcataacgtggagttgcctggtcattcgatatatgtttcaccttaaggactttgctaagggattgttctttgccatccttcatgcggccatcattgtattataagacacgcacttgctgcacgttcttggcagcacttgatattctctttagtttttaaccatttttcttagatatgcattgttaccataccatagatttaatttccacttttttgtattcattgactagctctgttttgtggggaacttattagctatcttagtggttttcctctgagacatcagttctcttctcactaaccatagctctatgtattaaaaaatctccttccagtatgccctttattctttttcctctcaatagtagcttactcactgaaagttcttagtttcaatgtaattctgtttatcagtctttatgttcagaaccttggtgccctttttacacaatagtttcctatttgaggtaatgaaggtattttttggtcgtcttttagacactgttttttatgtaacaacataaagatcaagtttaacctccagactttattcgtattagttttttgttagtattctctttcggttccaagagtcagtccagtgtgccacattattttagactccttggcttttgatcctttattttaatccaggagtttaagaatgccaccagtgattccagattgccacccctcattgtcctggctcttcccagtcaacggcattgacttgctctctctgtaaagtttagtaccctgtagacatgatcttccctccctccgagttgtcatagatctcccctaagccccacacaagttctttctgctgagtgttttagagtcctttgcaaacctgtctgccctaaattacagataaagtccgtcttgataactctcaggctgagtgaaacctaggtgccgcttgactctgaatcagctctctgctgtgtggtgagcaggagaggtgaaagagtgaagctaggtcattgtgcttgtctctgtgttatggagttagcttcggagctgtccctcgtgcactcccagcccaaggctgatgctgtgctcctgtagctccagctctcaagaaacacatctgtctctgcaggacatacagccgcaaagctaaaaggcagacttgagtaatttctttaaatgaggatatttaaagtgttggcttttcccaagtgatcccatctcctgctctatttatatctttgtattttgtaatataccgattatatcctgggtctccgtaattgaatctccagacagggagggaggggggagcaggtgtaagaggaagactgagggagaaactgaagaggcagtttcttctaaagtgagccttgctttattgcaaggagaaaattgtactacaaaacatctatgggaagtcaaagttgtaattttttcaaacatgtattttgttaaacataattctgtaagatactaatttgatagtgtctaaagagacatttccattacaagacttatgtacaggtgttaacagttatattcagataagcagaatggtttggttttaaccatgctacccagacgtccaactgttcaccttctggtgagcagctgcattcattgtgtattcacacaatggaatactactgagtgctgaaggggaatgagttaccagatatactaacatggatgaaggaagtcagatgcgagggggacttaaactgtccattttcatttatttgaattgtcggctgagcatagtggtatgcatatggaattccagctcccagtaggctgagtccgaggactagccacaagctcaggagtgccccaggctctatctagaatcaaaaacgctcccatgcaggttctcttccgtataggattgaactcaggtcatcaggtatggcagcaagtgcctttgaccaccagccaccactcactggtttgctttgttttggtttggttttttggtttttcgagacagggtttctctgtgtagccctggctgtcctggaactcactttgtggaccaggctggcctcgaactcagaaatctgcctgcctctgcctcccgagtgctgggattaaaggcatgtgccaccaccgcccagctggttttttttttaatcacttaaaataaatgcatttcatcctgtaagattacacctcaaagcattaagttaggttaaaaatacaaaaatactttataattttgaaaaccgatgctaagacaaaatagtctgagattgcacattgagaagtagcactgtatgggccagaggcagtgaagttgaccaaggaagacctaattgcatgaaaaccttggcatctaattagacaaattaggtaacagactatgatttttaaaatccttttgaatctggcgtgaaatttgaactcctaactttaacctctctatctaattattacatctaaagagaaattcttcaaaaattatctgacagaaaataattatagctagaatcttaattttgtctactcattaataatataaattgtatttcttcctctgctgccttcatttttttctcgtgtgtgtgtgtgtgtgtgtgtgtgtgtgtgtgtgtgtatgtttatttaggagtagagaatgagacataagatctcagacactatttcagcctatgtcctggagagtatatcaattcctctatgactccttccacatggtatcacttgtggtagaattatgaaatgtttagtgaaagagactattttgtttttcagtttctttcaagacatggtctcactgtttaacactggctgtcctggaactcactctgtagaccaggctgcttcaaactcataagatccacctgcctgtgcccatcacattgggattaaagatgtgcaccaccaccaaccacctaacagtttttaaaaagaaatactcaccagcatgctgtgactgtgggttttcaagagttgagtctaatgcttggatgaatgtgtaagagcaggattgttaaacatatacagatttgagagtggaaagtatagagatgtcataatgagtctcattattatatatggttaatacatattaataggaaaatgaaatatgaaacaaaaaggaataggaactaattgtaatagtatggtctgaacacttagaaggctaaggcaggaggagtgaaagcttgagatgcaacaagagagtaccaggtgtgccttatcaataatacagggcagcagatgatgttccatagtcatataaaagctacaataataatgaatcaagttttagtgatcaacaattaaaagtcacattcagggcaaggcagaagtaacatttacaaatacttaggaaggctgagaaggttgaggcctcccagatctgtactcagagacatagtgaagaagccagaagtggtgctggggaggtggcacagtggtgaaagcatttaccatgcaagccagcagagcaggtaaaggaagcaagccaaaaaccaaaaaaattaataaagcagtaaacagtgtaagaggccaattccacctgttggtttgtttaaaaaaataatttaaaattttgtatagcatacatttagcacaattgatcaaggtgtgggagtggggttagtaaagataatatttactccccaaacccaagatgtctggccctttacacttctcgctgtctatgttgtgctaacaatgaaaaactactgcaggagacctagatcaagcatttcagcaatggggacaagatgtaagactgtgagcccaggtggaaacatgctaaaagaatagtttcctagtgcacacgcatgttagggtgattctttactgtaaaggattggagggaacacatccctgtgcagaaggcctggtatcccatccccagcctgccacaagggcttggagggcgggctgctgactgaattgatgtcactgaaaaaattctgtaagcaaaagtcttttaagaaaatttgtattaaaagggctatggggtgtccttgacttgatgaacggaagatagtgaaaaccgagagcgagcaccacgtttaatggtgaaactccagaagcctttccattacagtcagcagaagcagtgttcgtggactcctattaagtggaacgctggtgtttaggctctggaataacagataaagtgagcgaggatgactatacaagatgctaatgttaataaaccgtttgtgttgccttgaaagaagttctggggggaggggagtttggctgtgctcttgcaagtgtgtggaaaggtcaagtgcagttgtagttgatgggtctgtctcacttagcctccttaatgagcaccagtgaatacagtgatctgggctgccggaaacgctttcttctcatttcgcaattatgtccatacatagtacaattacgttgacaaaattattcttaactaccacaaagtggctttattggtttcaaggaattttggaggaaaataaacctatcctcctttctcgctcactctccaatccagcaactgtactaactgctattttaggaaaaagcagcacaaagtggttcaagttaggaacagatggggcagtttctgtggtagcgagatctcctaactgtgtagcctaagttagagtgccgtagtctaaattcaaacctgttcccattgtggatcccatcctaaggctttaaagtacagactgctctgccagacttaatcatagcttttaaatctaaggtaacacagagatgtaggatcaatcagtatttactggtgacccaggcaatgtacatggcgtgtgttgttctgtgtgacttcctgcccttctcctgtccatgtcctgacttcataattagttaaaatgttttatgggttgtttgcctctctattctaggatgctaagatattctttggttgaatagacagagcagagaaacaagaatcacggagggtttaggggatttggcagctgggggttgtgggaggggcaggtgtaggaacaaaagctaacactagagttggattgtttttgtatgattttcatggtgtgtctgcattttacatgtcctgggttggctctcagattcttcactgtcccaggcattgtatgtgtagtctgcagccttctacgacgtctgtcctaaagctgttgtctttccctctcagctgtatgaggagactgtagaactaatggttaaggagatgcttcctaaagctgttgtctttccctctcagctgtatgaggagactgtagaactaatagttaaggagatgcttcctaaagctgttgtctttccctctcagctgtatgaggagactgtagaactaatagttaaggagatgcttcctggctgctgttactaagggagatcatgtctgcctcacttcaggttcattgtgtcaacttgatggtgtgggacaggtggacattctgctgaccagcaagtgattgcggagggtggaggctgatgacagatgcttctgtctcatgacaaaatgagtaattccatggctatgagtgtgcagggtaaaattgggaccagcagatgttgcttctaagcagcatcttatttctttctcagtgaggagactttatgtgaccatcttctcagagaggccagctgggtggggctgtccgctcaccaccagtgcccattggcttttactgaggcgcttgctgctttctttagaatttattcagatggaccttcacatacgacttcatttcacttagtggtgagatgagatgttcaaaagcagaatccattctcggggttcacttagtggtaaacgtgataatcagatacctttcctccagttcactgctctgtctttagctttctagtatattaaactcttatggtccctattattgccatttcaggattaattactgaaaatcctttttgagttatgaagaaaaaaaattctcattaagaatcttaacacaaaatatagacctatgtaactctaaatagactaactacttttagttttcctttgtaatatatcatgtataattttacttaatctgaagtacctatttaaatattttgtgttttgaggcagggtcttatgtagtccaggctgccctagaactcactacatgactaatgctggacttgaacttatgatcctcacgcctttcgcttctaagtgccgcaattatagacatgtgtcactatgcccatcattatcaaagtacctttaaaatgcctatttttggttaattcataagcttacaaattcttacagttgtgtagcagatgcgagcgattcattttaatcagtattagacaggtttagagatgctctttagattctaagaggaaagggaggtagaaggtaaagctattgtctgtagagcaggggaaagcctagaggtgctattggattcagtccatatcccttggaacgccagagtatgcaagagaagaacgtgaccgttttttacatcttgtggaaactctgccatgacacctctttccctaggtttcccaacacaatcccagatctgattttgattgtctaatcttggtaggctcccatctctgtagcagtcactgtaacttagctagtaccaagcctggatttggtttagtttatagtttggttggtattttttctcatcttcggagcttatggatgggattaactctccttcagattggtagagactagaagaagactgagatagcattaatccaggaagacagaagggatgctgggcaggtttgaagatgcacagcagccaagttacttggtctaatgctccctgcttgcctatgctttgctgcaggtatctgtttcccaagtttacactgtgctggactgagtttgtagacatcaaagtgcatgttccctgtgaaacggttgactacattgaagccaactatggtaagacctggaagattcctatcaagacatgggactggaagagctcacccccgaatgtgcagcccaatggcatctggcctatttcggagtgggatgaggttatccagttgtactgagaaaactaagctcaggtggcacatttcccagaaagaaggcgggtaactgtttaaagcactactggttttttgcctgatgtgagagccaaagaagagaaatgacaagttagaagacagaaaaggttttctgattcatgggccatctaattagttctgccattcagcatttcctgaggagttgatgcaccaggtggaatacgaggagctggtgaatgagcgaatgccagcctctcttgtcctgttggtaagcactacagttttcttttgaaagaaacttactcaccctctgaagagctggtacacgatatgatgtattccatcataatttttaaaatgttaattaatctttatgctggaaagtgagctcatcggatgaagcttacaaaggatatgttagttaagaataattcactcctgcctgtcctcaggatttttagtgctgcttttaaggttgtagaacatgagttaatattccagtgagtgattagactttgtctcacagagaaaagatggtagcaaactcattttataagcagtgtggtacacagttggcttcaagcacagggggttctataagggaagatgagagcccatatcagctattgtcaagacatacactgttctcatatctgaagtggacagtgggtgcttagatgatgcttgaatgcctgacatcataggatattttccctgacctgcagtggtacttgctgataaatcatccagtcatgctatccgaaaggtgtgacatcccaaagcttactttccttatttcattttcaatcattcttagatttaaaaatggaagttattcatgaatatttttatattttatgaatgtataactcttctgcccttaattttaatattcacactaaatactaatagacatacctctgaatttttaaaaaaatactctttatttatttatcaaccatagctccatgtttaatttatggcctacataataatttatttagcataaagatatgactgttcttctattccaatattacttcaagtttccaaaatggaaggttaacatgaacctggaaactattcctttttccagatcactgtctttaaagcctgtgtccatctctagatttttcattctgctgtgtgtaagagggcaaggacttcctactgccaagtactgcacatgtgggaccccttgattttctttttcttctcaaaatacacccatgagtaggttggggtagctgtgcactctcagtgagagatgacacagtgaatgcctgtcttcctggcctggaaggggaggggctctgctccctgctgcttagggatgtgcttcagggccgccctgcagatctcccttggaatgtgtagtcactaaaacgaacaagagtagctgagggaatgggctggcagaaagtaaaagaaggaaagaaaaagaaaaacttggagccgggtttaatcccagcactcaggaggcagaggcaggcagatttctgagttcaaggccagcctggtctacaaagtgagttccaggacagccagagctatacagagaaaccctttctcgaaaaaacaacaacaacaacaacaaaaaaaaaaaaaaacccaaaaaacccccaaaacaacaacaaaaaaatgaaggaagtaacttaaagccagctacttccaaattttaatttcaacatgaaaactgtctttgttgtatgacaagcagcagtctgttaggatgcagcctctctgtaggaatattgtctctccatatgcatctcatcagattgctgtaattattagcaaacttgtacccaaataacagatcataatcagttctttcctagaaaataagtccatagaatatgtatccaagttttagatagccaaccctatatatttttatgcacctagaaacaaaacaaaacaaaacaaaaatcaaaaacaaaacaaacccagtaacaacaaccagataacagtgtccttgaggacaaagccaccctatctggagagggtcatttgcttgtactcaatatcaaggagtaggcgtgtttacatcacgttccttgagagctcccaccttctgccaggagatcttacccacccctgctccaggttcttctctcacgtctatcattggagggcaaggtctgctagtgtccagaatacaaactctcttggtcctgtgcagaggttctgcagtcttccctccatagacgatgggcaaacttgtcttcaccctggtttagctttagcttttaggttctgccccaccttggagaaagtttcccagaatttgcaggtgaggtttacgtctgaaaatacctccatgattcagtcatactgaagccagtgctcttgaccttggagctctgatgagtggcccaagaccttgggtcgggggtgcccagcacctgactgaccctttgcagatcagttttcttccctccctgagtacgctaactttattctcctaacgcgactactgtctgctgccatttgcctggcttgcttgaagataccttttatattaacttgttctcacgtcaccgaggatagtcccagggagaccctgagaagcagacacgttgtcagtttctgacagccagctacttccctaagcatggacaacttgcctctccttctcttggctacagttaccgaccttggccactgaggtaaaataatagtaactgaaaccgggcatccctaagagtagctgggatcaggtctttgtggagcctccatggcacctcagtgcgtgatgagttttccagcgtctcagtggcgtgtggggacaaaattgctgagcagagatattccttcttctccagaatcctcaggctaccttcttaccttgattgggttgggtgggggagacagtttctgtctgaagacattacctgtggtttctgactcttgaaatgtttaacggattaaatgagatgtataaggtgcttccattcaggaccagggttaagtaagtactcatgagacgtgccgcttcctcattcactgttccttcgtaacttggaagaccgcacaacagagttgcttagaaataaaattggagctgaggctctggtgagatggcttagcaggtgaaagcactgtcaccaagtctgacatgattttgatccccaggacccatatagtggaaggagagaacctcaaattgcctgtcctcaaatacacaggctctgatgtgctcggagctcctctccagcacaagaggacaccaaacacacacacacacacacacatgagtaaataaatataaagaaaagtttttactgtatctaagcattacaggtcaaattatgtgatttatgaattcagagtcattgctacgttacctccccctgaagcagagccggccggttctcatttagttgatcaagttgctgtcttctagtcctaacgcattgcactgtttcctttcaagcccagtcagattactcttaaactgtgtgcctagtctgatatggacttgcctttctgtaatctagctttgggcagcaagcatcactatatataatgatttgcagaaccaaagattttggaatgcttcgttttatttaactacctgctctgtatgaaatgtggcttagtggtacactaattgcccagcatgtgtgaggtctggattcagtacaaagcaccagaagtcagagaccgaaggcttaccacatgcttgggctccctagtgaataccagcctatcctgggctacagtgtaaggccctgtattgagggaggacaaaggaggggagagaaagagagacagagatagaatgagaataaatctgcccacagatttaggtttttatctaagctaggcaaaatagcaggatatataatgctattttaagtagtcagttgtaggcggcagaccaactcggtgtcaatgccttttgtgtaggaccaatcggcaagtatacattccctgagaagtttgttcccacaccttcagaacacctaggctaaaatgctgcttctataattcctggacctaacctaagagaatttctctgagggcccatttagtcatccagacttctgtctacttacgagtagctttcgcagaagggcactgtcatataaagtagtctgtcatgcactttacaaattataagcttgtacagccttatgacagtttattctaagcatgaaaactggttcatgagtttattaaatgtagctctgtcagcctgtggcatatgactgtgacacatgtatgtgaatcttctggacaaggttatgttttaaacatgaaatttcagtatatgcttaccagtttaatatttggttttatcttcaggtatagtttatggtactactgaaaatagttttaatattattactctgatctgaatttgtaatatacaatctactttgagatgattaataaaaatttttaatctcttgctcttttgtgtttgtttttgaaagtttaactagaaataaaaagcagttgcattggaaactggtaaaatagtaattgtgccacaaaatatgtatttctaaaattcaagtctggaaaccctggaagtctgtctacacacatacactgagatcaaaacttctcagtgacaaagtctaccacatgacacctctaatcatgcagagtgtggcttgtcagctcaggatagccaggaaaaacaccctctgaggagaagcctgtcatactttagcatcagagatctctagaaaggtcttttatagtagttgagtgtaagcccaactactgtaaaatatatatacctctggaggaagaagtgaaaggtctagtttatgcaaacccaaaagtctgtaaaggaattatgttcatctaaaaatgtcaagaacaggggtggtaagatggctcagcagttaagaacactagctgctcttccagaggtcctgagttaaattctcagcaatgatggtgtcgcgtgaccatttataaagagattagatggctttttctggcatgtaggtgtacatgcagacaaatcactcctacattaaaaaaattaataaatatttttaaatgtcaagaagaaaccaaagaagactatataaatggagggactgtgtcaagcattaggaaacttgaagatgtaaaatttgccaaaattgatgcatagatttggtgtgcaactcctatgataatctcagccatgattttctaaaattcgtatgacagatttacctagagtagctcaagcaatcttcagttctcagcatgcacatggcggctcacaactgtccttaactccagttccaggggatctcacaccctttcctgtttctatgggcaccaggcatatacatggcgcacatatatacatgcaagcaaaagaaacacatttaaaaaaaatcttcaggaaagggagggagacagtcagaggaggggaggcaagagaacaggagcagactaatgtggaactagatgtgagtctcctctcatcctaataggcctgcgatcttatacgggagctagacagtcccctgtgttttacagtgcagttgctctgtagagatatgacagatcttaaacccttgtcttctcatttgaaatccactggttacaattgctgccaattcttattactactggtctgaaaataattttttaaataataacttgaatccaacattttttcaaaatgtatatgcttggtataaaaaccacctggtgctacctctgcaagactgccatgagtttttacaagatggtgaatacagtctttttctggaagtcaagggtcaagtaactccaggtcttaaagatagcatcagaggtgaccttgtgaagttgtccagtgtatcagtgcagccccagctcatatatagcggtcatcagtgctgaccagcagcagctggaatacaagaatgggtgtgatgcccatgcttctcaggggcagggatgaggcaccccagcgcagagccacagcaacctgtcatctcatgtagtacagtgtgagctgtttcattcttattccaccagtaaccataacctctgccctgggacacgggtgccagcagctaccttcttgggactcatgacactcaggccaacaaaaccattgcagtccccagtggctacacagctggccagcccaagtctgcttcaaccatggcctgatcttcaaaaccttatcaagggactctccaagggagggtcaataatctcatgtccctgtgtgggcagaggaacagaagatcttcaggatcttcgtcttcatggctttgatcagggccataagttggtggtgtcttgtgtttggctctgcctccagggccccacatttttgaccccagtcttaactaccatggcctccatgaaaacttcagagtcctctcaagcatgagcctctgtgctccgggacctcctgcatgatccacttgatcttttcttgaacgagaagtgagtccgacttgaaaaaaggtttctatctccagaactaagaaacatgccccttatgttcaaggccatgaagacgaagttcctgaagctcttccgttcctctgcccacacaaggacatgagattattgaccctcccttggagagtcccttgataaggttttgaagatcaggccagggttgaagagacttgggctggccagctttgtagccactggggactgcaatggttctgttgacctgagtgttgtatgtaaaacccacaccatggtttgcatgcttaaaagctcaccctgagaaaggttcaatgttatactgggatcctgaatacccagtatagtcactggctggctaatacagactttctattggcttaaacccaaagtctgagcagtctcctctggtgaataccccacaacacttacctacctaagtaagtggctcctaccatgcactgatttcttggccagtatctccagatcttctaaaggttggcttaaggggatctgtggcccatgccctaatttcccctcctcctacagggctacgcaccccaacagctttcttcttaccttacggttctggctcacggtggctcctagagctagtcccctagatgtcatccaggcctaggaggagacccctgcttgggcagtctgtgggcttccagaggttgagctgcatggtgacttgtacagagaaagcagggccagctgaggtgttggtggagcatagaagagccaggtacggtaggccagcgctagcagaagaatagcacctctgttaggcatctgggtctaaatgccagagaccactcggcatgctcaggcagagaatctatctcagcatccaggcttcggggggcagatgacctctgctgtttgccgtgggaatcccctgagaaccgaaccaaaggaaggggaaacaatacagctgacaacccctgatcctctcacctctgctctgagagagatgccccatccatctaacccttacccccagcttcttacagtgatgctacagttattctgcccaatattaacttttacatataaaattatatagtaagagagacaaaagaccaaaagaaaaaaattctaaatgtatgcaatacatttatttatattatataattgttaggggcacccttaaaattcagatatttcagtcccaacttaactttcagtatgcaaaatattatgggatgtagaaacagaaccattaaatagccaattaaagtaaaatggaaaatatatgtgtaactactaatccaggggtgattgaatcattgttaagagagagcaggacaagaatgtttcgaaaagagagtgccatgtgtggtcaggaagaggtgtccatctactgccaacaccttaatatggatttctagctccataactaagaaaaagtccactatctacacaagaagtgtggaactttattaaggccctcacaatctaatgctgtagtggagaccatagtgttaacaaagaatggacactgatgagcaaagtaaagcaaaacaagccacacaaatatactatagatggtttatgggaagaggatagctttgcttcttcagcagacggaaacccagcaacaattagtgtagctgctaaatggttattctgataaatgtaatttaagacaactatagtgtgtgtgtgtgtgtgtgtgtgcacatgtgcatgcctgtcagtctgtggctgtgtacactaatgctagggagtatgtatgaggtcctgagcccaatctccagcaatgacagaaaataaaaattaaaaacccaaaacctttaaaaggttattatacaggctggagagatgtctcagcggttaagagcactgactgctcttccagaggtcctgagttcaatttccagctaccacatgatggctcacatccatctgtgatgggattcgatgccctcttctggtgtgtctgaagacggctacagtgtactcatgtacatgaaataaatctttgaggaaaagaaaggttctcatccatccatgtaaatcagtgatgaaagaaaagcaaaataaggcctgaagcactagctcagtgggtgcagagactgtgctttaaggattagaacttgagcttgaatgcacgtaccagcagacagccagggaaaggctagccctgggagttgggagcagaggcaggtggacttggtgggctgcacagcccagtcggtcagctctgggttcagtaagagatgttgcctttaaaaataaggtgaagagcaatagaggaagacactcaatgtcagtttctggcccctgtgcatgctgcttgtgctagtgtctcccctcccccaacgcacacacacacacacacacacacacacacacacacacacacacacacaaaactaaaaacctgcctcctaaaaatggagataagattatttctttagattttatcctgaagagtattaaatactatgagtttgtaaaaacaacatatatagtaggaattcaaaaagagaagcatagtagcgtggagagatcttcagcaattaagagcatttgttgctcttgtagaggacccaggttcaattcccagcacccacaaccatctattgctgagatcctagagttccaagtgatgtttagccagggaagcactgaacccaagatggctcagataaggtcactcctggcactagcctaccagtgccagcctcaaacagggctccaacatcaaaattactcatgggcagggtgagcagggaggcatcggttagtagtggtcttgctcagtagcacagaggacgtacgacaggacaaggcaaggcaaggccttgcacaggcttttgaaaactactttagaagtcagttgaatagaggtaagaaagctgctagtaggattttctgggttgtgggaaggacatgaaggcagtttttgaaatctaagaatcaagttgatgaggaagccctgtactccatgcagggcctgtgcttcactgtgcaggcaatgtgaagaagagacaagagacatgtctgcacctgctgcaaactggagatcagggaaggatggacttcacattcagagatggctctgtaaagatgctcaattctgggtctcaagttgcattctcagctcctgaaaccccaggctcagaagggtcacacattcctggagttgtgagggtggctgagatgagccactgaccttccgtcttctgttctatttgcccctctacacaaatgtttgggccttaaacaatcaggtgggataagtccatcatgttttcattcgtgccatttccaccgagccagagagtccgctgcctcagccagagaaagctcaaattcttactacaagtgaatggtgctgggccagccttgaatccctacaatggggcagtgggcagtgggtgggagctgaaccaggctcagggcagacggctgccattagggtggggtcttcaaaatgggtctgagacagcagctgtaacatttgtttcagatcgtttgcaaagacttcaaatcctcactggttaaaaagacagatacagtcttgagtggagaagtcagcactgatagctgtcactaaaggcagaggtgagaaccctgctgggaaagctagcttttctttgttgatctattttctttgtaggtcttccttgatcggatttaaagtgacatctcctagtttttctaagaagcttcctggaaccctctgctggatttgggggataaggaggccaggctttcatgtcctggtgtgtgtgtttgctttgggatttgtcagtgcctggggctctgagcagcttgagcctggcagagttcccccacctgcctaaaatacagcccagggggaacaggggcccctctcagcccaacccagcacctccactctttgctcctggaactgtggcctttattttaagtctggtcccctggggatggtgtggggaatgaagacagctgataagcctggcactattgactttatggggaatattcaatgtatttactttctacaagtaagctaccctcttatctgctgcccacagagcatctaaatcctgtccagggagccagtctatgagtcgtgttcttatacaaagaccagagaataaataggggaaaacagtcccacccacccctttctgccccggtacctgaccctgcccaccccacctcctttcccttccttttctccactgctctggggtttattgcttgaaaaacagacgcattaactgctccaggcctacagagttaaggccaagccagtcttgttttgaatggttggcaggcagcagggcacaccctgggctcggtaacctctaattggtaactatgggagaaaaaaatgcccactccctttaggcagttatttgcccactttatgcttcagtggtcaacatttgctctggacggaagtactcacctggcctccaagcacacatatatatgtgtgggtgtggatgtggctgtggatgtggaagggcaggtgttaccaaggagacagactgggtcctggagagtggaagtcattggtgaaatgctggatgctctagagaggctttggtttcgtgactggcatcgccttcctttggcccttggctctggatcttccatacacactgcctcaacgcagcactagtccaggtcactcaaaggggagaggggcagaatacagggctgagcaggcgaaaggaggcaattcagaatgttcattgccaacgataaacttgaactttgggttctccctgtctccaccctgttagcgctgggttacacaggcttatagcaccacaccaggttgtcggtgtgcagttgaaaggcagggctaggcgagcattctaccagctgagccacaccctcagccctcataccccttacttagaatacatagaatagctcacggagccaggcgtggtggcacacgcctttaatcccagcactcgggaggcagaggcaggcggatttctgagttcgagtccagcctgttctacaaagtgagttctagtacagccagagctatacagagaaaccctgtcttaaaaaacaaaaacaaacaaacaaacaaagaagaagaagaagaagaatagctcagggagtcttcataaaaactcttgaagttgatatttgcaatttatcattaagaaaactgatgcccggagagtaagtgttctgcctagaatgaccgatggtctgagcacatcgata

SEQ ID NO: 649 - DNA, 3250 bp, Mus musculus
gttttttctctaaactccaggcagcctcagggcactgccggagggacggctgattgcagatttctgatggccaaataggccacactaataggagcgctcggagaacaaagcaacagccagcgtacgccgctgcgcgcttgaccgcttctttgcgacagttgccgtaaagcgaggcctccgccgcagctctagagttagaagtatctctggtcacaggaaacaagattctgtttcatgaagaagatgaaaacaactgggctactgttaaaaaccacccaagagaacaccatagaccaatgagtagaatcaataagaacgtggtcttggcccttttaacattgacgagttctgcctttctgctgtttcagctgtactactacaagcactatttgtctgcaaggaatggaccgggttcatcaaaatccaaagggaatcgagttggatttgatagcacacagtggcgtgcagttaagaaatttattatgctgacatccagccaaaatgtgccagtgttccttattgacccatggattctggaatcaattaataaaaacttcgaacaagtgaaaaatgcttctcaaggcccggcttcagaatgcagatttttctgtgttccgagagacttcactgcgttcgcactgcagtatcacctgtggaagaatgaggatggctggtttcggatagctgagaatatggggtttcaatgcctaaagactgaaagcaaggatcctcggctagatggaatagactcactttctgggactgaaatccctctgcactacgtctgtaagctgaccactcatgccatccacttggtagtctttcatgagaggagtggcaactacctctggcatggtcacctacgactcaaaggacacatggataggaagtttgttccttttcgaaagttacagtttggtcgttatcctggagcctttgacaggccagagttacagcaagttactgttgatggactagatatgcttattccgaaagacccagggcgctttctagaagaagtacctcactccagatttatcgagtgcaggtataaggaagctcgggcgttcctccagcagtacattgatgataatactgtggatgctatggtctttcgaaagagggcaaaggagttactgcaactagcagccaagacgctgaaggacctgggagtgcccttctggctgagcagtgggacttgtctaggatggtatcggcagtgcggtattattccttacagcaaagatgtcgacttagggatttttatacaagattacaaacctgatattattttggcatttcaggaagcaggacttccactcaaacacaagtttgggaaggtggaagacagcttggaactatccttccaggggaaaaatgatgtaaaacttgatatttttttcttctatgaagaggctgaccatctgtggaatggaggcacgcaggccagaacgggaaaaaagtttaagtatctgtttcccaagtttacactgtgctggactgagtttgtagacatcaaagtgcatgttccctgtgaaacggttgactacattgaagccaactatggtaagacctggaagattcctatcaagacatgggactggaagagctcacccccgaatgtgcagcccaatggcatctggcctatttcggagtgggatgaggttatccagttgtactgagaaaactaagctcaggtggcacatttcccagaaagaaggcgggtaactgtttaaagcactactggttttttgcctgatgtgagagccaaagaagagaaatgacaagttagaagacagaaaaggttttctgattcatgggccatctaattagttctgccattcagcatttcctgaggagttgatgcaccaggtggaatacgaggagctggtgaatgagcgaatgccagcctctcttgtcctgttggtaagcactacagttttcttttgaaagaaacttactcaccctctgaagagctggtacacgatatgatgtattccatcataatttttaaaatgttaattaatctttatgctggaaagtgagctcatcggatgaagcttacaaaggatatgttagttaagaataattcactcctgcctgtcctcaggatttttagtgctgcttttaaggttgtagaacatgagttaatattccagtgagtgattagactttgtctcacagagaaaagatggtagcaaactcattttataagcagtgtggtacacagttggcttcaagcacagggggttctataagggaagatgagagcccatatcagctattgtcaagacatacactgttctcatatctgaagtggacagtgggtgcttagatgatgcttgaatgcctgacatcataggatattttccctgacctgcagtggtacttgctgataaatcatccagtcatgctatccgaaaggtgtgacatcccaaagcttactttccttatttcattttcaatcattcttagatttaaaaatggaagttattcatgaatatttttatattttatgaatgtataactcttctgcccttaattttaatattcacactaaatactaatagacatacctctgaatttttaaaaaaatactctttatttatttatcaaccatagctccatgtttaatttatggcctacataataatttatttagcataaagatatgactgttcttctattccaatattacttcaagtttccaaaatggaaggttaacatgaacctggaaactattcctttttccagatcactgtctttaaagcctgtgtccatctctagatttttcattctgctgtgtgtaagagggcaaggacttcctactgccaagtactgcacatgtgggaccccttgattttctttttcttctcaaaatacacccatgagtaggttggggtagctgtgcactctcagtgagagatgacacagtgaatgcctgtcttcctggcctggaaggggaggggctctgctccctgctgcttagggatgtgcttcagggccgccctgcagatctcccttggaatgtgtagtcactaaaacgaacaagagtagctgagggaatgggctggcagaaagtaaaagaaggaaagaaaaagaaaaacttggagccgggtttaatcccagcactcaggaggcagaggcaggcagatttctgagttcaaggccagcctggtctacaaagtgagttccaggacagccagagctatacagagaaaccctttctcgaaaaaacaacaacaacaac

SEQ ID NO: 650 - protein, 459 aa, Mus musculus
MSRINKNVVLALLTLTSSAFLLFQLYYYKHYLSARNGPGSSKSKGNRVGFDSTQWRAVKKFIMLTSSQNVPVFLIDPWISINKNFEQVKNASQGPASECRFFCVPRDFTAFALQYHLWKNEDGWFRIAENMGFQCLKTESKDPRLDGIDSLSGTEIPLHYVCKLTTHAIHLVVFHERSGNYLWHGHLRLKGHMDRKFVPFRKLQFGRYPGAFDRPELQQVTVDGLDMLIPKDPGRFLEEVPHSRFIECRYKEARAFLQQYIDDNTVDAMVFRKRAKELLQLAAKTLKDLGVPFWLSSGTCLGWYRQCGIIPYSKDVDLGIFIQDYKPDIILAFQEAGLPLKHKFGKVEDSLELSFQGKNDVKLDIFFFYEEADHLWNGGTQARTGKKFKYLFPKFTLCWTEFVDIKVHVPCETVDYIEANYGKTWKIPIKTWDWKSSPPNVQPNGIWPISEWDEVIQLY

SEQ ID NO: 651 - DNA, 87472 bp, Homo sapiens
aagctcgaactgggtggagcccaccacagctcaaggaggcctgcctgcctctgtagacttcacctctgggggcagggcatagccaaacaaaaggcagcagaaacctctgcagacttaaatgttcctgtctgacagcttggaagagagtagtggttctcccagcatggagcttgagatctgagaacggacagactgcctcctcaagtgggtccctgaccctcaagtagcctaactgggaggcaccccacagtaggggcagactgacacctcacacagccgggtacccctctgagacgaaacttccagaggaacgatcaggcagcaacatttgctgttcagcaatattcgctgttctgcagcctctgctgatacccaggcaaacaggatctggagtggacctccagcaaactccaacagacctgcatctgagggtcctgactgttagaaggaaaactaacaaacagaaaggacatccacatcaaaacccatttgtacatcaacatcatcaaagaccaaaagtagataaaaccacaaagatggggaaaaaacagagcagaaaaactgaaaattctaaaaatcagagcacctctcctcctccaaaggaacgcagctcctcaccagcaatggaacaaagctggatggagaatgacttcgacaagttgagagaagaaggcttcagacgatcaaacttctccgagctaaaggaggaagttcaaacccaacacaaagaagttaaaaaccttgaaaaaagattagacgaatggctaactagaataaccaatgcagagaagtccttaaaggacctgatggagctgaaaaccatagcacgagaactacatgaagaatgcacaagcttcagtagccgatttgatcaactggaagaaagggtatcagtgatggaagatcaaatgaatgaaatgaagccagaagagaagtttagagaaaaaagaataaaccgaaatgaacaaagcctccaagaaatatgggactatgtgaaaagaccaaatctgcgtccgattggtgtacctgaaagtgacagggagaatggaaccaagttggaaagtactttgcaggatattatccaggagaacttccccaacctagcaaggcaggccaacattcaaattcaggaagtacagagaatgccacaaagatactcctcgagaagagcaactccaaaacacgtaattgtcagattcaccaaagttgaaatgaaggaaaaaatgttaagggcagccagagagaaaggtcgggttacccacaaagggaagcccatcagactaacagctgatctctcggcaggaactctacaagccagaagagagtgtgggccaatattcaacattcttaaagaaaagaatcttcaacccagaatttcatatccagccaaactaagcttcataagtgaaggagaaataaaatcctttacagacaagcaaatgctgagagattttgtcaccaccaggcctgccctaaaagagctcctgaagggagcactaaacatggaaaggaacagccgataccagcctctgcaaaaacatgccagattctaaagaccatggatgctaggcagaaactgcatcaactaacgaggaaaatcagcagctaacatcataatgacaggatcaaattcacacataacaatgttaaccttaaatgtaaatgggctaaatgccccaagtaaaagacacagactggcaaattggataaagagtcaagacccaccagtgtgctgtattcaggaaacccatctcacatgcaaagacacacataggctcaaaataaagggatggaggaagatctaccaagcaaatggaaaacaaaaaaaggtaggggttgcaatcctagtctctgataaaacagactttaaaccaacaaagatcaaaagagacaaagaaggccattacataatggtaaagggatcaattcaacaagaagagctaactgtcttaaatatatatgcacccaatacaggagcacccagattcataaagcaagtcctgtgtgacctacaaagagacttagactcccatacaataataatgggagactttaacaccctactgtcaacattagacagatcaacgagacagaaagttaacaaggatatccaggaattgaactcaactctgcagcaagtggacctaatagacatctatagaactctccaccccaaatcaacagaatatacattcttctcagcaccacaccacacttactccaaagttgaccacatatatggaagtaaagcactcctcagcaaatgcaaaagaacagaaattataacaaactgtctctcagaccacagtgcaatcaaactagaactcaggattaagaaactcactcaaaaccgctcaaatacatggaaactgaacaacctgctcctgaatgactactgggtacataacaaaatgaaggcagaaataaagatgtgctttgaaaccaaggagaacaaagacacaacataccagaatctctgggacatgtttaaagcaatgtgtagagggaaatttatagcactaaatgcccacaagagaaagcaggaaagatctaaaattgacaccctaacatcacaattaaaagaactagagaagcaagagcaaacacattcaaaagctaacagaaggcaagaaataactaagatcagagcagaactgcaggagatacagacacaaaaaacccttcaaaaaatcaatgaattcaggagctggttttttgaaaaggtcaacaaaattgatagaccactagcaagactaataaagaagaaaagagagaagaatgaaatagacgcaataaaaaacgataaaggggatatcaccaccgatcccaccgaaatacaaactaccatcagagaataaacacctctacacaaataaactagaaaatctagaagaaatggataaattccttgacacacacactctcccaagactaaaccaggaagaagttgaatctctgaatagaccaataacaggctctgaaattgaggcaataattaatagcttaccaaccaaaaaaagtccaggaccagatggattcacagccgaattctaccagaggtacaaggaggagctggtaccattccttctgaaattattccaatcaacagaaaaagagggaatcctccctaactcattttatgaggccagcatcatcctgataccaaagcctggcagagacataacaaaaaaagagaattttagatcaatatccctgatgaacatcgatgcaaaaatcctcaataaaatactggcaaaccgagtccagaagcacatcaaaaagcttatccaccatgatcaagtgggcttcatccccaggatgcaaggctggttcaacatacataaatcagtaaatgtaatccaacatataaacagaaccaacaacaaaagccacataagattatctcaatagatgcagaaaaggcctttgacaaaattcaacaactcttcatgctaaaaagtctcaataaattaggtattgatgggacgtatctcaaaataataagagccgtttatgacaaacccacagccaatatcatactgaatgggcaaaaactggaagcattccctttgaaaactggcacaagacagggatgccctctctcaccactcctattcagcatggtgttggaggttctggccagggcaatcaggcaggagaaagaaataaaagatatttagttaggaaaagaggaagtcaaattgtccctgtttgcagatgacatgattgtatatctagaaaaccccattgtctcagcccaaaatctccttaagctgataagcaacttcagcaaagtctcaggatacaaaatcaatgtgcaaaaatcacaagcattcttatacaccaaataacagagagccaaatcatgagtgaactcccattcacaattgcttcaaagagaataaaatacctaggaatccaacttacaagggatgtgaaggacctctttaaggagaagtacaaaccactgctcaacgaaataaaagaggacacaaacaaatggaagaacattctatgctcatggataggaagaatcgatatcttgaaaatggccatactgcccaaggtaatttatagattcagtgccatccccatcaagctaccaatgactttcttcacagaattggaaaaaactactttagagttcatatggaagcaaaaaagagcccgccttgccaagtcaatcctaagctaaaagaacaaagctggaggcatcacgctacctgacttcaaactatactacaaggctacagtaaccaaaacagcatggtactggtaccaaaacagagatatagaacaatggaacagaacggagccctcagaagtaataccacacatctacaactatctgatctttgacaaaactgataaaaacaagaaatggggaaaggattccctatttaacaaatggtgctgggaaaactggctagccatatgtagaaagctgaaactggatcccttccttacaccttatacaaaaattaattcaagatggattaaagacttaaatgttagacctaaaaccataaaaaccctagaagaaaaccaaggcaataccattcaggacataggcatgggcaaggacttcatgtctgaaacaccaaaagcaatggcaacaaaagacaaaattgacaaaagggagctaattaaactgaagagcttctgcatagcaaaagaaactaccatcagagtgaacaggcaacctacagaatgggagaaaatttttgcaatctactcatctgacaaagggctaatacccagaatctacaaagaactcaaacaaatttacaagaaaaaaacaaccccatcaacaagtgggcaaaggatatgaacagacacttctcaaaagaagacatttatgcagccaacagacacatgaaaaaatgctcatcatcactggccatcagagaaatgcaaatcaaaaccatgataagataccatctcacaccagttagaatggcgatcattaaaaagtcaggaaacaacaggtgctggagaggatgtggagaaataggaacacttttacactgttggtgggacagtaaactggttcaaccattgtggaagacagtgtggcgattcctctgggatctagaactagaaataccatttgacccagtgatcccattactgggtatatacccaaaggattataagtcatgctgctataaagacacatgcacatgtatgtttattgtggcactattcacaatagcaaagacctggaaccaacccagatgtccatcagtgatagaccggattaagaaaatgtagcacatatacaccatgaaatattatgcagccataaaaaaggatgagttcatgtcctttgtagggacatggatgaagctggaaaccatcattctcagcaaactatctcaaggacagaaaaccaaacatcgcatgttctcactcataggtgggaactgaacaatgagaacacttggtcacaggaagggggacatcacacaccggggcctgttgtgggatgggagcaagggggaggcgtagcattggtagatatacctaatgtaaatgatgagttaatgggtacagcacaccaacatggcacatgtatacatatgtaacaaacctgcatgttgtgcacatgtaccctagagcttaaaatataataataaaaaaaataagtaaataaaaaagaatatgcagtgctgctcttcactgtagaaagagcctgagaattatcttgaactccaaatcctgtaccttttttcatcacagttgtgtatgggttttatctactactagtttttttccaagccttttcacatcttgacacatagtaaatttgaccaagaaaagatgaaaggaaacataaaagaatgtgttcttggctggagatgacctactcttggggtctagctgccccaaagactgagaggattgttaactctgacacctataacccattcatgatttagttggtaagcagatctgcccatttctttcttcttcattgccagatctcagttcatgcactagttatgccctgcttccacttcatctaagaataattctgtgtcgcaatataccataattatatattaatcttctcatatttgcattagaactttaagattattgggctacttaaacttcgtaactcccctcgttacatcttttttttccctgaaaacatttgtcatttctctcccaaccactgcctcattttaatttactatctctgcaatactttttcttttcttttccattagagatgatatgctgtcttctttaggaaactttacctaagtgtaagtaaggaaatgaatgctatcctccctagtgtttttattatgatagctaaaatgtaacatataaaaagaagtgtatatagaaacaatatttttgttttagttctatgccatatctctctataggttattttttatatttttaaacgtttattttttgaaggttggaaccagatatgtgagtttaaggggctttaaactcttttaaaaatcttttttttttatatttcaaattctgttttattgtaaaagttcctgcagaacagaaaagttttatttaaatagttttctgttttcttgagcattgtgcagtgtatttttagtatacttagcatacttactattacttgatgttaattcagccaattttaggctggtggggaagatgattcatgtacactaacagttataatgcaaaatagaaactagtaaaagcctcaaggttagttgcctctccttgtgcttccatagtaacccgtgcttattccttcattgcaactatactgtattgttattgcctctatatttatctctgatagagtccatcataaactagaacagtggttcttaattgatgtgggggtggtaaggaatggggcttgcgcattttggaaaacatcttctcatattctttttcaggtacatcactctctccaccactatcactactgcccttcttcttttgaaaactcctgtactcacctttaagcccttcaaaattagggaagtgtatcttatttgtcattttatctctagtgcttagcatttttttttggcatctgtgcccattaaggtagacagtaactgtttatttgttgcaggaaggtaaaactaggttggaggtggagggagcacttctaacctggaagaatattgaagacttccttgaagaagtgtcatttgagaggagctatgaaaagaaagtaaactggttttatggaagtaaatgagaacattgcagacaagaggtaatgggcaaaaacacagaggcaggaaagtgtaggatgtattccaggaatactcatgcaaaaaccatagactatgtgaagtgtgagaaagcttatagtaaatttgcctgtattcagtcagattgtgaatacccctttataccattatatgtaatttgaactatttgtaggtggtagggaactattgaaaagttttgattgtggtgtaacttgatttatctgtcagcaacttgatacatctgtcagtgtataggtaagattgtggatacagagaaagtggagacagggacatcagttaaaattaggacattaggtacaattagagtttagaatgacagtgaagaaggaaggaattgatgcaagaggtattttaaaggtaaaatcaacatactatggcttctttttttcagtatcacattattcatttttaagtggttactgaatattcctaatgaagcggtagtgctagtgaaaaggaacattttgataggcgaatctttctcttttgtgactgaattgccttggcatttatagaaaataaataatgaagttaattggatatcatcttgataataaaaatgtaattaagtttttgatattatggtttggaggtttattttataagaattagttgtaaactagagaagaaagaacaagatattaatttagattttatgcctgtagtagcttatataggcaggcctattatgtgttctttcccatttattaatttgggcttagaagaagctgagttatggcctactctgagtgccactttagatttcactaggaatcagcatagaatacattaatgcactgtttaatacaagtacaagaacttgagttgaaatcttgaaaatgaagggcagtctccttgttaatcttgtgagctgccctcatcagagtataggttgagcatcccaaatctgaaaattcaaaatctgaaatgctccaaaatctgcaacttttgcgtgctaatatgatgctgaaaggaatgttcattggagcatttcagaattttggattagggatgttcaactggtaagtgtaatccaaatattctggaatcctaagaagtccaaaatacttttggtcccaagcattttggataagggatactaaacctctatttgataattgtatttccatgggttttaactgaatacaaaaactaataccatcatcaatgttgattgatattgttttcacagttttgggagatacaaaataattatgatttattaggttatctttgcttaatatacattactgatcaggtgaattgttcacatcactattggtattatttctcttaagtagtttcttgagactgtatatatatatatatatatattttagtgtttgctttatatagtcatcagctctggcagctcatttggattgttttaaaaccccaaaccaagacttgattttaagatggtaaagacatttgtgccctattctatctgaaattaccatgaaacaacaaggaaactgagagaaagagatgtaattacatctttgctgagactagaagacctgtaactccaaactgaaatatttgagaaatggcagccacatgtaagcaggaagaggttaaaagagaatgctggtagaaagagatctcagatagagctggcagagcaaagagtcctcttctgtttgcagtgggatcaggatgcatagaaaggcaatgggaatttccttggattgtttggcaacatgaactagcaagaaaggaagagtgaatgaggaagtgcacagataccccatctttgcaggaagcactctcttgctgaggcaaagtagaggagagatagtgagtggccctttgctgcctgtctctgacatctggaagaagtaatgtttaaatgcttttcccacttgttctcatacacattctctgcctttctcacatatacacatgtacaaaatactctgtcagaaagagttttcttgtataccagagactaccctctagtctagaatacacccttatttctttcttccatagttaaggcgtaaattatattcccgtttagaaaagtagatgaggactgggtgccgtggctcatgcctgtaatcccagcactttgggaggctgaggcaggtgggttgcttgaggtgaggagttcgtgaccagcctgaccaccacagaaaaaccccgtctaaactaaatatacaaaaattagccgagtgtggtggcaggcacctgtaatcccagttactcgggaggctgagataggagaattgcttgaacccaggaggtgaaggttgcagtgaactgagatcgtgccactgcactccatccagcctgagtgacagagggagactctgtctcaaaaaaaaaaatgcttaattgtagttctgaaaatagagaattcaatgttataacagaaaaaatatttaagaaaaccttctgcaaagaaaagacatctttaggtcaggctcagtagtagctcacacctgtaattccagcactttgggaggctaaggcaggaggttctcttgaggctgggagtttaagaccagcttgggcaacatagcaagaccctgtctttacaaataaatttttaaaaaattagctgggcatggtggcacatacttttactcatggctactcaggaggctgagataggaagatcacttaagtgtgggagtttcgggttacaatgagctatgattgcaccattatacttcagcctggacgacaaagtgagaccctgtctcaaaaaaaaaaaaatctttattctacagattgaaaggaaacacactgaatgaggaaaaactaacatacggtcatcaacatccttgtataacctagtttttaaaaaaattggatttcaaaggtaaggaatgcattctttgctcatcccaataaaaagattaaactacctatcaggagttggtttgggaaatcagatattgtcaagggaatatttagcactacaggacaatggtacaaagtgtgtaagtcattggggaaagacagtgtaacctcaaagccaaattgacaactatttttgaacaaggcaaaagctcaaggtaagtggtacccctaagttctttttgataaactgcaagaagatgaatatcagtcatacagtagatgaacagagatgatatagcaaatggattggcagggaacattgtaggaataagaccaaaataactatgagatttgtagttatagaatacaatagaactgtaacatgtagaaataattaataaaagtcaagattgaaagaggagagaagacagaatgtagtataaatttgttggtttcttcttattttatagctggagaacaaaagacatataaaccttagatatcaagcataagagaggtgtcagtatatttgaaggattgaaggaataaatgtaagcatttgaagaactaaatgtgtttaaccaaaatcaaacagtggagacaaggtaggaagaagtagaactgtattaaatttcttatcctaaaggaataatcagagatgagacctaagatgaaagaacaaaatgtttattgtggcattctttacagttgaaaaaactgaaaacatacatggagtataaataaaaactgaccacatcctagatcacacacaaacttgaaaagcaacaaagagctgtcttacaggccatgttccttgactaaaaacggtctcagtttctcctttggaagtggttctcagcattgtcagcagcaccagcatcatttgggaacttgtcagaaatgaaaattctgaggtctcataccggatttactgaatcagaaactggaggagaaaagcacctctcaaccttgttggtcagtttttataaatatcctatttatgttttcagttatttacagttataaaaaaaagtgataataaacatttttgttttttcatcattggtctcatatttgattatttctttagcatagacaatgaccagatcaaagaatgcctgtggaaatttaattttttctttgttctattgttggttattacaggtacaaaattaaagaggtttttgtttctttaaaaatatcttttttgttcacagaaaacaaaattatcttcctttccaaatccaaaaagatgaaaacgactgagatactttcaaaagacaaccaagtgagcagcacagactaatgagtagaatcaataagaacgtggttttggcccttttaacgctgacaagttctgcatttctgctgtttcagttgtactactacaagcactatttatcaacaaaggtaattttattccttctttcttatcattcctcctttcttatcattgtatattttctgatcacacttctctttgcaatacataatattaatcatgggtattcaaattcttgcatctttgcgaggtgtggcaaacaattaaaaattcagttaaatatacttgtaatagcacactaaagacaggtgctaagtttcaaggatgtttaatctattggaatttcctgagctagttatttaaaaattattattttgttaaacagattatccttcatttaaatgaactcaatgataaataattttgataaaatgtcaaaattagtttattttagtacagcatatattttaatttagtacctactggggaagtataatggtatgacttacctttatctgtatgtataggaataaagtagagacaatgatgtggaaatcaatagcttctgaagattccgtagaatataccagataaggaattccaaagttgagatggtgttgttacattgtgaaaagttgccaaacactccctctggggtgtattataataattactaccatcactgataattgtactagatgctttccatgctcagtttagtcctaaaaacaatcatggggaagaaaaaaaattttttttgtttttatgtttttatcctcatgtcttaattagaactattcatcagaattaatcactttgcgcccctcctcaactagaatggagtatacttccctgccttttttatgttgggcttgaccagtagaatgttaacagacatgtgcagaagctttgaataggctgttgtgatttgacttagtttttatgctcccctgacctataggagaagagaaaaatgtatggagcagaccaaagcatagctgcccagctgactcacagatttgtgagggaggaaatagatgcttataagccataagactgggggaagtttattatgcagcattgttacatggagttattagacctaattttgacagataagaaaactgaaacttttcttttttttttttttttaattaatttattttttttattatactttaagttttagggtacatttgcacattgtgcaggttagttacatatgtatacatttgccgtgctggtgtgctgcacccactaactcgtcatctagcattaggtatatctcccaatgctatccctccccactcccaccaccccacaacagtccccagagtgtgatattccccttcctgtgtccatgtgatctcattgttcatttcccacctatgagtgagaatatgcggtgtttggttttttgttcttacgatagtttactgagaatgatgatttccaatttcatccatgtccctacaaaggacgtgaactcatcattttttatggctgcatagtattccatggtgtatatgtgccacattttcttaatccagtctatcattgttggacatttgggttggttccaagtctttgctattgtgaataatgccgcaataaacatacgtgtgcatgtgtctttatagcagcatgatttatagtcatttgggtatatacccagtaatgggatggctgggtcaaatggtatttctagttctagatccctgaggaatcgccacactgacttccacaatggttgaactagtttacagtcccaccaacagtgtaaaagtgttcctgtttctccacatcctctccagcacctgttgtttcctgactttttaatgattgccattctaactggtgtgagatggtatctcattgtggttttgatttgcatttctctgatggccagtgatgatgagcattttttcatgtgtcttttggctgcataaatgtcttcttttgagaagtgtctgttcatgtccttcgcccactttttgatggggtggtttgtttttttcttgtaaatttgtttgagttcattgtagattctggatattagccctttgtcagatgagtaggttgcaaaaattttctcccattttgtaggttgcctgttcactctgatggtagtttcttttgctgtgcagaagctctttattttaattagatcccatttgtcaattttgtcttttgttgctattgcttttggtgttttggacatgaagtccttgcccatgcctatgtcctgaatggtaatgcctaggttttcttctagggtttttatggttttaggtctaacgtttaaatctttaatccatcttgaattgatttttgtataaggtgtaaggaagggatccagtttcagctttctacatatggctagccagttttcccagcaccatttattaaatagggaatcctttccccatttcttgtttttctcaggtttgtcaaagatcagatagttgtaggtatgcggcattatttctgagggctctgttctgttccattgatctatatctctgttttggtaccagtaccatgctgttttggttactgtagccttgtagtatagtttgaagtcaggtagcgtgatgcctccagctttgttcttttggcttaggattgacttggcgatgcgggctcttttttggttccctatgaactttaaagtagttttttcgaattctgtgaagaaagtcattggtagcttgatggggatggcattgaatctgtaaattaccttgggcagtatggccattttcacaatattgattcttcctacccatgagcatggaatgttcttccatttgtttgtatcctcttttatttccttgagcagtggtttgtagttctccttgaagaggtccttcacatcccttgtaagttggattcctaggtattttattctctttgaagcaattatgaataggagttcacttatgatttggctctctgtttgtgtgttgttggtgtataagaatgcttgtgatttttgcacattgattttgtatcttgagactttgctgaagttgcttatcagcttaaggagattttaggctgagacaatggggttttctagatatacaatcatgtcgtctgcaaacagggacagtttgacttcctcttttcctaattgaataccctttatttccttctcctgcctaattgccctggccagaacttccaacactatgttgaataggagtggtgagagaggacatccctgtcttgtgccagttttcaaagggaatgcttccagtttttgcccattcagtatgatattggctgtgggtttgtcatagatagctcttatcattttgaaatacgtcccatcaatacctaatttattgagagtttttagcatgaagggttgttgaattttgtcaaaggctttttctgcatctattgagataatcatgtggtttttgtctttggctctgtttatatgctggattacatttattgatttgcgtatattgaaccagccttgcatcccagggatgaagcccacttgatcatggtggataagctttttgatgtgctgctggattcggtttgccagtattttattgaggatttttgcatcaatgttcatcaagaatattggtctaaaattctctttttttgttgagtctctgcccggctttggtatcagaatgatgctggcctcataaaatgagttagggaggattccctctttttctattgattggaatagtttcagaaggaatggtaccagctcctccttgtacctctggtagaattcggctgtgaatccatctggtcctggactttttttggttggtaagctattaattattgcctcaatttcagagcctgttattggtctattcagagattcaacttcttcctggtttagtcttgggagagtgtatgtgtcaaggaatttatccatttcttctagattttctagtttatttgtgtagaggtgtttattctctgatggtagtttgtatttcagtgggatcggtggtgatatcccctttatcgttttttattgcgtctatttcattcttctctcttttcttctttattagtcttgctagtggtctatcaattttgttgaccttttcaaaaaaccagctcctggattcattgattttttgaatggttttttgtgtctgtatctcctgcagttctgctctgatcttagttatttcttgccttctgttagcttttgaatgtgtttgctcttgcttctctagttctcttaattgtgatgttagggtgtcaattttagatctttcctgctttctcttgtgggcatttagtgctataaatttccctctacacattgctttaaacatgtcccagagattctggtatgtcgtgtctttgttctcgttggtttcaaagaacatctttatttctgccttcatttcgttatgtacccagtagtcattcaggagcaggttgttcagtttccatgtagttgagcggctttgagtgagtttcttaatcctgagttctagtttgattgcactgtggtctgagagatagtttgttataatttgtgttcttttacatttgctgaggagagctttacttccaagtatgtggtcaattttggaataggtgtggtgtggtgctgaaaaaaatgtatattctgttgatttggggtggagagttctgtagatgtctattaggtccgcttggtgcagagctgagttcaattcctgggtatccttgttgactttctgtctcgttgatctgtctaatgttgacagtggggtgttaaagtctcccattattaatgtgtgggagtctaagtctctttgtaggtcacacaggacttgctttatgaatctgggtgctcctgtattgggtgcatatatatttaggctagttagctcttcttgttgaattgatccctttaccattatgtaatggccttctttgtctcttttgatctttgttggtttaaagtctgttttatcagaaactaggattgcaacccctgcctttttttgttttccatttgcttggtagatcttcctccatccttttattttgagcctatgtgtgtctctgcacgtgagatgggtttcctgaatacagcatactggtgggtcttgactctttatccaatttgccagtctgtgtcttttaattggagaatttagtccatttacatttaaagttaatattgttatgtgtgaatttgatcctgtcattatgatgttagctgctgattttcctcgttagttgacgcagtttcttcctagtctcgacggtctttacattttggcatgattttgcagcagctggtaccggttgttcctttccatgtttagtgcttccttcaggagctcttttagggcaggcctggtggtgacaaaatctctcagcatttgcttgtctgtaaagtatttaatttctccttcacttatgaagcttagtttggctggatatgaaattctgggttgaaaattcttttctttaagaatgttgaatattggcccccactctcttctggcttgtagggtttctgccaagagatccgctgttagtctgatgggcttccctttgagggtaacccgacctttctctctggctgcccttaacattttttccttcatttcaactttggtgaatctgacaattatgtgtcttggagttgctcttctcgaggagtatctttgtggcgttctctgtatttcctgaatctgaacgttggcctgccttgctagattggggaagttctcctggataatatcctgcagagtgttttccaacttggttccattctccccatcactttcaggtacaccaatcagacgtagatttggtcttttcacatagtcccatatttcttggaggctttgctcatttctttttattcttttttctctaaacttcccttctcgcttcatttcattcatttcatcttccattgctgataccctttcttccagttgatcgcatcggctcctgaggcttctgcattcttcacgtagttctcgagccttggttttcagctccatcagctcctttaagtacttctctgtattggttattctagttatacattcttctcaatttttttcaaagtttttaacttctttgcctttggtttgaatgtcctcccgtagctcagagtaatttgatcgtctgaagccttcttctctcagctcgtcaaagtcattctccatccagctttgttccgttgctggtgaggaactgcgttcctttgtaggaggagaggcgctctgcgttttagagtttccagtttttctgttctgttttttccccatctttgtggttttatctacttttggtctttgatgatggtgatgtacagatgggttttcggtgtggatgtcctttctgtttgttagttttccttctaacagacaggaccctcagctgcaggtctgttggagtaccctgccttgtgaggtgtcagtgtgcccctgctgcggggtgcctcccagttaggctgctcgggggtcaggggtcagggacccacttgaggaggcagtctgccggttctcagatctccagctgcgtgctgggagaaccactgctctcttcaaagctgtcagacagggacattgaagtctgcagaggttactgctgtctttttgtttgtctgtgccctgcccccagaggtggagcctacagaggcaggcaggcctccttgaactgtggtgggctccatgcagttcgagcttcccggctgctttgtttacctaagcaagcctgggcaatggcgggcgcccctcccccagcctcgctgccgccttgcagtttgatctcagactgctgggctagcaatcagcgagattccgtgggcgtaggaccctccgagccaggtgtgggatatagtctcgtggtgcactgttttttaagccggtctgaaaagcgcaatattcgggtgggagtgacccgattttccaggtgtgtccgtcacccctttctttgactcagaaagggaactccctgacaccttgcgcttcccaggtgaggcaatgcctcgccctgcttcggctcgcgcacggtgcgcgcacccactagcctgcgcccactgtctggcactccctagtgagatgaacccggtacctcagatggaaatgcagaaatcacccgtcttctgcgtcgctcatgctgggagctgtagaccggagctgttcctattcggccatcttggctcctacccgaaacttttctttttttaagagaggatctcgcttcgtcacccaggctgaagtacagtggcataatcatagctcactgtaaccttgaatctggggctcaagcagtactcctgcctcaatctcctgagttgttaggaggactacaggcacatgccatcacgcctgactaattaaaaaaaattttttgtagagacggggtctcgctgtgttgcccaggctggtcttgaactcctggcctcaggcagttctgtcacctcaggctcccaaagtgctgggattacaagtatgggctactgcaactggcctggaaaaccaaaattgttaacagagatgtgaaataatttacccatacaaaccacccaatatctaatgtgtatagctgacctctaatgtccctagctccattttttccaggctatataattttaaaaataacagactatactgattctacttttgatcttggctgtttatccaatgaatgtctttctgtgacatcttcaaccctttcctcattattttcttaggataaagtcctagagtagaaattctagatctaatatgcacattttagatttttgttatatattacaaagttatccttcataaggataagcagtatacctgatttctcatatcttttcataaataggaataacaataataatggcatctgtttcagttagagatggctggctaatagtagcttaaacaaatagaggaattatctgtccatatctataagtctagagcctctaaaattctcttggtatttcctgtgttacagtcaaggctagaaggaataatagtgtgatctagcaggcttctagttttgtgacagtggccagcagattcccaaatataagagaatctggggaagtaaggttttactattgttatttagcttttctagcctctataatagagattgcaaaagagaaggggtttgggaatgggtgtcaggtcagcttacctatagtgcctgccatagcagctaacattttttgatgtgcttgattgagcaggccctatgcgaagcactttaccaacatttaattcttaaaacaagttgagtagatcttgttcttcctgtttttccagcaaaaacattgaggttttgagagacttactaattttcccaatatcacatagttattaagtgggggagatgaacctgaggagtctaccccaaaacctcattcattaatttttagtgttcgtaatattcagaaactgaaagctattcaactccattagaggtcgtttctttgattactagtggggttaaacatctttccatatgtatattggttctttttagttgtattcttacttcttcttatttgtgtctttcatatatgttcctgatgatgttgtctttttctgtagctgttctttatagtttgaagaatattaaaccttcatcatatatatttcaaatatttttcctgacttgtaatttgccttttaactttatattcatgatgtactccctcaataaattagtacttaatgtataaatagacagatgtcaaaatctgttttccttagggcatctgttttttatgttataagtagcccaagattatgggaatatttaactgtatttttgtctatttaatgtttaaattttttcactaaaatgaatttattttagtatgaggtatgaattagacatctaacttacatttttccacaatgattaaccaattgtcccaatatcccttattgaattacccattactttaaaaatcccatcttaattatatattaaattctaataaagaactgctgtctcaacccttttcccttggtggcagtgtaacatagttgttgagagcatgaacatcagtttgagattaaacctcatctatactgcttattagctgtgggatcttgagttaattacttgacttctaaatgcctttgtttccttatctacaaaatgggaggcaataacagtaccacctcatagacttgtgaagcttaaatgaattgatatacataaactatttggaacaatgcatgttatacagaaagaaaccagtaaaaattggctattattattattttttaattttataatgaaaaatagtatttgttgtattgtgtccataccatacaaactgccttagtaataatgccttattcattaaagaaaatataatctttgaacagaagtggtatgtaattaaagttcaggtaacctttatataccattaattttgtaaagttcattattcatactagattcttgttttttatgtttacttttgataataggtagacattataacatctaagttctaaaatatcacagattatttttattttattgaaatatatggagtgggtgcagtggctcacacctgtagtcccagaatttggggacactgaggtgtgcagattgcttgagcccaagagtttgaaaccagccatggcaccatggcaaaaccccatttctacaaaaaatacaaatattagcccagcatggtggcgtgtgcctgtagtcccagctattcaagaggctgaggtgagaggatcacttgagcttgggagattcaaggctgcagtgagctgtcattgcgccactgcactccagcctgggtgacggggagatcgtgtcttaaaattttttttttttaacatatggaaattatattaaaccgtttgtagcccagtaattgtatcctttaaaatggaatttttaaatttactcatgagttcagaaactgttatttaaaagtcacaatttgtagagtattttgccaaggcaatagaaacaatgaggtggtttcttcctgcccaatatttataatttaatttgggacagatgctgatgagagtatagatgcttcctgtatgttatagtgtgaaaacaggatactgtctgtaaggaatacaagcagtttctctatgccagtaggaaaaaaaaatgctttatttaaaaatagtaaggagaccaggtgcctgcctgtaatcccagcactttgggaggcttaggcgagaggatcgcttgagcccaggaattcaagaccagcctgggcaacatagtaagatctcatctctgctaaaaataagaaaattagctggttgtggtggtgcacgcctgtagtcctagctacttgggacactgaggtgagagaatccctctgagcccaggagtttgagtttacagtgagctaagatctgcactccaggatggacaagagagggagaccctgtctcaaaaaataaataaataaatatgtacatatgtaaaataaaaatagtaaggatagttagactaattagatgctaaagataccaacttttaaatttatttcagtgtcattgtggaaaattttgaagcttttgggtttttgttaaacttataaatctcacttacacgcagcgtttttgaactcaaagtttagtgaagtatagatgcatcctcagttttctaatggttttcttctgacataggaagagaacctgaactattgttaactttgtttaccgattacatctgaattgcattcctctgttgttcaatgagcagtgttttgtgggatatgcttagataaataaattcatgtaaaaattacttatagttcaattaaatgtttgatttggtagccaaagagtatggaatcatagtcttgatcagtgtgaaattataggttagcgtcatcaacataaaaaccaagattctaagtcatccttgaacttcaaggtaattttcagagacccttgagattatgtgttagagatagggatgaaaaattgattttatcttttattccaacccaaatttagtagcagtaaatgcctgcagcaccatggtaagaaggactgcaaagctttcaggcttttcaggaaagaacactctagtactggctaccttggagtttaaggagacttacttttgaccattttgagggccttagcacagaactactcttggtcctagctggttagacaagcctagcttttctatgatcctccaaatgggatctgaataatccagttatcatgttagcattgaagataaagaactagtatattatatttattgggtctactaaaatttcatagacgggtagaattgactcttcagattccagaacaacccttcaggtcttggatatacaaactcctttagtgtagtgtccttgtgagcattgtctgtgggcgccaactttcaagtagttggcttgcagctcacaccagaatggaaaggacatgtttctaggaccctgaagagaattttcattgttcactgtttttatgcaaccaacaggatagtatgataattgtgtgtgttcatttaatccgtatttattgatcactcgtcttacacagtgtacttaggaatacagagataaatagaacacaggccctactcatgaaactcataatttgatagacatggcagtatcaataatttttgagtttgggcactacatagtcctcatgcaattgtttggctttcagcaagtcactttgagcaccagtttctttaaatgggtctaatggcaacattgctggttgagataatgtatgtgatatgtctcacttagtgtctgatacatggtagatgataactatcagtagcttacattttctagtacttttaaggtttacattgcagtttgacaagtaaaattgtattaaattcttatagtgtccctataagcttatattttttactttttcataaaccaagttaactggggtccagatatgttaagtttcttaagttcaagattgccaatcaggtcctaaaacttgtatttattcatacagctattccaacatgtaaatataaatttgttcaaaagaaatgagtgataagatatgaaatgagatggctttaaggaatgccgtagcacaacagaaaatcgtcaaatattgatgcctatgtggagggaagacaaagccaatgaactatgtttgtattaggcactgagtgatccaagcctttttattgttcttgacttagtccaatgagcagcaccagtgcctgcagtaatcagctgtttgtattatctaggagcccacttatagaattgggtgctgagatatcttattttgcattctatttagtagcctatgtatgtttggttagaaggagggaggagggagttgaaaggggagtttggatttcaagtttggcagtagtcattcacagtgagcaattttatatgccattattagaaatggaaatcagtcttgtagccatttagatcatgtgcaacaaaggcttttgaatatttttagttggttagttacttgctaaaattatgcaagaaatatgattttccctttatcttttttcacttttgggcttcttccattttgccttcaaggataacatataggtcatttctggaggaagaatattatatttgatagcttgatccaatgtggtaaactttaataaatactactgccccacttcttctatcaccctctcactcctgctattatccaggagaaatgtgatataatttctttcattagaattgaagggtgtttttatagtctttccattttttcatttattctcaaacattaggctgtgtaggtttgtaggttttctggccagttttgattattaagaatcacagcttttctaccatttaaggtcacatttatgagtgattcactaataaatctaagaactgcagtggcttgggagtaaatataagagaaatgtttctactgaaaagagaaacactgagaggcagaagtggaaggctatctggagggttgtggaattggcaatggtcagtgtttctgatccttaggtttgcaagcttataagcaattgaaaaagacagttattgaagacttaattttttctgaaagtactactgtttgattctatatgagcataattaatgatcatgctgaattaggaatttggtttgagggtttctataagaaacactgttggatactgcatttcaaaaatgatagaattttttcttaaatcttcacctcctactttctggatgctttttctttgataatatatctttatttgacccagttatcactagagttcagttgctaccagacttttcctaccagttgttgttggcatctgattccatctgtttactcatttattcatttcccgtaaatttttactccaaatatcccataggcagtgtgtcagaatatttttttttaaccagttgactttacatggcatttctttcagaacattctgccattcatttgtcaagtatttgttgaaagcttactgtgtgccaagcacagtaataggctatgaaacaaatgatcagtgaagttcaatccttatgtctaggaactcacaaattgggaaatttgggggatgaaggggagagaggttaagaaacataaagagacatataagcaaacaataacaatacatgttacctcttttttcaaagcacacttcataacttttctgttctctagtatctagcctttgtaatctttcttctgtactgttgtcagagatatttttcttagatgcagatctgatccaagttattctctgcatagtatacctatggaataagaaccaaacttcttagcatagcatgctggatatactgtttgctctccaaattctctctttaccatactctgttcttggggaggcagacctttatggattatattagctgagctcccttgccctttggtttcctgttgggtttagccaatgggatacggctggagattgcaaactggaaagaaagagaggtcagattatttattctcttggttctctacttgtagggtcattggttgacagtgactgcatcttcctgtatagctacagttgcagccactgtagctgccactgagtgccaataactcttgctctccagagacggattaaacgttaagataatgaaatttaaacttcagggcccctcacttgcaggggacttgcagaggccttaggaatctgtttacaaagctatttatttttgtaacatttgcaaaagttatttttacattctttctgaagaagggccgacggctgggcacagtggcttatgcttgtaatcccagcatttttggaggccgaggtgggtggatcacctgaggtcaggagttcgagaccagcctggctaacatggtgaaaccctgtctctaccccaaataccaaaattagctgggtgttgtggcatatgcctgcctgtaatcccagctattcaggaagctgaggcacgagaatcgcttgaacccaggaggcggaggttgcagtgagccaaaatcacgccagtgcactccagcctgggtgacagaatgagactccatctcaaaaaaaaactggggggggcgggtactaacaaaatggtataatcttcaggccctataaaactggaccctccaatgtccttaaccttgacccttcaagcttaggtaagtataaggtttacagggaagagagactactgaataacatacttgggaaggctattaatgaatatttcatggatgaaataataatttgagttggtgttgtaggatgaggagttcttcaggtgaagaaggatagaaaggtcattacaaatagaagacacagcctgttcaaagggaatgagtattttgatgtctacagtgaagcatactaggtagaaaacaaagaaaatacaaaagtcctgcggcaggaatatgtctgtcagttttgagaacagcatagagatcaatgtggctgtagacaaatgagtgatggggagaatagtaggtaaggttagagtttcctgttacttagggtcttgtaagccgttgtaaggactttgaccttttatcctgagtgagactgggaaacaggaaggttttgagctatgtggacatgatctgactattgttttaaaacaagtagtctggccactttgatgagaatagattggctgtgttgccacccaaatctcatctttaattgtagctcccataattcccatgtgctggggggggacctggtgggagataattgaatcatgggggtggcttcccccatactgttcttgtggtagcaaataagtctcatgagagctgatgattttataaggggagatctgatgatttctccttttgcttgattctgattttctcttgtctgctgccatgtaagatatacctttcaccttctgccatgattgtgaggcctccccagctacttggaactgtgagttcattaaacttcttttgtaagttgcccagtctcaggtatgtctttatcagcaacgtgaaaatggactaatacacagagagaccagttagaaggctattctagtaatttacacaagagatgataatgatttggacaagagagttgatggtagagttggtgagaaatggaaagtacagtattcaggatttgttgatggattcgatgtagggtattagagtgacagaagcgagtcaaggataactctagtatttttgtcctaagtaattgcaatggcaaattgctgtttactgagatggatgagactgggaagagcaagtttgaggaatggtgaaaatcaggagtttttttgtacgtgttaagtttaaggtgctatgttaatctgttctttcattgctgtaaagaaatatctgaggcagggtaatttataaagaaaagaggtttaattggctcatggttctgcaggctgtagaggaagcatgatgctagcatctgctcaacttctggggaggcctcaggaaacttacaatcgtggcagcaggtgaagggggagcccgcacctcacatggccagagcaggaggaaaagagagagtggggagatgctacacacttttaaacaaccagatcttaggggaactcactcactccctatcacaagaatagcaccaagaggatggtgctaaaccattcatgacaaactgtccccacaatccaattacctcccaccaggccccatttccaacactggggattacaatttgacatgagatttggtggggacacagatctaaaccatattattctgcccctggcccctcacacctcatgatcctttcacattgcgaaatacaatcatgccttcccaacagtccttcaaagtcttaacttattccaacattaactcaatagttcaaagtctcatctgagacaaggcaagccccttccacctatgagcctgtaaaataaaaaattagttagttactcccaagattcgatgggggtatagtcattgggtaaatactcctgttccaaaagggagaaattggccaaaagaaaggggctacaggccccatgcaagccccaaacccagcaggttactcattaagtcttaaaaccccaaaatttgactccatgtctcatgtccagggcacacgggggtgggctcccaaggccttgggcagctcagaccctgtggctttgcagggttcagcccccacaactgctctcatgggctgacattgagtgcctgcagcttttcctggtgtaccatgcaggttactggtggatctaccactttggggtctggaggactgtggccctcttctcacagctccagtaggcagtgccccagtgggggctctctgtgggagcttcaaccctgcatttcccttccacactattctagtagagttctccatgagggctccattagcagcaagcttctgcctggacatccaggcttttccatacatcctctgaaatctaggcagaggctcttaagcctcaactcttgcactgtgtgcacctgcttacagcttgcaccctctgaagcagcctcagctatacctgtgcccccttgagccatggctggaactagagcagctggaatgcagggagcagtgtcttgaggctactcagggtggcaggcactgggcgtagcccaccaaactattcttccctcctacgtctccaggcctgtgatgggaggggctacctccaaggtctttgaaatgccttcaaagccttttccccattttcttggcgaatgcaaatttctgcagcctgcttgaattcctcccctgaaaatagacttttcttttctatcacatggccaggctgcaaattttccaaacatgtatgccctgcttccctattaaatatgttccaattttatgtcatttctttgctcacacatatgagcataggttgttagaagcagccaggccagatcttgaactctttgctgcttagaaatttcttctgggttgggcatggtggctcatgcctataatctcagcactttggtaggccgagttgggtggatcacaaggtcaggagttcgagatcagcctggccaatatggtgaaaccctgtctctactaaaaatacaaaaattagctgggtgtggtgatgggtgcctgtaatcctagctactcagaaggctgaggcaggaaaattgcttgaaactggatagcagaggttgcagtgagccacgatcataccactgcaatccagcttgggcaacaagagtgaactctgtctcaaaaaaaagaaaaaaagaaatttcttcttccaggtaccctaaactatcactctcgagttcagagtttcacagatctctagggccagggcacaatgcagccaggttgtttgctaaggcataacaaaagtgactttttgcttcacctcccaatacattcctgatttccatctgagacttccttagcctgggcttcattgtccatatcactataagcatcttgatcacaaccattcaacaagtctctaggaagtttcaaattttccctcatcttcctgtcttcttctgagccctccaaactttccctttgcctattacccagttccaaagttacttccacattttcagacaccttacagcaacactgctttcctggtaccaattttctgtagttagtctgttctcgaattgctataaagaaacacctaagactgggtaatttataaaggaaagtttaattgtctcattgttctagaggctgtacaggaagcatgatactggcatctgcttggcttctgtggaggcctcaggaaacttagaatcatggcagaaggtgaaggcggaaccagcacttcatatggctggagcaggaagaagagagagagggaggaggtgctacagtcttttaaacagttagatctcaggataactcactcactcattatcacaagaacagcaccaaagggatggtgctaaatccgtcacgagaaactgtttacatgatacagtcacctcccaccaggtactgcctccaacactggggattacaattcagtatgagatttggtggggcacagatccaaagcacatcaggtgcctatttgacattcaaatgaagaaggtgaatagacaattggctatataagtctgggtagagtgggttgggagtacaaatggagtgttgtaagcatatagatggtgtctaaagccatatgactagatgagatactaaggaagtgaatatagatttttaaagggggagaaagaaagtgccaacatctgaggtttgggaccctccaacacatcagggaagtaggaagaactgacaagttaaagaagcagccagagagaaacagagaaaaaacagaaatatggtgatacagagagctaagtgaatgaagtgtttcagtgaggcagaggttgtcaacaattcttggtatatcaaataagataagtattgataattgaccgttggatttagcaatgttcaggtcattggtgatcttgatgatgctcagcagagtgaatttaaaatgaagtgagttcatgggaggagaggaattggaggcaatgagaagagacaacccattaggagttttgctgtaatgggggacagaaagttgttctttgggaaaagaggagttgagaagtttttgtgttttgttttaattattagtgttttaagatggaataaataatagtcatgtttgtatactgatgggaatgatccatcagagaaagaaaaattgctggagcaatgtctttgtccagtcaaggggggatgggatttagtgcataagtggagaggctggccttagataggaacatagacaattcatctgttatgacagaagggaaggtgtattatatggatataattcttgtacagtaggtgggaagatgtggtgggggtttttgaaaattattttcaaatttcttttttctcagtgaaatagaaagcaatgccataagttgaaagataggatagggaggtgttagaaaaaagggggaaaagtcatctaggagaatgagacagttaatacacaaggggaatgtagtatgatttctgggcagaattaaagccccacttgggattagtagtcatgaatttaaattgacatcagccagatatggtgtctcacacctggaatcccagcactttgggaggcggaagcaagtggatcacttgagatcagcctaggcaatatggtgacaacctgtctttatgaaaaatacaaaaattagccaggtgtggtagtgcatgcctctatagtttcagctgctaggaagactgaggtaggagtatcacttgagtctgggaggttgaggctgcagtgagccgtgatcacgccactgcactccagcctgggcaacagagacccctgtctcattaataatagtaataataataaagtgatatcagtcagcagccacattagctgcacagttgcaggtgcagaataagtagaaagttggcctttgctgagcaaataaaatgaagtcagatggaggaaagttgtcagtgtatacaagagaatgattgtgaaacatgaatatttccgattgcatttttcataatagccaaaagctggaaataacctaaatgttcatcaactaatgaatgaatatacaatggaatattagccataaaaggaaatgaagtactgatacatgccacagcatgaatgaactttgaaaacatcatgcttagtgaaaaaccagatgtaaaaggccacatatatgattccatttttatgtagtgtccataatgggcaaatccacagagaagataattagtgttatgattggggctgagtggaggaggaaaggggagtggctgttaataggaacatagtttctttttggagtgattaaaatattctggaattagatagtggtaatagttgcacaactctaaacatactaaaaatcactttagaaaggcagattttatggtatgtgaattatatctcaataaagctatataaaaataacatgctagctcactagaaatttgcttatcccaaactcaacaaattgaacagctcagaaatatagctgagctgtatttgtaatcaactaatgtaggactaaggtgaacaagtagctgtattacaatgtttgcagtctcttttcaggtttcaagattacagttgtttttttctcagacatcccttagtattaaaatgttattggctaagttgcagagcttgtgaggagagaccaattctggctcagtcttaattacttagtatcttcatctctccatcccttcctctccccttccaattaacaaacctttactaagctataaaaatcatcaagcactatcctaggtgctactggttatacaaagatggattggactttgtccctccccttgaatgtgaggtttaatggggaaatgaggtttaggaacttggagcacatttcatttttagggtgagactactctaatcgttcttcagcatcctcccatctatagcttatagataacgtatgcactcaaggcataagaaacttatttggatcttcattacgcttgaaacattcttccttttgtctctagaacatcagacattctttctcctcttactctaaagtattttggggctaccagatgaaaactcataataattttcttctgatgctctagacctgaaatatcttttataaaaacttcaacattcaaaattacgatgtatgttaggcaaagcgtgcatactggtgctatctgcaaaacaaataataatgtttaccttgcaggattgttgtgagggatcaatgagtatacataattgatatatggaagtgtcaaacacacgagctcttcaataaacattagtatactttatcactttgccaaagtctacaaacactaattttatatatggcaatatgttgagattgcagatatagacatagaccttaacagacaaaccctaattccaaagagtttgccattcattgatggaaattaattggttcagagatgttgaccatgtctaccttattatttaataacttaattaacttactacaaatctatcgatgttttccatcttggatttttatatcataaaaatgtagaattcttagctcatgactatatgaaaaatagatatttgataatgctttttaatgattataagctaattatattttgaatctcatgcctaactgaaatgtaatgttgcatgctggactttgaatttactaaaaagttcttttgttgtcttcctagaatggagctggtttgtcaaaatccaaaggaagccgaattggatttgatagcacacagtgggtatgtagaataaacaagaaatttctcaattataatgttcatttagttcattcatttactccgtaagtatttgttgaatgatggcaataataatagctaccttgtgtggtgggtggccggttggtagtggcaggtaagggacaggccctttaccaagtgctttatgcaatgtcttatttagtccctatagaaagtttaagaagtgagtaaatattgttactctcaattcacttagagagattaaacttagttggctgataatttggtaagaccagattctgtctgcctctaaaacccacattcactgagctatggtgtttccctaaatgaatgaatatatgaatcagatttatttgaataagggaaaagtaatgatcaggaataaaaatctattcaacctattcctttataagatgaggggaaaccagcaatatatacaatatatccttgttttgttttagaaatttcagaacctacacattgataaaatatattttcctatgttttaaaactaaatttagaaagaaaaacattgctgggttactaataaaacacaacatttattctgttagcatacattatgggaatgaccagatatttcttgatacacttcaatctttggcttctctataactagagatgtggaacactttaaattagaagtggattttcagatcaccaagcagtggtcattttagatcattgctaacaccaagtagattttgaactactgtttaaaagtaaagtctgggatatcctattatcaggctccccagctctctagtctataagtgtcaatgtaaacttttaatttattaaaaatagcaattgttttgctctgtgaatttagggtattctgaggataaaggtaagcatgatatacttggaagttatactacccagtcacagttataaagattttagattaaattaaaaagaggtattttgtatgcttctctgtaacacttctctacctccatcccacccttaggaaacacatacacctaatacttggacctgatttatcatcttgtggttgaagtaatttgctgagatttaaaattcagtattttaacagccaaaggcaacaggggtgatctttcatacattttaacattataagatgtgatgatacttagagaaacatatatttttcagatttgccatttattaggagtcttcatctgtacactgtaaagcaatttcagcaaaaaatttaaagccgtagtagcttcagttggataaaaggttttcctttatcggtattaaccaacaacattctgacaacattcccaaaccttttagtaaatagagagagcagtcagagaaagtacaggttcactgatacattttaaaatggaatttgtgaaaaatttaaagcttaaaataatagaaaaaagtagcgtgactctatccttttcattcaagaaatgatccttgaggtgggagaaaataatggatttttttcaaagtctttacttccacggtacgcaagcaaaaagttgaagagcagcttaccacattcagtgagttctctttatactcttttacattgaggggactaaaaaaaattgtaaatgtggtcactgaatgactatatttgcaaaatcacaggaaaggagaagtactaacatacttctaaacttttagaaggaataaaaggtgaaatctcatcaatagtgtgatattgagccctggtaaaattctagggctcaatgtttatggagttattaaacagatgacttgggagcacttagaaaagaaaatgatcataattaggaactaggcttttactaagaacaagtcctgccaagactttttaggttttaataaaattttaatacacaggcagatgaatgggctattatggtctcagcataatctcttttcaacaagatgtttttcagtcttataaacaaaatgagttactgaaggtcagatgataatagtgatttagaattaattggatttagaatcaactggacacgtttccaaggagcgttaatgattgtattgataacaacttggaggatgtgtttagaaggtgagttatagaatctctgcttgaccctgacctaatctgtatttatattaataatggtaatgaagctataagtgtgttcatcatatttgtatttaacaccaacctgagatccattcaacaaacattaaagtaccttttatgtagtagttctgttatctcatctttcttccaaaaccatttctttcttgtttttttcctagtataaagcacagaaagtaataaccctaaaagacacacacacacacacacacaaaatagctaaattggactattaaaattttaaacttctagtcatcaaaaaacactattaagaaaatgaataagcatgccacagagtagcaaatatttgtaaaacatgtatctcacaaaggaatggtatcaaagatatatgaagaactcccacacgactcagtaatagattttttgttcatgcctttcatcaagttgaggatgtattttattcctggtttgctgaaagttttaaatcatgaatagatactgaattttgtcaaatgcttttttctatattgaaattatcatagtttttcacttttttctgttgatttgtcaaattttattgattgattttcaaatgctaaagtaagctttcattcctaggataaatactacttggtcatgatatttactttccttttttatctttttttagttactggaattgattttctaatattttattaagtatttttgcatctgtgttcatgagggatggtggactatacttttttttgtaaggtctttgtcaggttttgctttttttttttttttttttgagatgaagtctctctgtcgcccaggctggagtgcagccatgtgatctcggctcactgcaacctccaccttgtgatctcggctcactgcaacctccacctcccgggttcaagtgattctcctgcctcagcctcctgagttgctgggactacaggcacacaccaccacgcccggctaatttttgtatttttagtagagacagggtttcaccatgttggccaggctggtcctgaactcctgacctcaggtgatccacctgccttgacctcccacagtgctgggattacaggcgtgagaagttttgctgttgagtatggcactggcctcttaaaatcagataggaagtattttctcctgctccattttctcagaaagtttttgtagaattggtattcttccttaaaaatgatagaattcaccagtgaactgtctaagtctgaagtttttccttgttgttttgagggcagtttttttttttcctaacaaattcagtttctttaataggtatagggcaattcagattttgtttcatcttgtggcagttttgttaaattgtatttttaaagaaatttgtgtcatctaagttgaattttttggtgtaacattgtttatcctaactttttacttagctgtttctcacactgaggtaataaacccctataaggcagagattattgtattcttggcatttgcataatactctacactaaaaacaaataatgagactgattcttagctttatctcatcctttatccttacaattgatattttgtctatttatttatcttgtatatatttttatgagttccttcagattttctgaataagaatttattcttaatttcatgaagcacctttttgataggcaaacattcctataagtcttgctttcattgaagtaggcttttaagcaatagtgtatgccagatattctgtttatccttgctgttcttagatattacttattcctaagtgtgatttagtccattttcattctactgttgaatttttgtttttttcagtaggggaccctacttactacccagcagagttatattttgaaatattgcagtattagaaaagcacattatatatggcagtcatcaagcaggcagtgtattttggtctgagtcttttgcttagaaagattattaagcagcattacagatatgaagaaaaatggtacaaacaactgaattttgtttttgaaagattaacaagactgatttttaaaagctgacggatagttctctcaattttgcttgaaaagatttagctaatactaagagaataattttttaagcaccacattttcatgtcagataccacttcctctgtgaaatttcttatccttttgatgtatggtaaatttgtagcttactggtctgtacttttataatatgttgtatatgtttttcttgtagcatatttcaccttatattgaaaatgttcatctttcttagaagactgcttattgagagcagagaccatatgtgctatttaatcatttgtattttttagcacaatgataagcatggtatctattgggtaactactctgcattcttatacaattaatgaattaaaatgttataaaatagactgttgtgttggcttactggaattacgagaattctttttctctcaaacagcgtgcagttaaaaaatttattatgttaacatccaaccaaaatgtaccagtgtttcttattgatcctttgatactggaattgattaataagaactttgaacaagtcaaaaatacttctcatggctctacttcacaatgcaagtttttctgtgttccaagagactttactgcatttgcactgcagtatcacctatggaagaatgaggtaagtgacttgctttcagataatggaatgtgtctctttttacaaaatagtataggtttaggctagtttaaaatgtaaaacattaaaaatttttcctgaaacactttataaattgtatcaggaatattttcagctataaataacaatacaactaatcactaaggcaaataggggatttctttttcttatataatgagaggttaaaaggttagtggctattgatattagtttagctagccactgatgtcaggacttgtgtctctgaaattctttattcatttacctcattatcacaggatagctgtcgtagctccacatatcacatccatgttcacaacaggaagatgagaggaaagattctgcttttttgctgggggaaacttctcaatatcggtatttttaggtcatttctgttgaactgtttgatatctcatagaaaaagcctacaaggcttatttttacaaagaatattttataatgtccctttatattccccaaatgaagttcatagaaattataaccctcctatatacataattccccaaatcaatataatgtattaactataatataacctagaaataaaaggaaatgatatgtattgctgtgtgcagatgctccagaatgactacactggaagacataataaagtaattcagatgcttgtatttagaagtaggatcacagaatgtggtagctacaaatataaacccatactatgaatgatattgttgttggcaatatgattttccaaaatagtgagcaagtttccaacaacaaaaaaagtaaaattgtctcttcattgacatgactattgtattcctgagaaataaaagctcagacaattataaacaagtttttcactatgtgattatgtgacaggacatttgaaattacatagtacacaggatagattttcatattttggattgtaggatatctaatgttcttggcctaggactctaaatgccagtttgtcattatgataaaccaaaaatatccccccaaatttctgaagtatctgttgggtacagtcccacttgccttgagaaccactattttagaagaaggggagtatgccaccattggcaaaactgatactaccatagtcaagaggaagaagcaaaagctcagccatacccagaatcagcacatgggttcaagtttattcttcgtttgtttttgtttgtttgtgttgggttttttgtttttgtttttgttttttgagacggagtctcgctgtgtcacccaggctggagtgcagtggtgcaatctctgttcactgcaatctccgcctcccaggctcaagggattctcctgcctcagcctcctgagtagctgggattacaggcgtgtgccaccacgtgtgactgatttttgtatttttttttagtagggacggggtttcaccatattggccaggctggtcttgaactcctgacctcaaatgatccacctgcctcagcctcccaaaagtttctccttttgtacatatgacatcctactattcaagagattcaagagcccttggatagtcccccctaaaacatcccccaatgtggagctaatcagattgttagatctaataatgaaagactccatttgcatgtgatttttctttattaatgccattaccataaagtgagcaaacctctgccaaggctactgggagtggacttttctagcaaaaccttgacctaggcctttacaccaattgatcagagcaactattttgttctttacttctcttgttgatggttataagaaagcaaaccatatcataattctgcctattttgtctgtcagtctttcctcctataacccaaggtcacgttcttctcaagttctggccggccttttaaatatttcctgaatttgtcagctgataatgcctttcttttattctattcagtagtgtctttctctgaattggctaccctccccctcagtcagtgctttctacttctaaggtgtaccaagaaagaaaagggaagaagggaatgttacagttgataatgaaacaaatgatgttggaaaatgaaccttgtcttacagtatgtttgttaatttctaatgatttgcattatgatggtgttctattatggtagtattttaagatgttgggatgtaaactatgagatgaaagaactacttttttgaagtacttttgaagataaaggttattaaaagttaaattaagaattacaagtttaattttaagtgctgtccttaaatcaacatttactttatagaaactaactggaaaacactaacatgagcattctcattccaaggaagggatttgtattaattttcatagagttttttttgttttttttttttgagacagggtctcactttgtcacccaggcttgagtgcagtggcacaatcttggctcactgcagccttgatctctcaggttcaagtgatcctcctggctcagacccccaagtagctgggactacaggtacatgccaccacaccttggcaaatttttgtttgtattttttgtagagacaggttgcccaggctggtctcaaactcctgagctcaagtgatccacctgcctcagcctcccaaagcgctgggattacaggggtgagctatggtgcccaacctataaagagagtctttggctatatctttcctgctacatactttgtatttttgctgctttcctttattctcccaccactaccttctgcccatcaccctcattaaaaaatgttcttacagagcagattagcacaaaaatatggctcaagttcaatataagaatcactttagttttgctactagtatttggctttaaatattcaatgtttaagtgttgtttcttgatgtttgatgcttctttggttctaggaaggctggtttcggatagctgagaatatgggatttcagtgcctaaagattgagagtaaagatccccggctagacgggatagactcactctctggaactgaaatccccctgcactatatctgcaaactggccactcatgcgatccacttggtagtctttcatgagaggagtggcaactacctctggcacggccacttgagacttaaagaacacattgacaggaaatttgttcccttccgaaagttacagtttggtcgttatccaggagcttttgacaggtaagttcagagtcaaaacgtgaaatgtgaaatgagtgttgttcagtcataattcttgcagtgtttttacatttgagtattgaaatctaatatataatttatataagtatttacagtaacattattcttaatgactccaaattagaagccacccaaatgtccttcaacaataaaaggattggctgggcactgtggctcatgcatgtaatcccagcactttgggaggccgaggtgggcagatcacctgaggtcaggagttcgagaccagcctggccaacatggtgaaacctcgtctctacaaaaaaatacaaaaattatccatgcattgtggtgggtgcctgtaatcccagctactggggaggctgaggaaggagaattgcttgagccctggaggtggaggttgtagtgagccgagattgtgataccacactctaggctgggcaacagagcaggactttgtctcaaaaaaaaaaaaaaaactgtaaaggaataaataatttttgatatatgtgttcatacaatgaagtattacacagcagggaaaaataaactaggggtctgtgcacattgtggatgaatcctacaatgctgaatgacacaaggcacaaaagaatctaaattctattattattattatttttttccattcaaaagtttcttttattcattaataaacaatgatatatatgtatacacagcttcataatcataccaaaaaagtttaagtgaactatcctttaaaggctgagaccataactttttgaacagaaataatatggattataagacagtatattgatttttgctgtctttattttaatataaagaacaaattgtgtggtaagactaatttattttcccactttgaaattaaacctctctagaaacatttagataaattatgaactaatctttaaaataccgtattacttcagcatttcaaaatcagtaagtttggaaactgtatttaagttaatattaggaataatataaccactgttgataactaacaatatagccaaaagaaaatgtggtacatacacacaatggagtactattcagccataaaaaagaatgagatcctgtcatttgcaacaacatggatagaactggagatcattatattaagtgaaataagccaggcacagaaagacaaactttccatgttctcacttatttgtgggagtgaaaaatgaaaataactgaactcatggagatagagagtagaatgatggttatcagaggctaggaagcatagtgggagaaagaggggaagagggggatggttaatgggtacaaaaaaatagttagaaataatgaataagactgagtatttgctaggacaacaaggtgactatagtaaaaaataattgtacattttaaaataactaaaagtatacttggattgtttaatacaaaggataaatgcttgaggtgatagataccccatttactctgatgtgattattatgcattgcatgcttgtatcaaaatattgcatgtaacccataagtatacacacctactatgtacctacaaaaattgaaaatacaaaagtgaaagtaaattctattattacttttataaaaagttcaaacacatgctaaattatgttcatggatgtatacccttatagtaaaagtattaagaaggctaagcaagacgtaccaaaaaagactagatagaggacacagagaactacagggaaactggaagaattttatttctgtggtggagactttggtgtttactttataattcattattttgtgcctttatgttatgcactttcctatatattttttaaaaccatgtgcaaaaatttatctttggctatctcaataataaaaatatttcttgtgagaaacagttatttgaaggaactcatgtaaaatttgattagctatagtttataatattaacaattacaggattaaaaacattcttgaagttatacttggagtatgaagtttctaacctagaattgttccttttattctccttttgaaatcagcgataatgatgttacagtctactttgaatagcagaatctgatgtaaaggtagcagtaaatatttgtaaggattttcacattaaaaactccttcttagtaacttccagtgagataattcttatctgttacacttgagaagtgtaagagtatgtttattcttgccttcttttaaaaatatatatatatattatatatatatgttttctctctctctatctggaatcatgtgagattgccttcttattagtacttaaagtcacatatttgagaatgactgaaaaaggtattcgaaactgaagtcttctatattttttgtgtatgaaaagtcggaacttttctgaaccaagccatattttcaaaatgaccaaaaaaaatgagtagagatggagaacaatactttgtttttattattggcttctcttattttaatcaaaaatcttaatactcactgttctcttaccacttttttgcctgtttttttcttattctgtatttcaaatgaccttctttagggagacattatcttttagttttttaaagctttgtgaatttatttcaaaatttaataacttagtaaagttcaaaattgtcagttacttattaaacataaacatgtgacaatagataaaagctatctctacattgtaaaattttatatgagtaggaatggaaaactctcaaataatatttttagagtatgggatccaaaatacataagatagatttgcagattagcattttacccattaatgagattctcaggccattgtaattaacttgtgtgtcttaagtgttaaaaacatttacttctctaaaagtaaactgataattaaaaattatgtcacaaaatttttgtttctgcttaaaatgccaagtgtgtatgaacaagtacaaatatattaatatataaatacattaaccaaaataattaaaactcaactgtttgatgtcagatttttcaaggtcttattaaaattgctaattgatatctgacataattgatgaaactatgcttgatgtttaggtattttgctaatgtttgatatttgtaagaggctgccagtattctgggttaaatccttttaataaatcttttattattattattattatttttaaattttactttaagtagtgggacacatgtactgaacgtgcaggtttgttacataggtatacatgtgccatggtagtttgctgcacctatcaacctgttatctaggttttaagctctgcacgcattaggtatttgtcctaatgttctccctccctgtttcccccacccctcattaataaatcttaacttttgttttcaggccagagttacagcaagttactgttgatggactggaagttctcattccaaaggatccaatgcactttgtagaagaagtaccacactctaggtttattgagtgtaggtataaagaagctcgagcattctttcaggttagagacaaccaaatgtgtacttttaaattaaagaaaatgttgggattatttttaatatttgagggtggtaagatgaaggggcttatggaaaatagaaaagtaaacatccttttttgatatgtctcttttcttctagattgttttctttcagttttttttagaagtagattaaaaattaaccttaagaaactattttctaagtcaataggttgatatttatttattgttttatttgaataactttaatagatttagcactggcttctgccttaagatagcccattaactttgtgaaaggtggtgtattctcagtccaagtaggataaagccactatagaagatggaccatgtagatttagaaaagacttcatgaaaatacagtttgtttcagagttggcattgaatataattttttttgcatttatgaaggtttttgaagataaatgctacacaaagaccaggtgcttttaaaactttattctcttgctgcagctttcaattcaatacacatttattgtgttccgcaggcttctggccctggggatataaagatgattttgaaaggcatgaaagttcagctctaagagatgacatgaaacacagagatacagtgaaaacaggcaaatttacagtggggttttggtacctgaattctttcacttgccctttattttctggggttccctgccaagaaagctgtgtccacgagggatacgaaaatgaagtatataactgtcaagtgcccaagacccacaaatctgaggtttctctaatacagtgtactggcacctaaagctgaggcctgacagcccaagtgggccttcgtagccctatttccttaagtcattgtggagctgtgaaatttatgcagccagcctcatgaataaaaagctgaaaaaccacatgtgtggatgggcctactctagtagaaaagtgctgcctgacatatgcctaccacataataacaggaagtagaagagatggagttttgtgcttaaacttgaccgctcttcctgtcctaagggagtttgctgtggttgtcatctctattatagcaattatcacagtgaattatgaatatctgtcttgtcctcttatcaaattttatgaacttcttgataacaggagtgttcttttatttacctgtgttggcccagtatctactgtacctggcataaagaaaagatccagtagggtcagttttcaaattaaagtgaacatacatgtatttgaacacttgatggcgccaaacagtcttaaatgtaatgcttggtgtaaagcaataaattaatctaatagacctcatcaagcagccgcctttctttttttaaaataatttttaaaaagcaattttaaatacataaaagctgcaagtacagtaccgataacttttttttttctgaaccacttgggagtaagatgttgaccacaacttcaaaaaatttagtatttttttaaaaataggaacattctctacatgtcctaatatgaaagttaggaaattagcacatacatttttaccatttaatccctattcaatttttgtcagttgtcccaataataacctttgtaataaaaagattcgattcagaatcacatgttgtcttaattttcctgtctctttagtcttcttcagtctgggacagtttctcagttcttttattactttcatgactaatactttggaagattacaagccagatgttttgtgcagtgtccctcatttggggtttgtccgggggttcctcatgttagatttaggttatacttctttagaaggtatagaagtggtgctgtgttctcattacatctcactgggcactgcataattttgatttatcccattactgttgatattcacattgttcacctgattaaagtgctgtctgaaacttcgtatctttaccactatgaagtttctgtttttccctttataataataagcatctggcaagaagttactttaaaactatgtaaatattgttttcctcattacattttcaatttatttgttcatatcaatataaataaattcatggtttcctattttaccctatgggttatagtcaattattttcattatttattttgatcttcagattgttccatatttggccagtagaaactccttcataatgctttctgtgtccttttgacttgtctccgttgttttttgaacactttagtactttttggcactataaaatattctgggttcatcttacaattttcatacctccaccctgggatcagccatttctttaagtcctgtttccttttagaagccaagacctggatgccaggtgtacccattgctatttgggttttgctgcagagagtttctctcagtgaacaggggtagggtgtatatgtctgtgtgtatttatttctgtatctatctattgaaacctctgaattcacattgacatctccagtccggttaaaagttccaattaaacaacagagttcatttccatatttgcgactcccttttcaaatcgtgagaaatctgactcccattgaccttaatgtttacttagttgttcagtctccctgtatgtaacctatcttccaacacatgtcctcccctccctaccccctgttcttctcaccctacctgggcactgctatcctctgctgggctgcacacacgtagaggcattcttcttaccctgttcaggctctgacttcccacacctggctgctgttctgcagagaggctttcctcaccctgcttgggctctgactccccacactggacactctcctactctcttcatgtggatgtcctcattacctgcctaggctctgataccccatatcaggcaatccctttgcacaaaaacctttcttgctctgccccatctaatggttttagtatcgaatagttcaggaagggcgggagactttatttacttttaattattttctcaatctaccatgaagttcaaaaactagaataatataccttttcctgaatttgattttgttttagcaaaaaccatcacaagataattaatgagctccaggctgttgaatatcagtgaaaaaccaaaaggaaagttggaaatacctgtacacctggcctaggaatatctagataacaatatttttattttatttctactaatttgctctaagattttgggcaaatttctgagccttggtttcctcatctacaataagagttggtaccttctgtcatcttattctttgatataaggtttgtgcttttggattccacgattcttcttgggctttgtgtccccgttcattggctgaacaggaaaaattaaataaacatgatatttaaagtaggatattaattttgtctttttttagaggtatagtaatcctgagatttgtacttgggatttatttttatttgtttacttatttattttatttttaacttgtaagttcaggggtacaagtgcaagtttgttacataggtaaacttgtgttgtgggggtttgttgtacagattatttcaccacccaagtattaagcctagtacctattagttatttttcctggtcctctttctcctcccaccctccaaaagaacccattgtgtgttgttcccctctatgcgtccatgtgttctcatcatttagctcccacttataaaaacatgaagtattaggttttctgttcctgtgttagtttgctaaagataatggccttcagctccatccatgtccctgcaaagaacatgatcttgttcttttttatggctgcatagtattccatggtgtatatatactacattttatttatccagtctatcattgatgagcatttagattgattccatgcctttgctattgtgaatagtgctgcagggaacacacacatgtatgtgtctttataagagaatgaatgatttatattcctttcagtatatacctgataatggaattgctgggtcaaacagtatttctgtctttaggtcattgaggaatcaccacactgtcttccacaatggttgaactaatttacactcccaccaaccgtgtataagtgttcctttttctccacaacctcaccaatatctggggtttattttattttattttattttattttattagtttttttttacttgttatagtagccactctgactggtattagatagtatcgtattgttttttattgcattttctaatgatcagtgatgttgaacttttttcatatgattgttggccacatgtatgtcttttgaaaagtgtctgttcgtgtccttcacccactttttaatggggttgtttggttttttccttgaaaatttgtttaagttcctgatagatgctggatattagacctaatagttaaggtttgcaaaccatagtttgcaaaaatgctctcccattccataggttatatgtttactctgttgatagtttcttttgctgtgcagaagctctttattttaattagatcctatttgtcagtttttgcttttgttgcaatttcttttggcatcttcatgaaatttttgcctgtgcctgtgtcctaaatggtattgcctgggttatcttccagggtttttatagttttgggttttacatttaagtctttaatctatcttgtacaggatatttttaaatgaaaaaagtatgtatactataatttttaaaatttatagcagatgtttaaggtatatagctctatgcatgtatgcactttaacacatacaaggatcagttctgagaaatggaatttctggctgggcgccatggctcacgcctgtaatcctagcactttgggaggccaaggcgggtggattgcctgagctcaggagtttgagaccagcctgggcaacatggcgaaaccccggctctacaaaacacacaaaaattagctggacatggtggtgtgcacttgtaatcccagctacttggaaggctgaggtagaagaatcacttgaacccaggaggtggaggttgcagtgagccaagatcatgcccctaaattccagcctgggcaacagagagaggagactttgtctccaaaaaaaaaaagaaatggaatttctgagagtgtcatgttaagaaaagtagattggggtgggaatatgtccatatgggagcagtaccagcagcaggtaactatcagacctgatgtttttgtagagcacaaatttttcatatttgctgtttagtcctttcagtcactctgtgtaataaggcaaggattcttttaacaggtaagaaaattgatgtttcaagatgtcagttacatggtcatcattggttgagcatggactaaatcctaggtctccacctcttaactccaggcttttcctactacaacaagcattataacatgtatctctcattccagtcatttattgtaagagcacttatggctttgaggaaagggatgtattcaaattgaagggatcctgtgtaatttgtatattctgtagacagtgacttatctgcaagaaattcttcttactgaaggtagggtactttttgcttaagattcatatagtccatccaggatctatattctttcctactatattgtaaaagaattacaggatattttaggatgttgcaggcctgggaggggcttagtcaatcatttattcatttgcccattcatcagtatgtgtttttcagatattatgtgccaggcaccattctaaacctgtagatacagtgatgaagagatgtagtacttgccctcagggaactatctttacagtctagtggagggaatataaaattgatgattaggaataaatatgatatgaattatagtaaaagtatttacaagtggtaactattataagcttgttaaggaaaaagataattcatttgtctttgtatatctagaaccaaacataattctttgctctataaatgttgaatagaaacacttcctgaataggaacattggaagaataaatacatatgtcttcctgggaaaactggggaatgttttgcagaggttggagctgagacttgaaagattttattgatcagggccatatcagacaaaggaaacaagtgcggaggcttgaaaagttgtggtgtatttgaggagttacaagttattgtggtatatttgggggtttacaagttataagatgaagtgtgaggagatgcagatgaggctggaccccagtagtcaggaaccagaacacagtgtttatgtccaccaggacaagaagtttagattttgtcccacaggtagcgaagcaacactatagaatttatagtgctttcctcagctccagaacactctaaaaacgaagagaatcagaaaaccaagatgactaaatgatatatatgacctgacaatttgcaagacatttttctccttcaatcttcacagcagtcctgtgaagtataataattatctttaaactacaaatgagaaaagtagatacaagagagatttgtttattacattctttcattcattcagcaaatactcaggcactactctacccactggagatataatgataaaatgaatgcactttcctcatagaaagtgaggatgatatgtacatggtcaaagctaaaaagaagtgcactagatttgataatctgattcaaaatctcaggctttttctactatactacacagtctctaaagaccaatagaatcactgaatggtgaaaacattattaaattctttttgtttcagctatgtttgtagctctcataattagctttattttatcctgattgtccagctactaaattgtgatgtaaaggagggagctgataaaaggatgtctcatcctttgggaatcctggttctattctttcccttttaatttatctctccaagaatctgctcttaagtgttcattttaatgtgggacaaacaagtaactgtaaaatgtggtttttataatataaaaagattatatggggttagttttcttttttttctcctttctttctttttttttttttcttttttgagacagtctcattctgtcgcccaggctggagtatagtggtgtgatctttgcttactgcaacctccacctcccgggttcaagtgattctcttgcctcaacctctcgagtagctggaactataggcgcgggccaccactctcagctaatttttatgtttttagtagagatggggttttgccatgtgggccaggccagttttgaactcctgaccccaagtgatccacctgccttggcttcccaaagttctggggttacaggcgtgagccactgtgcccagcctggggttaattttcaaatttaattcagatgccacagaaaggttcctagcaatttagaaatggctgtaatagctgactatttattatatctgtagcagtaccttgatgataacactgtggaagctgtggcctttcggaagagtgcaaaggaattactgcaactagcagcgaaaacattaaacaaattgggagtaccattctggctgagcagtggaacttgtctaggtaaaattcttacgactttccatttgtctttctgtcattttgtcctctggctttagggattactgcttgagatgacaaaatatcagtgacatttgaagtgtcatgtgtatagacagaataaacatgagtgcatgcagcaaggatctattgatttccttaaagaaattaatttgagaattataaaaaagaatgttagaaaggccatggttgtgtttactcataattataaataatatgtataaaatgtatatcagaacatgtagactatacaatagtccccccttatccatggacaatacattccaagaccaccagtggatgcctgaaatctccgatagtactgaaccctatatacgctgctctttccctatacatacatatgatgtttaatttataaattaggcacagtaagagatgaacaacaataaataataaaatggaacaattttaacaatactataataaaagttgtgtgtgatctctgtctctcagagtatcttattttactgtactcactgttattcttcttacgatggtgtgagatgataaaatgcctacatgatgagatgaagggagatgaaggatgtaggcattgtgatgtagtgttagtctactattgaaaatttcctgggaaaatcaaggaatgtgtcacagaggctaaatctgagccctgaaagatttgatttaacacttctgaattgtttatttctggaatttaccatttaatatcttcagatcgtggttgtccacaggtaactgaaactgctaaaagcaaaaccacggatatggcaggactactatagttgattctcagataatccttaaattagcattttattatttctatcccaaagattgttattgcctttttttataattataaaaaaccctctatttctttacttatataccattcaaacagcttgcattgcaccaaatgtttctactgagaggaacattaaagacagtgtcataaggtcttccatcagcctttcctaggtcattggtagtatcactaactagacatcactgttcatctgacatggacatacagacttttctacagtccttaagcaggttgctattagaatctgtgagtgatttctgggtctctgtccactgtccattaaatcaaacttctttggaatttagaattatttagaatcttaaattttgttttgtgtttatttgttgtctcttgattatcatgatagttaattatagctgtatttgctttttctttatagtaaccatatctgtacaaaagttaattcaactcctgcctttatagggatagggttgccatccaatttattgttcaattcaagagacttgagagtgaaaggaagcaccattaataattatgttggtacaacaggcataaactgggatatacggttatcctatctattagcctttgttgaaaatttacatggttcttcctgccaaggagcttactactagaataagccaaaaaaaaaaaaaaagtacatctcacacatttatgtgatatttgctttaaggtttaattttttagaaacaagattgttttataatgtgtgtcatcaaagacacttcatagtcatttgacatgatttgttttgagttttcagtcccatggttttctgtctgatttaagggcacttatgagggagttgtattagatgatatttaagaaaacttttatttttaattgtttataattctttaatagaattattttagaattccaaacaatattatccaacagcaatgcctataaggataatcgcagtcatttatttacttttgaaataattggaatgaaatgattagaaagatcataggggagacccaggagtccttaataatattaaggtacatgttttatttcttcagaacagtgctatagcaatgaattagagcacatacgtggtaaacacttagaaatatcatttggcagtgtgttgaacattgaagctgctactgcttttctttttcatacggcccatcaggtggtcactgttgagagctgttaggttctacaaattattgctcaagaaaaatatattggttaagcaaaagaattaaatattttttgcatatcttaacagccccctctatcactagagattaatgattaaacattcttatcagcaacttagtgttattaaagctaatggtttattcagaaactaaaatatatcatgaaagtttttgaggaagctgagagtgctcagacagtaaaaatagatacatagatagatagaaggttcaggtgactgctcaaacaaagtcatttagtttgaggtttaatttttaaaaataattttggtgaagcatcttaagtctaatcctgtgaaataaaatccattctatagccccagccactcaagaggccaaggcaggaggatcacttgagccaggagtttgcgtacagcctgggcaatatagtgagactctgtctctttaaaaaaaaagaaaaaaaatccttgttacaaatataatttgttataataactaattttttccaaacctaaattttgttaaaaaaatttaatcttctttttaggatggtatcgacaatgcaacattattccttatagcaaagatgttgacctaggaatttttatacaagattacaaatctgatattattttagcatttcaggatgcaggacttccgctcaaacacaaatttgggaaggtcagtaacaaaagtcggcttcatttcataagtaacatatctcacttgtaaagtttacattaagcaactcagatatggttaagaatgctacatacataattttatcactcagtattgactaggatgagttcagcagaagcctgttaccacttgtaatttctgcactgtctaggcaaaagcaagaaaatctggctttctactgggttggtgcaaaagtaattgtggtttttgccattacttttgcaccaataatgataagaaaagaaggatcttgaactcttataggtgaatgtattgctattatattaggcaacaatgtaatataaaatcaatataatgtataatatacaattaataagtaagaatcccacccgccgtacctgattgtttctcatgagtcatttaatttacagatgtcattatcaacataaaatattccattgattgctaagggatagaaatatagaatcatttcaaataagtacttcaatttcttgtttatcttatatgtcctaggctatagcagtttgctcagacatcaactagggataggtcattggggcctagatgaaatctccctctagacaatttgattcctatgccctaagcccatgatctcttgcaatcatcttgttcttaatttgcttgtcccctcggaggtgttaccctacaagcaagtaaaaatatgtttagtcggctgggcgcggtggctcacgcctgtaatcccagcactatgggaggccgaggcgggtggatcatgaggtcaggagatcgagaccacagtgaaaccccatctctactaaaaatacaaaaaaaattagccgggcgcggtggcgggcgcctgtagtcccagctactggggaggctgaggcaggagaatggcgtgaacctgggaggcggagcttgcagtgagctgagatcgcgccactgcactccagcctgggcgacagagcaagactccgtcttaaaaaaaaaaaaaaaaagtttagtcaccagaaaattattttttccatcataaatagttattttatgttactaaaaaatataaataaaatattttactgaggtcaaagtcaaataacagagctctagttattcagcaaacatttaccaaacattcactataagtatggcactgtcctctgcacctgggagacaaagatgaataaatgatagttcttacccttgagaagctcactgtctaattgggagggggaaaggctgcataaataattctgtgatgagtgctgtggcggacagatgtaccaagtccaatgggaacgtaattatttgtatgataagttttctttagggaaatgttctcagaattatttatttttttaccttaacttttatttttttcttttttccatgtgtgtagtataatgagctagactatttatgtatgtggctatgaggaatgccactttacttaagtacttattgattgttatgagagacttatttcctgatagttttatttggattattaaaggaaataatatttctttggttcttttccttttttagtcagaaagctgctctggaataggatatttctattttttttctgcagtgataattaccataagtcatttactctgagttatcatcaattgtaagaaacattattttagatgcagttaagaaattaaatgatatgttactgatgcatcccaatttcagaggtgccttaacttgaaaaaatgtgcatcttagaatgaatactctatgtatgtaaaacttaagaatctgtttctttatttttattttttaaaaaaaggtttttaaaaatgtatttcctttgtttcagtgtgtgaaggttttcatcttccccataggtagaagacagcttggaactatccttccagggaaaagatgatgtaaaacttgatgtttttttcttctatgaagaaactgatcacatgtggaatggaggcactcaggccaaaacaggaaaaaaattcaagtatgaatcaaataagtacttatttataaaggtactacagaaataatttcaggaggtagaaataaagaagtaactgaaaagaaaaccaaaaatctctttcaagactccattattagctaacactttcttagcttacccatagagtccagttatgcctgtgaagtaagaatacctgtaaggacggtttgtgaggaggaagtgtccctgggtttgtcagtccaagttgatgatacagctggtctattctcagttctgagagagagaatgagaatgagaacctgaagagcatgggttttagagtcaggctgacctgggaaaccttagctccaccctaatttgtggcctttagattttctgaacgtaatcattttatccattacattgagtaatactactgtgtgtcaggcactattctgaacgttttacatatattaacccatctagtcctcaaaataaccttcagaggtagatattctgaagccagtgtgattgctgttgaatctcagctctttattttaccagctatattaccttgagcaagttatttaacctctctgcctaagtttcctcagctgtaaaatggaaattatagtagaaattgccacatagagtggttttaaggattaaaagaattaatacacaaaaagagctttgaggtgtgtcaggaggtcctgggtgctaagtaattattacctgctgttactaatactactatagtagtagtagtagtagtagtagtagtagtagtagtagtagtagtaaagaaaactatttctcttcttattctcatgagaaatttacagattagagacatgtataattatctcaatattaaactgttacatctattcttagagaacttctgtaagagtgtcaccttttttctaagaaagataatttctagagccagtattagagtcctgttattcttaaattactttctaaggcttgaattttttctctcactgacatgatccgaaacctgcaaacctcaaaagaactgttcatttccaactactacatttctggagagaaaaagcttctttcattctgctttaacagctctttatagtagcagtgtttgggaagtgtgaagtgttctgattatttaacaagagaaatgagcagtgatagaactgtctggacagatggtgtgagtcccagattttctatcatgttactgtgaccttaaaaggcagagaaaagaacaggagatggctgagtagagtagtttctttggaagattcccccagccatatgccatttttattcttttcggcactatttactttaagaaaatgtagtatttttaacactactattccttggggatgaagaaaaacaaaatgtttaaagctagttcaagggtctttttaatgtattttaaatttttgaatagattatacattacatagttaaaatattcaaagaatataaaggatgtgtatgaaaagtaaacctttctccatcctctgcccctcattttcccgtttctagttgccctttacagagataaccatgattactcatttcttatgtatcctttccgagacaaacatatgctcgtatacatatagtatttacgttcatctctccccctttacacaaatagtattatggcatattacacactgtctgtatgttcttttcctcacatagctatgtatcttggaaaatgttccaaatgagtatgtatagaaatagctgcattttattccattgtatggcaataccataatttattcaaccaattccctattgatgaatatttaggctgtttccagtagtttactgtgaccctcagttctgcagtcactatctctgtccatatgtctttatgcacacgtgtgaaaccctgtgcaggataaagtattagactcaaattttggggctaaagggaatataagcatatttcaattttgatagatattgccaaattgccctccaaagatgtttccccaatttatattctcaaccacatggtttgagaatatgggtttattttttaaaagtgcactatctgtaaagagaggtaaacttgctcaatatttgccactaatcagtaacttatcaattacttgtaatcagtaactaaatctaccatacaccaaatataattgggagcacattagaattactgttcaaactagtcagtataatgtatcatctcaccttctccaaaggtctttttgtctttataataacctattttttattttatatatagttcattctgagaaaagcttaataatatagaatgcttactattttttaaaaggcagaagaggaactcaagaaggaagaaaaaagattttctttctaaactactctgcaggactatagaatgatatctttggtcctaagatttaacagtatattaagagtaataaaaaagataaagcttccaggatatctgctacctatcaggcactgtgataggtagttcatatatatatttatatatataatctggttaatcctcatactatccctgtgggttcggtattctcacctccagttagacattaggaaactaaagctcagagtgaagtaacttactcgaggcttttgactgttaatggcaagatcaagatttaatgccagacctgtttgacccctaagcctaaatgctttcttcttagagttaataggttaagtgagttagtacatctaatgcatttagaacagtacctggcacattgtaagtattgtgtaagtagtagctactgtcagtactgtattattattattactgttactgttattataattaccatgctgcactggcataaggtatggtactttcagcacagtggtaaattggattagtaattttctaggcaggcatattttcttcctccatctcatgatactcattccgtctttagttctcagtctttcacttctttataggaagcccttcttttacctgaaatccaaattccatttaaaaatattgactggattctttattctgtttttctccagcatccaaatctgccagtaataaaagtgatgaatataataactatgcctccagaatgtgaagttcttaattcaacttcacatttcctaaagatgctgcctagatttatttggtttgcttctttccttcccattttgaatcaactggtatgggtagaagccagaagtttgaaaggtaataataatagttaactttattgaatacttactataagccaatcaatatgccaagcttttatatgtgttatcttatttaatcctcacaataagtttataaaggagattttatcatcatcacctttattttatggatgagcaaattaaggcagacctgagtcagacctaggtgtgtatcacttcagagcccatgttcttactaagttagtgtcaccatgatctctatcatgttgttaataccccttccatgaaaacattatcagggtaatacaactactgctacatcctctaataggaaatctactccttgggctagtagtgggttccttataccttctgacagttgcagcttctgattattggatagatcttcagaaaattcagattcatcctctgtggaccacactcccatccaggtgtggatcctgtgtaatttatcacttcatttctgtaaaatgtatttaccaactgctatgtgctaaggatactgatgtgactgtaacttagtttctgctcttaaggatctcatgatctagaccatgagacatgttaaagtactctgatagcagtactgtaatcaaatatgtataatctatagttgaagtaccaaatcagccatatctagaaacaatggcaaagaagtgtggcttacaagtagagaaatttgttaggtagacttaggagaaatgtgggaaaagtcctaaaaatagatttatttaatgatttttaaattagtttatttctattttttaatttaaaaaattctgtgggcatctgtatacgtaaagtaaaaactttaaggggttgtttccttcaatagatacccaaaggtagaattattaagtcaaaagatatgagccttttaaagagttttgatacatattgccaggttgcattcctaaaaagttatgcaaaattttatacagtcaccaacataaatgagcatgcttagtttgctatatcatactgagtgttgcattgtactcacagtcattcatgactcccctgatagtttctttgagtaacttttcttttcactttcttcttattatcccaaggtatcttctatcataaaaccaggtcagtcattagtagcaagttaccaacaattattacctttctggccaggcacagtggctcatgcctttaatcccagcacttcgggaggccaaggtgagagaactgcttgagcacgggagtttgagaccagcttgggcaacagaataaaccctggctttatataaaaattttttaaaaattacccaggcatggtggcatgtgtctgtggtcccaactacatgggaggctgagacggtaggatcacctgagcccaggaaatctaggctgcagtgagccacatttgcaccactgtactccagcctaggtgacagagcaaaaccaaaaaaaaaaaaaaaaaagaaaaagaatcattacttttctcttaactattcctaacatcaactggcttttagtatacatctaaccccctccctgtcgtcccagtctccctttcaaaatccagctttaaaatattacagtgcattttgaatgtcttgttataggtgtttgttagacacttattatatagagacttttatatttaagctttatacaagtgtgattttagctgagtgagcccaggaattagaagacctgaattcaaatctgagttctatttttttgtgtcatataaccttctgagcttcagatttctcctcttaaaatgggaataacactgcgtacttcacagggtataatgcttcgattaaatactgtgtagttacctgattcagtgcttggcacgtaatagattcacaactgtttgctaattctaaattaggcaggcagagcatagaagtctgattaggaagattcattgctaggtagcaattagaaaaaaaatcacatggtagtgaattaaagcctaccaaatgttacagagatgaatataaacttgtattacatataactgcagagagatatagtttataggaaaaaaacgtgtaaagagtactgattctttggaagttttctctgaaagtgagggttgagtcagcacaatttgaatgaatattgttgaatggggaattgctattaagttagatttggttgcctctaggaaaagagacttagggccatgtaaagatgatatttggcaatgctggtaaactggttaattgccagaaagtcttgttgtttggtggggtttttgactggatgtaataaagaatctctctcataaggcttttggtggagaatgtagtaagacacaagtcctgttgaggaatattgttcttgctagtgtgtgtaggcatggaaagctggtatagtgaggaagacttgggtggttgaggacctatgctaaacaggaggtgaccggaagaaatggtaaaagaacttagcaccatgcctggctgtgaacaaggggagtccaagaaaactaagtgtccaaaataacatataagtttataatcttagagctagagaaaaattaggaaatagtggattattatgtttttaattgaagtgtaacatacatacagaaaactatacaaagcaaatgtatggctccaagaattatcaaatgaacaaatgtgtaaccagcaccccagtaaaaaaaaaaaagtatttgtcagcaccccagaaacccatatcattttccctcacgatcatagctcctgtttcccacaaggtaacagcgatgctaacttctggtattacagtttagttttacctgtttttttattttatataaactagatggtatgttgctggcttcttttcattcaacattgtatttgtgagaaccatccatatttttacatgttgtggctcttcattttctttgctgtgtagtagttaattgtatgaatatatcacaaatatttattaagtccactaacccaaatagtagttggatatttgggttgttttcaatttggggctattataggtgatgctgtagtgaacatttctgtacgtgtcttttagtgccctggtacatgcttatcttagtttgctcaggctgctataacaaaataccataaactgggtggctcataaacagaaatttatttctcaggtttctggatgatgggaagtccaagataaaggtaccagcatggtcaggttctggtgaaggccctcctcctggttgtagactgctgatttctcctcacatggtgaaaggagcaatcaagctcccttaggccttttttataaagtttccattcctgagtgtttcaccctcatgacctaatcacctcccaaaggtcttacctcttaataccgtcaccttggaggttaggatttcagcatatgaattttgaggagacataaacattcaaaccacagcaatgtttttctattgggtttacacataaagtttgggattgcttggtcgtagggtattcttgtgttcaatttcagcatattgtttacaaatagttttccaaagttattccaagttatattccagtatgttatagaactttccattgccccacatttttaccaacgcttggcattgtcagacttcttaatttgtaaccattttggtaggtgtgtagtgttaccaaattgtagtttagatttctttttccttgacttaatgaaggcaagttcatgtttactgaccatttggatatcctcttttgtgagttactggctgagtatcttgtcagggtttttttctgagttgtctgtctttttcttacttgaaaatatcttctcccaatttgtgcctttcttctttattcttttttttttttttttgagacagagttgtcacccaggctggagtgcagtggtgtgatcttggctcactgcaacctccacctcccaggttcaagcagttctcatgcctcagcctcctaagtagctggaattacaggcacattccatcatacccagctatttttgtatttttagtagagatggggtttcaccatgttgcccaggctagtctcaaacccctgacctcaagtaatctgccctcctcggcctcctaaagtgattggaatacaggcatgagctgccatgccagcccttctttactctcttaatagtgatttttggtgaataaaaagttattttaatgtagttcagtttatctattatgggtagtattatcgtgtcctgtttaagaaatctttccctatcccaagataatgaagctattcctcttgtactaccttctagaaactttattgttctatatgtaatatgaagtaaagatcaaatttagactctatactttatttggattcactagcttttctaccaatgtgctttttctgttctaagatctaatccaggataccacattgcatttagacactctaccttttgaaactttattttggtccaagattttaagcttgtcactagtaatactagattatcatacatcactgcatgtcccacttctgctcattcaagggccttacgttgctgtctgtttgaactagcttcttggtaccttgatctggaaataatcttctcttcctctgcatttctatagattttctttttctttccctctctcatgctttattggagtacttttgctgatttgtctgtcctttctatgtgatagataaaatcaggcctggtacatgtttggctaagtgagacctgagccctacatgaaactaagtcagatcctcttaagtgtagtctacactgttttgttaagatgataaggtgacactgggttgatgacttgatccaacctaacgtggttggagaattaaaactatagaattaagttagcctagttgttttcaatcattctgcttcacaagaagttaaaagactagaggtatttgttgaatcctcactcattgtctctctcagcttcacagattgatactgtgctcctacagttgtaactccaagaaacacatttgtctttttagtacttacagctgtgaagctaaaggcaaatttgaataatttctttaaatgagtgtatttaaaacattgacttttctatgaatgatctcgtattttctgctctgtttatgcgtttatattttacaacatacagattatgtcttaggtctccttaattatacctccaaaccgctagtaagtagcaggtgcaaaattgaggaattgagggaagaactttgaatgcatgttatatgggaattgtatacttatacaatatgtagaagtagcagttatttatatagcaagctttgtttatttttttaagagaagattgcctccagatgaataagcagtaaatctttcatttatgtgaagtaagttatgttttttaaaactgtcgaatagtttgttgtttgaacataattctataagatattatataggatagtattctaagagaaataaaagcatattttcagtaaaagacttgtacacagatgtttatagcagtcttactcatactagcaagaaatggaagcaacccaaatgcccatcttctggtgactagttataaaattatgatatattcaaacaatggactaccactgaacaatgaatagcaatgaactactgataaatgcaataacatggatgaatttctaaaacatgatgctaagtgaaagaagtcagataggaagagtatatactgtgtacttgctgttatttgaaattgcacaggaaaaaccaaccaacagtgtaataagattagtggttgcctaggaccagggtgggttgattgcttgactgacaaggggcacagggaactttggacgaggggttggtagaaatgttctatatcttgattattgtggttacacaggtatatacatttatcaaaactcatcacttaagatagatgcatttcattatacttaacttatacctcaaaagaagttaccttaaaagtttaagactgggcacagtaacccatcagcatttggggaagacccggtgagaggatcacttgagcccaggagttcaagataagcctgggcaacatagggagaccccatgtctacaaaaaaataaaaactaaacttaaaaaaggttaaaaagataaaaaacagtttgtgacttagaaaactgatgctaagagaaaaagggtctgagatcacaggttgaaacagagggatatatgggaccaaaagcaatgaatttggtcagggcagacctaattgcaatgataaactttgagactttcacatatgattaaacaaattgtgtaatctgatagtaaagccttttgtattgagtatgaaaattgaaactataatttaattcttttaaaaattatccattatatacaaggagaaatcctgtaaaagtctgaaggaaagcaagcacaactggagtctaactggttgttgaagtgctattagatctagttctgggaagttatgtggttatgtagagctatagagtttttggaagttatgtagttatgtcccaaggctttgtcctctggcattgaggaaaactttagtacttgttttaaattgatagtttttaatgtagtcattatgtatatgtatatatacatgctgctctaaagacacatgcacacatatgtttattgtggcactattcacaatagcaaagacttggaaccaacccaaatgtccatcaatgatagaatggattaagaaaatgtggcacatatacaccatggaatactatgcagccataaaaaaggacaagttcatgtcctttgtagggacatggatgaagctggaaaccatcattctcagcaaactatcgcaaggacagaaaaccaaacactgcatgttctcacttataggtgggaattgaacaatgagaacacttggacacagggtggggaacatcacacaatcacacactggggcctgtcgtggggtagggggagaggggagggatagcattaggagatatacctaatgtaaaggacgagttaatgggtgcagcacaccaacatggcacatgtatacatatgtaacaaactggcacgttgtgcacatgtaccctagaacttcaagtataattaaaaaaaagaaaaaagaaaaatctgggatggctggctttagtttatactcagctgtgttacattaactctctcaaaacaaaatgcggtagataactaggtcaataaatgtgatcattagttaaaatgtgaaaatgataaaattttctagaaaaataaataccaaaatcaactcaaaaagatctagataacctatattcattcgagacagtgaattagtaatccgaaatcctcctttctccctcttttccctaccagagtatactaaaacctagaaagtttgctgcaaagtttcactgtgccttcacagaacagattatccctgtattgtacagcttatttcaggcaatagaaaaagagaaaactaaataactattttatgagagtgatagcaaaagtggacatgaacaataccaaaaaaaattttttaagggaaattactgtctcagtgaatacagtgaaaaaatactaaatgaatagaattttgtagtgtgtacatattaatgtaattctctgtattaaaggattaaaagattaaaggaacaaaaacactatgattgttttaatagatgacattaacattttttgataaattttataattaaccaaaaggagagagacctcttagcaaatttggattaaaaggaatctaggctgggcatggtggctcacatctgtaatctcaacatttagggaggccgaggcaggtggatcacttgaggcaggaggtcaagaccagactggccaacatggtgataccccaactctactaaaaatagaaaaattagccaggtgtggtggtgtgcgcctgtaatcccagccactccagaggctgaggcaggagaattgcttgaacccgagaggtggaggttgcagtgagctgaggtcgcaccactgtactccagcctgggtgacaaagcgagactgtctcaaacaaacaaacaaaaaaatctgaaatttcttttacctaataaagagaatataacaaaaacctagagtgagcaatcatgtttaatgataaaactttagaagcccttccattaaaatcagaaaaacgttaggaatgtgtgctagccctgcttctattaaacaatatgctagagggcttaggcactggaataacatgagaagaaattaaaagttaaaagaagagaaaaaattggtagtgagaataaaccatttatgttttgtaggaaattcttgtcaagaatggctctactgctccaattctagagttaatgtaaaacttaagtttaaaaaagccaggttcgggaacaggcaacctacaaaatgggagaaaattttcgcaacctactcatctgacaaagggctaatatccacaatctacaatgaactcaaacaaatttacaagaaaaaaacaaacaaccccatcaaaaagtgggtgaaggacatgaacagacacttctcaaaaaaagacatttatgcagccaaaaaacacatgaaaaaatgctcatcatcactggccatcagagaaatgcaaatcaaaaccacaatgagataccatctcacaccagttagaatggcaatcattaaaaagtcaggaaacaacaggtgctggagaggatgtggagaaataggaacacttttacactgttggtgggactgtaaactagttcaaccattgtggaagtcagtgtggcgactcctcagggatctagaactggaaataccatttgacccagccatcccattactgggtatatacccaaaggactataaatcatgctgctataaagacacatgcacccgtatgtttattgcggcattattcacaatagcaaagacttggaaccaacccaaatgtccaacaatgatagactggattaagaaaatgtggcacatatacaccatggaatactatgcagccataaaaaaggatgagttcatgtcctttgtagggacatggatgaaactggaaatcatcattctcagtaaactatcgcaagaacaaaaaaccaaacaccgcgtattctcactcataggtgggaactgaacaatgagatcacatggacacaggaaggggaatatcacactctggggactgttgtggggtggtgggaggcgggagggatagcatcgggagatatacctaatgctagatgacgagttagtgggtgcagtgcaccagcatggcacatgtatacatatgtaactaacctgcacaatgtgcacatgtaccctaaaacttaaaagtataataaaaaaaaaaatatatatatataaaaataaaaaataaaataaataaaaaagccaggttcagttatagttgatgttgtctctatctctctgagcctagtaataataaaacactgttggttctgggatagtggaagaacttccttttcatttagcagttgtattcataggttgtgcttaaactgattgtaattaaactgatgaaattatccaactaccaccaagtagttgtatagattttaaggatatctgtgagggaaaaaaatggtctattccaattattgaactactgttttatgtaaaaataatatgaaataaaagtggtatgaaatagaaaatggatggaaggatttttttgtggtaataatatctcttaaacttatattctgatttagggttgccttagtctgcatttaaacctgttcacatgctggatccaatcccagggccttaaagtacaaactgcttagccgaacttagtcttagctttaaaagccgaggtaacattgcagacccatggtgtattttagtcttagtcattatttactggtagcctggacagagtgcatggcatgtgctgttctgtgtcattcactctccttcacttcctccctacaatcctattttataatcagtttttacattttattgtttgtttatctttcctcttaggaagctgggattttctttttgctgaatggattgaaaaataattggggaaaaggaaaccacaaagagtttagagaggtttctgttaagtacaaaaattaacatttgagttaaattgtcttcgaattattttcacattatttatatatttaaaatgttttggctttgctcataaattcttcattgttcaaaacattgcttttgtaaaatttgtagtattccctttcaccttatctatcctgtatctattattatttttccctctttcagctttttgatgagaccacaaaggataatacttagaggagtttcctggcctgtattacaagatagaccatgagttctgcctcaattcaacttcattgtgtcaacttgataggataagacaggtggacattctgctaaccagcatctgattagagagggtggaggctggtgatggattgttaggtgtgatgacaaaataagcaattccgttaacatgagtgtgcagagtaaaattgggaccagcagatggtggggctaagctgtatcttatttctcagctatgagattttccgtggccgccttttcacagtagccagctgggattgtccattaactgggtttgagtaaaagggagttgttgctttctttagaatttgttcagcctctccttttcatgtatggctttatgttcatttggtagtaaaacacgatattcaaaggcagaatatatgagaactgaccttttcttggagaacatcccagttagatcccatttccacaatatgattacactttgaaatctggcttttccctgttctttctttaatcctctgatattttaaattcctgtaatctctgctattgccactttaaacctcattactgaaagttcttcccacactgaaacacttctcagaaaaaaaatgcagaatatagagcagagctataatataaacttaaacagacctgctagttttagctttcttttctagtatacataatttagtttacttgatccaaaggatctttaagaaacatgttttggtttaatttctgtttgttttgtttttttttttgagacagggtctcactgtgtcacccgggctggagtgcagtggcgtgatcttggctcactgcaacctccacctccagggttcaagtgattctcctgcctcagcctcctgagtagctgggacgacaggagtgtgccaccacacccagctaatttctttgtatttttagtagagatggggtttcgtcatgttggccgggctggtctcgaacttctggcctcaagtgatctacctgcctcagcctcccaaagagctgggattacaggcgggagccaccacgaccggcctggtttaatttctaaaacttacctactaatcgacttagttctgcaataaatatagttacaatcattataactagtattccttgggctggtttaaagatgttctttagcatttgagatgaaaggcagaaaccacaggtaggatcatgtaagctatggaaccaaaggaaaagcctggaaatgcaacttggagtcctgcttactctgtatccttggaaaatccagattgtgaaagaaaagaaaaagatcattttcatccatcttttgacagctttctactttgacacttctttcctctacagttccaacagaaagcccaaggctgactttgatttgcctgacttgggtatgttcccatccctgcctcaatcattaacttactggcctgagtcttagtgatggggtcagcctctcctcaatcctatgagcttggaacaggaaaggaaaattggagaagaggaaagggattctggacagtcaaaaataattaaatatccactctcttcccaaagctgtgtaatgggagagcactgtccttcagccaataatgcactagcagctagattccttagctagaccttcttccactgttgaagcctaatccctctgttttgctgcagatacctgtttccgaagtttacactgtgctggactgagtttgtagacatgaaggtccatgtaccctgtgaaaccctcgaatacattgaagccaactatggtaagacctggaagattcctgtaaagacgtgggactggaagcgctctcctcccaatgtgcaacccaatggaatctggcctatttctgagtgggatgaggttatccagttatattgagatagtaggttgaaatgggagaatttctcttttggaaaaaaaggtagataactgtttaaaaaatacatgtctatttgtcaaacataagtgggaaccaaagaaaaaatgtgacaagtttgaagacacagaaagagtcatctgatgtaattctctcacttagtactgaggaattttcatgtgccacatacaatgctaggttacagtggagaagcctagatgaatgagacaaatacctacttcttttattcctccttttggtaaacaactcaattttcctttgagggaaccctcccccaccctttgaagagttcaagttctgtacaggtttttaaaacgtgaagtaatgtttgaactggaagatgagctcaccaggcaaagctaaggaaggatatactagttgaaaagaataacccactcctcttctgggcatttaagctggtatgttagtgctacttttaagattgtggagtctgagttaatattcaagtgatcagactttgagtgacatcaagaaaagatgatatcaggttcatttttcaactaatcttatgtggaattgaattagagaacaaggcattattcttttagggaaggtgagagcttatttgtatcagagcttattacttgtcaggataagtaaatttctgtacatgtactgttttcatatgtgaagtgagaagaaactttatgcttgtttaatgcttaaatttccatccattgtgagaatattttcactgacctctgatggcacttgttgacaaatcattcaagtgagaccatgttactagacatgatcttgaaagaggccatgatttcacaaaactcatttttattttattctcagacagtctgttaggtaaaaatatgagaaattcatgtacattttatattttctgaatttataatctgtgcactcccaattttaatgacactaaaatattaatagaattttttaaatatactctaatttttaaaacatactctttattatcttcatttatcaattacagcttcgtatctctaatttatggtctatataccaatttaaatggcatgtaaacctgcctgtttcttctcctcttctaatatatcagatctccaaaatggaagctaaatggtggacttgacaactattcaccctacctcagatcatagagtttgtaaagtttgtgtccctccccagtttttcagtctgttgaatgtcgatggggcaagaactcagacttctactttaccaagtaccacacactctggaatgctttagtttccttttcccctcaagatgtctgagtcagctaggatgctgtttaccccatctctctcttatatcacttgaatgatatattgtaagtgagaggtaaaggaaaatgtaggcacaataagcactgctatttttctctttgtctaggaaaggaagctgaatcttatatcttatctatgctatttaggactactttctggagcttggcagattttcctctgacaccagagaacaatagtagtctcaagaatggaaacctgaatgtctgagggaatgggctggtagactttttcgaaaacaaattagagaaagtaacttacaaccacccattccggatttgtaaagcaacatgaaaacctttgataaatgataaccaacagtcttctgtcctaatttgcattctcaatgcagaattattgggtctttcataaataacatgagtggtttctggagacatttaagattgtcagcaaacttgtcccaaaatggcacatcatcataatccattttctctttgctagaaaatcagcccatagagtgcattcccaaattctaaatagctgaccctaaattcatttttcatgcttaaaaataatagaacaaataataatactatttttgggcaaaatccaccctacttgatgaggaccatttgcttgtgctcagtatttagaaatgcatacactccacatttctccccatttccaattgggactcccattctttgccaggagatcttacccatcccttttcagattaatcttttatcctttcctgaagtacaaagtcttaagagtgtctgaaatccaagacatcttggcccaattgacacaggttctatattcttccctacatagaccactggctgctgaaatacttttcttgtcttctggtttcacaggcttcagctcatgggttccaccctaacttggggaaacaaaagccttctctagaatctgaaggccaggcttacctctgattctgattcatccatacttcatcttatgtattttaacagttgggttctgtggagtgtccagagaccttgggttaggtatatccatcttcagtacctcattggatcacttttctttcatcacttgagtattctagcagtcattctcctaatctgaccactttcaggtttagtttacctggcttacctggggaagttgacaacttgttggtagttaggcacccatgaatgtctccagagacatcctgagaggcaagattcctcttaattgataaccaggacaaccaggtagtcacccagtcctctctaagcagggagcacttgtccttctctcctctgctgcagctactgatatctggcccctggaataaaaccatagttcctaaaattgagcatccctaagagtagctgcttggtgggacagctgatttctttgattccctagctgcaaaacctgaaattgaccactaggtgacagaatgtttgccagtatccccacaaaacaagttaaaacttaagtgaaaatcattctgcttttgaatcttaaaagctagaaaaaccataatgtaatattctttttaaaccctcttattttataactaaataaataatcacagaaaagaatgatctgaacaagaacagctgaggctaaaacccaagactgccgtgactcctagtccaatgtctgtttcgcatcacaacacagtatctttaacagtgcttgagatgcttaacagagaaggcatccagtgcttcattgaggctaagtctcagggtgtttctgccgcttagtatctttttgttcagattgagaacctaaggcgacagagaggtcaaggggaagtattttctagttcagaattcagaattcttaggcaaccttcatacctttatctggaaaatgccttctctccagacaataagacagttcacatctggagacatcagcctttggtacctaattctctaagctcaagatgcatcccattgccactttaccattctatttcccaagggaaccatcagcaccaacctgctaaatgcctgtatttgaagtctctccccttcctgaagtgaccttttatgaggctctttccttcctaagggacctttccctggtagtagtggtctcattcacaaaaaagaataatagatgtaactggagtcactttgcagttttcaagattttttttttatctgcttggctggaaaggagactagagtatctagtttttagtatttaaactacttttaattatttatattgatactctctgataaatgcaggtagttaagaatagattgtactcattcctttttgagtttgtgacctcaaaccattgtttttattcttacacgactacagtacttcaaatggcacatagataggcaggatattacataggtaagcaggaatttatacattgggtaccagagctaaatctggaaaacacatttggaatgagcttccacacttcagtctaaaatctcacccaaacttatggctacatatttttctaagtttcccccctagtttcactttctggaaagtgaacagttttttaaatcctaaatgttataaatccttaggagaaatattccctcaaaacctagtcaagaaagtgccacattcccaccttctaacaggtaattattagttgtaatagctttaatgcatggaaaaacttcagttactgaccagtcaagagaatttctcaagaaaaatcccagcaacgttccctctttcctccttgtcttccactatcattaagacctgggctagatcacctctaacatctcactcagggaaggcaatgtgttgccataaaaagaccacaagcttttgagttaggcctgaatttgaatttcagcttaatcatgtgggatttatggtgggggccctttcagtctcaatttccacattagtgaactggggaaatgatacatacttctaagggtttttagggggattaaatgaagtatacagttcttagcctcaggcctaggattaagtaagtactcaagaaatgtgcaattttctagttccatgtttcttttctaatcttcaaatggaattatagaaaccatgggtcagaacatattcctttactcaaaagattgcatgactgaatttgcttaagaaaaaaaaaattgtatcaagtcattaatacaattatacattaattatattacattaatacaatatatggtttgtgaattcagagacattaccagtttgcctccttctctcaatagaacttgtattttcattttcttggttaagcagttgtctcctaatattatcccatatgctacctagtttgctggtcccaagcagtttactgtacttcactagatttggtacctgctctcccctggacttctttttcaatattctagcctttcctagatgtaaatctttacctccttgttagtgaaattagatataagccatgatttggagagggaagaaatctggaatacttaatttcatttaattatctatgctgatgaatgcctgtatcattgttaataaaggagaattgaaaatactcatttctactttctgccctcaaatttctgtttctatctcaactaggcaagaatcagcagggtgcatgatgccattttaagctgcttcacatcagactgaaatcctaattacagttcataagtgaaacagactaattcaatggcaataccttttgtataggtcctgtgcttaaaggaggcaagtataaattttctaataagaaatccctgcttcttttgggtgcagtggctcacacctgtaataccagcagtttgagaagctaaggcaggtggatcacttgaggccaggagttcgagaccagcctggccaacatagtgaaaccccgtctcttctaaaaatacaaaaaaattagctgggcatggtggtgcacgcctatagtcccagctacacaggaggctgaggcaggagaatcacttgaacccgggaagcagagtctgcagtgagccaagatcgcggcattgcacttcagcctgggcgatagagcaagactctgtctcagaaaaaaaaaaaaaggaaagaaagaaatctctgcttccgtactatcaaaacttctaccctagaataccccctggcaccttctaacccaacctaatacagagattttgtagggacccattaacaagctcctatataattataagcagctctcacagtagggttgaaagagaatataaggaaaattagaagtactgtatttttgctattggaaatgaaatattgtttcatgcacctttgaaaaaaataacaggattttacagccttctgatgattcattcaaagcatggggaatagttcatatgtttgttaaatgaaaatcttatgtagctatttgtgtgtccctcccacttcataactacaaaaacatatatatgaatttctaaacaaagtgatattttaaagatgaattgattcaatgtgtacttaccagtttactgtgtggttttatcttcaggtacagatagtttgtggtactacttgaaaatacctttaatattattttcatcagaatttgtaatatataatccagtttgggatgatgaataaaatttttctaatctcttgagatatcttgtatttatttttgagacttgcagtagaaataacagacactaacattcacagacaatctgataaaatagtaatcttgccaccagtacagtatttctaaaattcaactatggggaccctagtagtctgcacacatatacctgggtatccaaaagttctcagagataaaacctgccagccaaagaccaccaggaacacacctgtaatcaaacaaagttaggtttattagcttgttgtagtaagaggaaacagccaccatggggaatcataacatatttcagggagaaggaactagaaaggtcttttataggctttgagctgatgtcaaaattgttaaaagtaactgtggtggagtggaaataacacaggacatggagtaaaaagttctagtttgtctgaatccaacagtgccatgaccagtaggattcatttcaggtgtacatggctagttcagccttaaaacagtcaatgtaatgcactgtatcaacaaagtaaagaaaatcatatcaatagacacaaaaagagtctgacaaaatctaaccctcattcatgagaaaaactcagtaagttaaaaatagaagataattacctcaacttgatgaagaacatctaaaaccaacaaacaaaaacctgtatgttttaatagcaaaaaactgaatgtttttcctctaagattaggaacaaggcaaggatgtctgctttcatcactcttattcagcctaatactagaagtgctagtcactgaagtaaggcaaaaaataaataaataaataaataaataaaagacatgcagattgcaaagaaatttttaaaaacttttcatttgcagatgacatgattgtttacatagataataccaaggaatgtattttaaaacaagcaaacacctggagctaataagtgagttttagtgcagtcacagtatacaagatcaagaccaatacccccaaatcaattgcatttctatattctaacagcaaacatgagaacaaaaacacagtactatttaaagtcaccctgaagaaaatgaagtacttaggtataaaattaacaaattatatacaagatttgtatgttaaaaatgctgatgaaatcaaagacctcaataaatggagatgcataccatgttcatggattggaaaacaacacagtaaagatgtcagttctactcaacttgatcaataggtttaatgcaattcctatcaaaatctcagcaaggtttttaatagacatagacaaacttattttaaaatgtatgtgataagtttatttctctagaatatctcaagtaatctttataaggaaaaagtagcagaaagatttggtatcagaagacctaagttcattcttgcacttcaatagataccacatctgatcttataaggtagatgttatttccccttgttttgcagatgaggaagctgcaatttagaggtaacacagatcttaaatccttgttttctgacttgaaatccagtggctactcactctgccaattctacttaactgttgatctgaaaaaaaaaatttttttttaattattacttaaaaccagcctctgatactgaaagtgagaaggatcactctacccaatattaaggtttattatatagctatagtaattgttatgggctgaattgtgttcccttatatccctcaaaattcatatgtttcagtcctgacccctagtatctcagaatgtgactgtgtttggagatagagcctttaaacagctaattaaggtaaaatgaggtcatatgggtgattcccaattcactggtgactagagtccttagaagagcttaggacaaggagaggcacagaaggaggaccatgtagagacatagagagaagatggtcacctacaagccaaggagaggatccctcagaagaaaccagccctgccaacaccttagccttggacttctagtttcctgaattgtgagaaaatagatttctattgttgaaaccactcagctgtggtactttgttatagcagccctagcaatctaatgcagtagtcaagacagtatggtattggtaaaaggatacgcacatagatcagtgaaacaaaataaaccagaaattgacccatatgagtatgtccaactgattttttacaaaagtgcaaaagcaattcagtggaggaaagacagtctgtttttttttattttttcttttatagacagggtctcactgtgtcacccaggctggagtgctgtggcacaatcattgttcactatcacctcgagctccatgggctcaagcagtcctcccgcttcagcctcccaagtagccaggactacaggtgtatgccaccacaccccgctattattttattttattttgttgttgacacggagtctcattatgttgcctaggctgctctcaaactcctggccccaagctgtcctccacctaggcctcccaaagtgctgagattgcaggcatgagcctccacacccagccaagatagacctttcaacaaatggtgctagagcaattggacattcataggcaaaaacaaactcaacttgaatgaacctcacactttgtacaaaaatgtacttaaaatggatcacatgcttaaatgtaaaatataaaactgtaaacccttttgggaaaaaaataggagaaaatcttcatgatctagggttatgcaaagcattctttctttgacttgacacaaaaaacacaatgtataaaagaaaaatggataaattggacttcatcaaaattaaaaattgctgctctgcaaaagcccacatgtaggggctgaaaagtccagctacagactaggaggaaaatatttgcaaactgtgtatcttgacaaaggactagtacctggaatatataaagaacctgaacactcagcagttttttgaaaaattcaattagaaaatgggcaaagacatagacagacatttcattgaagaggatatacagatggctaagaagcacatgaaaaagatgttcaacatcattagccagggaaatgcaaattacaaccacatgagatatcattgcatacctattagaatggctaaaattaaaaataatgataacaccaaatctgctagttgtttcttttatgattttcttttttaatgtgtactgtgcaccgttgtttttactgtgattttactaaagagtgtccttaaacattttacaaacattcgtaataggtaacactcttcataataaaaaggaataaccttgtctgaatttttggaagacaggtttttaggtttttgtttttgcctttcctccaattctttgttgatttactttgtcattttaataaccctctttttatgatttattttctctttattattcctttgtgttcttcgagttttctttaattagatttatcagtaaagccctttagcagctagtactattgttcatagttctctgcaactttatcagtagggcttttacaacctaaaacttctaaattcaaattttttcttccgttaatctcaataatttggaggatgttttctagtgaattttgcaggaaagttaattgagtggccaatgttctgaaaatgctatactaccaaatgtctttcagatgacttagaagatgacagtctcatagttggagagtggaagagtttgctttggagcccaaactgggcaaccgtctaatccagccagatcctgcttagcagaaaaagcaaatttctggcatgtgacctcataaacaagggaaaagctctccttttaggatgatgtcttctcttaccatctatttccccatgtcttagtggaaggagccatctttttccccatgtcttagtggaagaccagagaattatctagagcatggtgtgatgctgcaaatgatgtatctgtagccactagccacatgactactgaatatttgaaatgtggcaagtgtaactgaataactaaatatttactctaattttaattaatttaaaactagtagctagcatattgcagatctatagggttttatgggatcagcaagggttttggatttgtcgactggaatccagagccctccacagcctagttcggtgatcttgggctagctattcaacttctgagttctgaattttttttcaactaatggggctaaattaatacctacctttaaaggttattaaaagaattgtaagaaattgtaagaaatctgcagtgtctggcacactgctcagtacatggtagatgtacagtacatggtagatggtcagtgaatgataactattgttaatattatgttcacatggttttacatctgcctttggcataaatcctatcagcttgtattttcctgataatctcatgtcacaatttttctgtaagattggtatttcagatccctcctgggtagaggccctatcctgagcactggtgttaagaagcgaccctggcctcaagagcacaggtacaaggcctgttctttggggagagagtatgtggggttaaaacataacacttaatggaattgagtctcaaggaccaggcttaggcaaagagacaaaagtcctagactttgtagatggctgtctgagcacccgagtctagaaaaagctccaggaaggaggacagggactgggtaatgaggttcagctgagtcttaggacttgtagaacagaaaatttgaataaatgaagaaagaaaacatttctgagtaagaggagtcagtaaattcacagaataggctttatgggacagtgaataagaccatctgccatatggataaatagtgaaagatacaactggaaaagtgggcaaggaacagactgcaggaaatgaggggactgaatattctgctatgaagtttggatatgagagagaaaagttttgaataggagcatcatgccttcaataaacacttctggcctggttactactcaccggatctgtcctaagggtgaggttcgacaaacattcaggaaaccccttcaaggatagagcagggatttaggagaattcagattcaccgagactgatcctagagaccctagaaccctgatagttgcagggacagaggatagaaacttagccagatgggcataggaccctagtggtttaagtaaggtcactcctaggaattatcagtcagtgctagacatgggcacaagcagtccagagtcaggaagcgcttgagaccaagtgagcaggggacagtttggtgatggtctgggaagtggagctcaagagcagcattgcaagccacagaaagggagtgtgataggacaaggcagggtcttatccagagggttccagggaattagaataggcctttgagagccatgacaaaagctcattttgatgaattgggccaggagagccagtgagattctaggctgtggagaagacatgaaggcaatttttggaagacagcagaggaatggagaccaatggtcagtgctagacctgggcaccacaatacaggcaatgtgagggatgtgggaaagaggctggagccatttctatacctgtcgcttcagttagaaactaggacaggatagacttttcacatgatgatgccacagggcataactgaaagctagggagaacagaagccaggaagggagataagcttagtgaggattttaaattctgggtcttaacttagtcctcatctccctattggctgttcacctctggagactatgggctccaaggcgtaaaaagtaattgctctagttgtactaggagagtagtttgtgctaacaactgaccttctaccctacatttacctctacgagaaggcttgggactccagtggctttctggaccataataaaaacaaggccattttgtcttcactcttcctcgtttccacccagacagattctgctgcctggataagacagctcaggcagggaccgctggctgacgaggcctgggcaagcctataatcccagcagagagcacagggacaatgagtgggaggggagccagtcacaggttgtatcttattaaaccagtctgcatcagctacagtgtacgtctcagaaacagatctgaaaccccagctggtaacctagttagttcaggcagcgtgtaaagaaaccatatccccgccagctaaaaagatgcatgtgctcctgggtagtgcagaagtatctgttatgaaaagcaaaggtaacaacagttgtgggaaattaaggtttcctctgtgtgtttttttattggttgcatttgaggtgacatcctctaattttcctaagcacagtggggcctcctggaaacatctgctggatttgaggagtaaggggatgcttccctcatcctccgggtgtgtgtatttggtttgggatttgtcaggctgggtagctgagggctctgggcagcttgacctggcagatttcccccacttgcctgaaaagcagcctagggggcagaggcccctccccagctcagccctgcaccttcactctaagcgcctggagctggggccttttatttcaagtctggtccccagggagcagagtgggaaatgaggacagctgataagcctgacagtattgactttatggggagtattcaatgaatttactttctgcaagtaggctgcactcttatctgctgcccacagagcatctaaatcctcatctaggagacccatcgatgagtcacgtcccttacacaaagaccagagaataaagaaggaaaggggaattccatccacccctttcttttctccagtacctggtcctgcccaccccaacacctcccctcgctttccccactgcgtttgggtttattggctgaaaacagaagcactcgcagctccaggcctacggagtcaaggccaagccagcctggtcttgagaggtcgacagctgggcacacccagggctgtatgtccctctaactggtaactatgggaagctcacttgaagtagttgtgtgcaccgctttatgctgcaacagtcaacatttgctctggacagaaataccctcacggctttaacgccaggtgtcttggagataaaatgtgggtgtgtgggcgttaccaaggggtcctgggtctggggtgctggagagtggaagttacatgtaagagaaaggcctgatgcgcaagagaagtttttctttcccctctggcttctccctcatccagtcctgggctctgtttcaaatattagaaaaaaataaaagcttcttagcagcacagaaagtaagtaacttgaaggagagaggtgggagccagaatgctggattgggcagatgaaaggaaaaaactgaaagtgccctttggcagaaattagagtcatgtgtttaggttcaccatctagcttttagacagagttttttggtagtaaaaataaaatgaaatctctgtattgagtaactttggtttcattagatgacttagcaccattttttagtatttattccaaagcactaactttttatacattagctcactgaatcttcacaataacccatgagatgatatttctgagttatagctgagaaaactgagtctgggataagttaagtaacttgctcaggatgacaactataatagcatcaaagcaaggatgcaaacaccagccagtctgcctccaaagccaagtcaaaggtcttctcttagctgccacactaaactgcctgctatttggcatttttcaatatcttatctcagtccatggccaatcaatgagtatttattattcccacgttattggaaacaggcttagcaggataccactacctgtccagggccacaaaaccagtgtatatcagagactctggtccacagagtctagcatctctcctaaaggtctcgccctgctggtgcattgcccactgctcaggcagagatgtgggccacatcagtgcgtttctcccttccaggtgccctggtttcctgtgtcacctgctttcacctgctgctacttgcttgataattttcttagttgagggaggttggaatgagggaggcaggaagagcctgggaggatgtgagctgttcactaagttgctctgtgggccctgtgaatggagtagtatgaacatccatgagaatctgcagcttctgcaggctctggaaagatgcctgtctaaaaaccgctagtaaaactgagtcagccatatgcttgtttctttaagtatatgttttagtatttgacttctttgggagaaatacattttttgtttaggataacttgttatgtaactttataattaatatttataattgttcatattgaataagaaaaccttggtgaaatgcctagcatgacacttggcacttaaggttgaataattggggcagaggattaagttcctgggccagagttgatgcttaatgtcaacccctcctcaggtcaagccatcatctcctcttgcctgcattgctttcacggcatcctaactagtccccccaccccacctcttctcttgcccctctccatgtagcagacagaatattctctccttcttaaaaaacaaccaggttgggcgccgtggctcacgcctgtaatcccagcactttgggaggccgaggcgggcagatcacgaggtcaggagatcgagaccaccctgactaacacggtgaaaacccatctctactaaaaatacaaaaaattagccgggcgtggtggcgggcgcctgtagtcccagctactcgggaggctgaggcaggagaatggtgtgaacccgggaggtggagcttgcagtgagccaagatcgcaccactgcactccagcctgggtgacagagtgagactccatcttaaaaaaaaaaaaaaaaaaaaaaccattctatggccttggaaacatttacctcacagaagcaagctatgtgtctgctgacagaaggcagggcaggctggaggcagctgtctgaagaaataagagctttcttgcattcattcaacaaatatctgatcaagcagcttttatgggcagtgagcacaattcctggggtctagtgatgaaggaaactaagtctttgtcctcatgaagtttataatgtagcaagtaaactagaatgagatttgttttgcagaattcaacatgaaggtggggtctcctttaaagaaaaaaaagagagagttaaaataattgaaatttatcaaaaagagtttcttatgaccaagagtcactcccacgcaccccaaattaagtataaagaatgggcacagtttactttggaaaatgcaaatttaaaagcaggggttgtaatattaatataataaaatgaaattcatggtaaaaagcaagatttttatattgatataggctacaatcctctaagtcaataaaaaaacttccttgagtctttatgcttcaaaagcaatgcagcaaaaaatgtaaagatctaaagcaaacactcccggaaaaacaaaaagaacagaaacaaaatagtaaagggagattttcacacagtgctctcttgaatagatcaaatagacaaaaacttccaagaatacagatttatttaatggatgtgtaaaaagacattttaccattcaaacagagaatatacctccttttctagtacctgtgaaacatttataaaagttgaatatatgttttatcaaagagaaaattctcaataaatatcccaaagcaaaaaacatacagggcatatatttcactatactgcaataaaattagaaactaatagcaaatggttgccaaaaaaatacaacaacaagaaaatttaaaaacactttataaaagaaaaataagcaacagacattagaaaccaatgacaatgatactacaaatggaaacaggatatccccaaaggtctatcagaagaaagttcacagcccggagtgcttttcttactaaacaagaaagagtaaaaataaataagcattcaatccaagagtgatagagtggagaggaaataaacgtaaacaaaagaacagatttaataaagatatagtagaaagtgtatttgaaaatcataaaaatgataagcgaatcccagagctagttttttaggagcaataaaatgaacagacttttgcaacactgatcaaga

SEQ ID NO: 652 - DNA, 7556 bp, Homo sapiens
attgaaaggaaacacactgaatgaggaaaaactaacatacggtcatcaacatccttgtataacctagtttttaaaaaaattggatttcaaagctggagaacaaaagacatataaaccttagatatcaagcataagagaggtgtcagtatatttgaaggattgaaggaataaatgtaagcatttgaagaactaaatgtgtttaaccaaaatcaaacagtggagacaagaaaacaaaattatcttcctttccaaatccaaaaagatgaaaacgactgagatactttcaaaagacaaccaagtgagcagcacagactaatgagtagaatcaataagaacgtggttttggcccttttaacgctgacaagttctgcatttctgctgtttcagttgtactactacaagcactatttatcaacaaagaatggagctggtttgtcaaaatccaaaggaagccgaattggatttgatagcacacagtggcgtgcagttaaaaaatttattatgttaacatccaaccaaaatgtaccagtgtttcttattgatcctttgatactggaattgattaataagaactttgaacaagtcaaaaatacttctcatggctctacttcacaatgcaagtttttctgtgttccaagagactttactgcatttgcactgcagtatcacctatggaagaatgaggaaggctggtttcggatagctgagaatatgggatttcagtgcctaaagattgagagtaaagatccccggctagacgggatagactcactctctggaactgaaatccccctgcactatatctgcaaactggccactcatgcgatccacttggtagtctttcatgagaggagtggcaactacctctggcacggccacttgagacttaaagaacacattgacaggaaatttgttcccttccgaaagttacagtttggtcgttatccaggagcttttgacaggccagagttacagcaagttactgttgatggactggaagttctcattccaaaggatccaatgcactttgtagaagaagtaccacactctaggtttattgagtgtaggtataaagaagctcgagcattctttcagcagtaccttgatgataacactgtggaagctgtggcctttcggaagagtgcaaaggaattactgcaactagcagcgaaaacattaaacaaattgggagtaccattctggctgagcagtggaacttgtctaggatggtatcgacaatgcaacattattccttatagcaaagatgttgacctaggaatttttatacaagattacaaatctgatattattttagcatttcaggatgcaggacttccgctcaaacacaaatttgggaaggtagaagacagcttggaactatccttccagggaaaagatgatgtaaaacttgatgtttttttcttctatgaagaaactgatcacatgtggaatggaggcactcaggccaaaacaggaaaaaaattcaaatacctgtttccgaagtttacactgtgctggactgagtttgtagacatgaaggtccatgtaccctgtgaaaccctcgaatacattgaagccaactatggtaagacctggaagattcctgtaaagacgtgggactggaagcgctctcctcccaatgtgcaacccaatggaatctggcctatttctgagtgggatgaggttatccagttatattgagatagtaggttgaaatgggagaatttctcttttggaaaaaaaggtagataactgtttaaaaaatacatgtctatttgtcaaacataagtgggaaccaaagaaaaaatgtgacaagtttgaagacacagaaagagtcatctgatgtaattctctcacttagtactgaggaattttcatgtgccacatacaatgctaggttacagtggagaagcctagatgaatgagacaaatacctacttcttttattcctccttttggtaaacaactcaattttcctttgagggaaccctcccccaccctttgaagagttcaagttctgtacaggtttttaaaacgtgaagtaatgtttgaactggaagatgagctcaccaggcaaagctaaggaaggatatactagttgaaaagaataacccactcctcttctgggcatttaagctggtatgttagtgctacttttaagattgtggagtctgagttaatattcaagtgatcagactttgagtgacatcaagaaaagatgatatcaggttcatttttcaactaatcttatgtggaattgaattagagaacaaggcattattcttttagggaaggtgagagcttatttgtatcagagcttattacttgtcaggataagtaaatttctgtacatgtactgttttcatatgtgaagtgagaagaaactttatgcttgtttaatgcttaaatttccatccattgtgagaatattttcactgacctctgatggcacttgttgacaaatcattcaagtgagaccatgttactagacatgatcttgaaagaggccatgatttcacaaaactcatttttattttattctcagacagtctgttaggtaaaaatatgagaaattcatgtacattttatattttctgaatttataatctgtgcactcccaattttaatgacactaaaatattaatagaattttttaaatatactctaatttttaaaacatactctttattatcttcatttatcaattacagcttcgtatctctaatttatggtctatataccaatttaaatggcatgtaaacctgcctgtttcttctcctcttctaatatatcagatctccaaaatggaagctaaatggtggacttgacaactattcaccctacctcagatcatagagtttgtaaagtttgtgtccctccccagtttttcagtctgttgaatgtcgatggggcaagaactcagacttctactttaccaagtaccacacactctggaatgctttagtttccttttcccctcaagatgtctgagtcagctaggatgctgtttaccccatctctctcttatatcacttgaatgatatattgtaagtgagaggtaaaggaaaatgtaggcacaataagcactgctatttttctctttgtctaggaaaggaagctgaatcttatatcttatctatgctatttaggactactttctggagcttggcagattttcctctgacaccagagaacaatagtagtctcaagaatggaaacctgaatgtctgagggaatgggctggtagactttttcgaaaacaaattagagaaagtaacttacaaccacccattccggatttgtaaagcaacatgaaaacctttgataaatgataaccaacagtcttctgtcctaatttgcattctcaatgcagaattattgggtctttcataaataacatgagtggtttctggagacatttaagattgtcagcaaacttgtcccaaaatggcacatcatcataatccattttctctttgctagaaaatcagcccatagagtgcattcccaaattctaaatagctgaccctaaattcatttttcatgcttaaaaataatagaacaaataataatactatttttgggcaaaatccaccctacttgatgaggaccatttgcttgtgctcagtatttagaaatgcatacactccacatttctccccatttccaattgggactcccattctttgccaggagatcttacccatcccttttcagattaatcttttatcctttcctgaagtacaaagtcttaagagtgtctgaaatccaagacatcttggcccaattgacacaggttctatattcttccctacatagaccactggctgctgaaatacttttcttgtcttctggtttcacaggcttcagctcatgggttccaccctaacttggggaaacaaaagccttctctagaatctgaaggccaggcttacctctgattctgattcatccatacttcatcttatgtattttaacagttgggttctgtggagtgtccagagaccttgggttaggtatatccatcttcagtacctcattggatcacttttctttcatcacttgagtattctagcagtcattctcctaatctgaccactttcaggtttagtttacctggcttacctggggaagttgacaacttgttggtagttaggcacccatgaatgtctccagagacatcctgagaggcaagattcctcttaattgataaccaggacaaccaggtagtcacccagtcctctctaagcagggagcacttgtccttctctcctctgctgcagctactgatatctggcccctggaataaaaccatagttcctaaaattgagcatccctaagagtagctgcttggtgggacagctgatttctttgattccctagctgcaaaacctgaaattgaccactaggtgacagaatgtttgccagtatccccacaaaacaagttaaaacttaagtgaaaatcattctgcttttgaatcttaaaagctagaaaaaccataatgtaatattctttttaaaccctcttattttataactaaataaataatcacagaaaagaatgatctgaacaagaacagctgaggctaaaacccaagactgccgtgactcctagtccaatgtctgtttcgcatcacaacacagtatctttaacagtgcttgagatgcttaacagagaaggcatccagtgcttcattgaggctaagtctcagggtgtttctgccgcttagtatctttttgttcagattgagaacctaaggcgacagagaggtcaaggggaagtattttctagttcagaattcagaattcttaggcaaccttcatacctttatctggaaaatgccttctctccagacaataagacagttcacatctggagacatcagcctttggtacctaattctctaagctcaagatgcatcccattgccactttaccattctatttcccaagggaaccatcagcaccaacctgctaaatgcctgtatttgaagtctctccccttcctgaagtgaccttttatgaggctctttccttcctaagggacctttccctggtagtagtggtctcattcacaaaaaagaataatagatgtaactggagtcactttgcagttttcaagattttttttttatctgcttggctggaaaggagactagagtatctagtttttagtatttaaactacttttaattatttatattgatactctctgataaatgcaggtagttaagaatagattgtactcattcctttttgagtttgtgacctcaaaccattgtttttattcttacacgactacagtacttcaaatggcacatagataggcaggatattacataggtaagcaggaatttatacattgggtaccagagctaaatctggaaaacacatttggaatgagcttccacacttcagtctaaaatctcacccaaacttatggctacatatttttctaagtttcccccctagtttcactttctggaaagtgaacagttttttaaatcctaaatgttataaatccttaggagaaatattccctcaaaacctagtcaagaaagtgccacattcccaccttctaacaggtaattattagttgtaatagctttaatgcatggaaaaacttcagttactgaccagtcaagagaatttctcaagaaaaatcccagcaacgttccctctttcctccttgtcttccactatcattaagacctgggctagatcacctctaacatctcactcagggaaggcaatgtgttgccataaaaagaccacaagcttttgagttaggcctgaatttgaatttcagcttaatcatgtgggatttatggtgggggccctttcagtctcaatttccacattagtgaactggggaaatgatacatacttctaagggtttttagggggattaaatgaagtatacagttcttagcctcaggcctaggattaagtaagtactcaagaaatgtgcaattttctagttccatgtttcttttctaatcttcaaatggaattatagaaaccatgggtcagaacatattcctttactcaaaagattgcatgactgaatttgcttaagaaaaaaaaaattgtatcaagtcattaatacaattatacattaattatattacattaatacaatatatggtttgtgaattcagagacattaccagtttgcctccttctctcaatagaacttgtattttcattttcttggttaagcagttgtctcctaatattatcccatatgctacctagtttgctggtcccaagcagtttactgtacttcactagatttggtacctgctctcccctggacttctttttcaatattctagcctttcctagatgtaaatctttacctccttgttagtgaaattagatataagccatgatttggagagggaagaaatctggaatacttaatttcatttaattatctatgctgatgaatgcctgtatcattgttaataaaggagaattgaaaatactcatttctactttctgccctcaaatttctgtttctatctcaactaggcaagaatcagcagggtgcatgatgccattttaagctgcttcacatcagactgaaatcctaattacagttcataagtgaaacagactaattcaatggcaataccttttgtataggtcctgtgcttaaaggaggcaagtataaattttctaataagaaatccctgcttcttttgggtgcagtggctcacacctgtaataccagcagtttgagaagctaaggcaggtggatcacttgaggccaggagttcgagaccagcctggccaacatagtgaaaccccgtctcttctaaaaatacaaaaaaattagctgggcatggtggtgcacgcctatagtcccagctacacaggaggctgaggcaggagaatcacttgaacccgggaagcagagtctgcagtgagccaagatcgcggcattgcacttcagcctgggcgatagagcaagactctgtctcagaaaaaaaaaaaaaggaaagaaagaaatctctgcttccgtactatcaaaacttctaccctagaataccccctggcaccttctaacccaacctaatacagagattttgtagggacccattaacaagctcctatataattataagcagctctcacagtagggttgaaagagaatataaggaaaattagaagtactgtatttttgctattggaaatgaaatattgtttcatgcacctttgaaaaaaataacaggattttacagccttctgatgattcattcaaagcatggggaatagttcatatgtttgttaaatgaaaatcttatgtagctatttgtgtgtccctcccacttcataactacaaaaacatatatatgaatttctaaacaaagtgatattttaaagatgaattgattcaatgtgtacttaccagtttactgtgtggttttatcttcaggtacagatagtttgtggtactacttgaaaatacctttaatattattttcatcagaatttgtaatatataatccagtttgggatgatgaataaaatttttctaatctcttgag

SEQ ID NO: 653 - protein, 459 aa, Homo sapiens
MSRINKNVVLALLTLTSSAFLLFQLYYYKHYLSTKNGAGLSKSKGSRIGFDSTQWRAVKKFIMLTSNQNVPVFLIDPLILINKNFEQVKNTSHGSTSQCKFFCVPRDFTAFALQYHLWKNEEGWFRIAENMGFQCLKIESKDPRLDGIDSLSGTEIPLHYICKLATHAIHLVVFHERSGNYLWHGHLRLKEHIDRKFVPFRKLQFGRYPGAFDRPELQQVTVDGLEVLIPKDPMHFVEEVPHSRFIECRYKEARAFFQQYLDDNTVEAVAFRKSAKELLQLAAKTLNKLGVPFWLSSGTCLGWYRQCNIIPYSKDVDLGIFIQDYKSDIILAFQDAGLPLKHKFGKVEDSLELSFQGKDDVKLDVFFFYEETDHMWNGGTQAKTGKKFKYLFPKFTLCWTEFVDMKVHVPCETLEYIEANYGKTWKIPVKTWDWKRSPPNVQPNGIWPISEWDEVIQLY

SEQ ID NO: 654 - DNA, 7329 bp, Homo sapiens
aaaacaaaattatcttcctttccaaatccaaaaagatgaaaacgactgagatactttcaaaagacaaccaagtgagcagcacagactaatgagtagaatcaataagaacgtggttttggcccttttaacgctgacaagttctgcatttctgctgtttcagttgtactactacaagcactatttatcaacaaagaatggagctggtttgtcaaaatccaaaggaagccgaattggatttgatagcacacagtggcgtgcagttaaaaaatttattatgttaacatccaaccaaaatgtaccagtgtttcttattgatcctttgatactggaattgattaataagaactttgaacaagtcaaaaatacttctcatggctctacttcacaatgcaagtttttctgtgttccaagagactttactgcatttgcactgcagtatcacctatggaagaatgaggaaggctggtttcggatagctgagaatatgggatttcagtgcctaaagattgagagtaaagatccccggctagacgggatagactcactctctggaactgaaatccccctgcactatatctgcaaactggccactcatgcgatccacttggtagtctttcatgagaggagtggcaactacctctggcacggccacttgagacttaaagaacacattgacaggaaatttgttcccttccgaaagttacagtttggtcgttatccaggagcttttgacaggccagagttacagcaagttactgttgatggactggaagttctcattccaaaggatccaatgcactttgtagaagaagtaccacactctaggtttattgagtgtaggtataaagaagctcgagcattctttcagcagtaccttgatgataacactgtggaagctgtggcctttcggaagagtgcaaaggaattactgcaactagcagcgaaaacattaaacaaattgggagtaccattctggctgagcagtggaacttgtctaggatggtatcgacaatgcaacattattccttatagcaaagatgttgacctaggaatttttatacaagattacaaatctgatattattttagcatttcaggatgcaggacttccgctcaaacacaaatttgggaaggtagaagacagcttggaactatccttccagggaaaagatgatgtaaaacttgatgtttttttcttctatgaagaaactgatcacatgtggaatggaggcactcaggccaaaacaggaaaaaaattcaaatacctgtttccgaagtttacactgtgctggactgagtttgtagacatgaaggtccatgtaccctgtgaaaccctcgaatacattgaagccaactatggtaagacctggaagattcctgtaaagacgtgggactggaagcgctctcctcccaatgtgcaacccaatggaatctggcctatttctgagtgggatgaggttatccagttatattgagatagtaggttgaaatgggagaatttctcttttggaaaaaaaggtagataactgtttaaaaaatacatgtctatttgtcaaacataagtgggaaccaaagaaaaaatgtgacaagtttgaagacacagaaagagtcatctgatgtaattctctcacttagtactgaggaattttcatgtgccacatacaatgctaggttacagtggagaagcctagatgaatgagacaaatacctacttcttttattcctccttttggtaaacaactcaattttcctttgagggaaccctcccccaccctttgaagagttcaagttctgtacaggtttttaaaacgtgaagtaatgtttgaactggaagatgagctcaccaggcaaagctaaggaaggatatactagttgaaaagaataacccactcctcttctgggcatttaagctggtatgttagtgctacttttaagattgtggagtctgagttaatattcaagtgatcagactttgagtgacatcaagaaaagatgatatcaggttcatttttcaactaatcttatgtggaattgaattagagaacaaggcattattcttttagggaaggtgagagcttatttgtatcagagcttattacttgtcaggataagtaaatttctgtacatgtactgttttcatatgtgaagtgagaagaaactttatgcttgtttaatgcttaaatttccatccattgtgagaatattttcactgacctctgatggcacttgttgacaaatcattcaagtgagaccatgttactagacatgatcttgaaagaggccatgatttcacaaaactcatttttattttattctcagacagtctgttaggtaaaaatatgagaaattcatgtacattttatattttctgaatttataatctgtgcactcccaattttaatgacactaaaatattaatagaattttttaaatatactctaatttttaaaacatactctttattatcttcatttatcaattacagcttcgtatctctaatttatggtctatataccaatttaaatggcatgtaaacctgcctgtttcttctcctcttctaatatatcagatctccaaaatggaagctaaatggtggacttgacaactattcaccctacctcagatcatagagtttgtaaagtttgtgtccctccccagtttttcagtctgttgaatgtcgatggggcaagaactcagacttctactttaccaagtaccacacactctggaatgctttagtttccttttcccctcaagatgtctgagtcagctaggatgctgtttaccccatctctctcttatatcacttgaatgatatattgtaagtgagaggtaaaggaaaatgtaggcacaataagcactgctatttttctctttgtctaggaaaggaagctgaatcttatatcttatctatgctatttaggactactttctggagcttggcagattttcctctgacaccagagaacaatagtagtctcaagaatggaaacctgaatgtctgagggaatgggctggtagactttttcgaaaacaaattagagaaagtaacttacaaccacccattccggatttgtaaagcaacatgaaaacctttgataaatgataaccaacagtcttctgtcctaatttgcattctcaatgcagaattattgggtctttcataaataacatgagtggtttctggagacatttaagattgtcagcaaacttgtcccaaaatggcacatcatcataatccattttctctttgctagaaaatcagcccatagagtgcattcccaaattctaaatagctgaccctaaattcatttttcatgcttaaaaataatagaacaaataataatactatttttgggcaaaatccaccctacttgatgaggaccatttgcttgtgctcagtatttagaaatgcatacactccacatttctccccatttccaattgggactcccattctttgccaggagatcttacccatcccttttcagattaatcttttatcctttcctgaagtacaaagtcttaagagtgtctgaaatccaagacatcttggcccaattgacacaggttctatattcttccctacatagaccactggctgctgaaatacttttcttgtcttctggtttcacaggcttcagctcatgggttccaccctaacttggggaaacaaaagccttctctagaatctgaaggccaggcttacctctgattctgattcatccatacttcatcttatgtattttaacagttgggttctgtggagtgtccagagaccttgggttaggtatatccatcttcagtacctcattggatcacttttctttcatcacttgagtattctagcagtcattctcctaatctgaccactttcaggtttagtttacctggcttacctggggaagttgacaacttgttggtagttaggcacccatgaatgtctccagagacatcctgagaggcaagattcctcttaattgataaccaggacaaccaggtagtcacccagtcctctctaagcagggagcacttgtccttctctcctctgctgcagctactgatatctggcccctggaataaaaccatagttcctaaaattgagcatccctaagagtagctgcttggtgggacagctgatttctttgattccctagctgcaaaacctgaaattgaccactaggtgacagaatgtttgccagtatccccacaaaacaagttaaaacttaagtgaaaatcattctgcttttgaatcttaaaagctagaaaaaccataatgtaatattctttttaaaccctcttattttataactaaataaataatcacagaaaagaatgatctgaacaagaacagctgaggctaaaacccaagactgccgtgactcctagtccaatgtctgtttcgcatcacaacacagtatctttaacagtgcttgagatgcttaacagagaaggcatccagtgcttcattgaggctaagtctcagggtgtttctgccgcttagtatctttttgttcagattgagaacctaaggcgacagagaggtcaaggggaagtattttctagttcagaattcagaattcttaggcaaccttcatacctttatctggaaaatgccttctctccagacaataagacagttcacatctggagacatcagcctttggtacctaattctctaagctcaagatgcatcccattgccactttaccattctatttcccaagggaaccatcagcaccaacctgctaaatgcctgtatttgaagtctctccccttcctgaagtgaccttttatgaggctctttccttcctaagggacctttccctggtagtagtggtctcattcacaaaaaagaataatagatgtaactggagtcactttgcagttttcaagattttttttttatctgcttggctggaaaggagactagagtatctagtttttagtatttaaactacttttaattatttatattgatactctctgataaatgcaggtagttaagaatagattgtactcattcctttttgagtttgtgacctcaaaccattgtttttattcttacacgactacagtacttcaaatggcacatagataggcaggatattacataggtaagcaggaatttatacattgggtaccagagctaaatctggaaaacacatttggaatgagcttccacacttcagtctaaaatctcacccaaacttatggctacatatttttctaagtttcccccctagtttcactttctggaaagtgaacagttttttaaatcctaaatgttataaatccttaggagaaatattccctcaaaacctagtcaagaaagtgccacattcccaccttctaacaggtaattattagttgtaatagctttaatgcatggaaaaacttcagttactgaccagtcaagagaatttctcaagaaaaatcccagcaacgttccctctttcctccttgtcttccactatcattaagacctgggctagatcacctctaacatctcactcagggaaggcaatgtgttgccataaaaagaccacaagcttttgagttaggcctgaatttgaatttcagcttaatcatgtgggatttatggtgggggccctttcagtctcaatttccacattagtgaactggggaaatgatacatacttctaagggtttttagggggattaaatgaagtatacagttcttagcctcaggcctaggattaagtaagtactcaagaaatgtgcaattttctagttccatgtttcttttctaatcttcaaatggaattatagaaaccatgggtcagaacatattcctttactcaaaagattgcatgactgaatttgcttaagaaaaaaaaaattgtatcaagtcattaatacaattatacattaattatattacattaatacaatatatggtttgtgaattcagagacattaccagtttgcctccttctctcaatagaacttgtattttcattttcttggttaagcagttgtctcctaatattatcccatatgctacctagtttgctggtcccaagcagtttactgtacttcactagatttggtacctgctctcccctggacttctttttcaatattctagcctttcctagatgtaaatctttacctccttgttagtgaaattagatataagccatgatttggagagggaagaaatctggaatacttaatttcatttaattatctatgctgatgaatgcctgtatcattgttaataaaggagaattgaaaatactcatttctactttctgccctcaaatttctgtttctatctcaactaggcaagaatcagcagggtgcatgatgccattttaagctgcttcacatcagactgaaatcctaattacagttcataagtgaaacagactaattcaatggcaataccttttgtataggtcctgtgcttaaaggaggcaagtataaattttctaataagaaatccctgcttcttttgggtgcagtggctcacacctgtaataccagcagtttgagaagctaaggcaggtggatcacttgaggccaggagttcgagaccagcctggccaacatagtgaaaccccgtctcttctaaaaatacaaaaaaattagctgggcatggtggtgcacgcctatagtcccagctacacaggaggctgaggcaggagaatcacttgaacccgggaagcagagtctgcagtgagccaagatcgcggcattgcacttcagcctgggcgatagagcaagactctgtctcagaaaaaaaaaaaaaggaaagaaagaaatctctgcttccgtactatcaaaacttctaccctagaataccccctggcaccttctaacccaacctaatacagagattttgtagggacccattaacaagctcctatataattataagcagctctcacagtagggttgaaagagaatataaggaaaattagaagtactgtatttttgctattggaaatgaaatattgtttcatgcacctttgaaaaaaataacaggattttacagccttctgatgattcattcaaagcatggggaatagttcatatgtttgttaaatgaaaatcttatgtagctatttgtgtgtccctcccacttcataactacaaaaacatatatatgaatttctaaacaaagtgatattttaaagatgaattgattcaatgtgtacttaccagtttactgtgtggttttatcttcaggtacagatagtttgtggtactacttgaaaatacctttaatattattttcatcagaatttgtaatatataatccagtttgggatgatgaataaaatttttctaatctcttgag

SEQ ID NO: 655 - protein, 459 aa, Homo sapiens; identical to SEQ ID NO: 653

SEQ ID NO: 656 - DNA, 118935 bp, Mus musculus
  misc_feature (1)...(118935): n = A,T,C or G
cataaaggttaggagtgaaagtcggggtaggatgcttgtcagacacttgtgagatcctgagggcaggtctcaacacataaacaaacaaacaaacaaaactagagctggagagatagcctagtcattaaaatacgtgtcactgagttcagtttctcagaaccccaggtaaaatagatgggtgtggcagtgtgggaaggcagtgatagataggaggaaccctgaagcccattggccaagcccagctagctgaatcagcaagctccaggttcagtgaaagaccctatctcaacgaataatgtggaggagcagagaaatggctcagaggttaagggtgttccctggttttccagaagatctaagtttggcttctagagcctgtatcaagtggtcctggttgctccacctgtaactccagcccctgggagcatgcacacacacgtttacgattgtttaaatcttaaaaataaagtgttaagtgattgaggaagacacttgatgttgaactgtggtatgacattcacacggatattataaataaataaataaataaataaataaataaataaaataaaaaatgaaataaagcaaagcttagaaacagaaccaaaggctttatggcaagggcaaagaagacatagttactgaaagggacatggtgatgaacaaggtcctggggattgttctgatgcaaatgtgtttgtcacactgtgcttttggtggccatctccatagaggctcctgaacaggtgagtgacctggtagctacctgcctgatccttactgtggcatggtaagttggctagctggatagttgactggtaaaatcacttagcgtatttctttggcaggagtgacttaatcacgaagccacttgtggtcatgcttcagcttctcaagtattgataataaagatgggctcatcagcttgataacatcaaagtctacctgaagatcgtttcaatagtttgtttgcttttgtttttgagacaaagtcgcaatatgtagctctggctgacccagaactggtcctgacccttcctcactctgtttgctcctcagggattacaggtacacaacgtaaccatgcctgtaatatttaaagacacattttgtaggaatttagctctcatccattagtccttgtgagttggtaaattcggacagcactgagaaacggagctggcaggatgcattagtgaggaaaggcattttccaccgagccagatgacctaaagtcaatcttcagggccacacagtggaaaggaagaatttaagagttgtcccctgatctccactcattgactgtgtcgtatcttaacacacacacacacacacacacacacacacacacccataaataagcattttgtttaaagccatgtttgtggtccttcaaagctaagaagtaggactgcgggtgtggctcggcggtatcataaaacatgtgcttatcaagcacgaaggtctgcatgtaactctccagcccttaaaactcaaacaaaaagtaaggagtaggctttggaccatggcaacacatctttatttaacaaagaattctagagagtagactacaagattcagagagaaggttaattcagagttaaggttggattagaaaggataatgttgggtgatgaggaaggacagagtctaggtaaaggacacttagttacaaagtaattgtttttctagttttaactctgtcatagattttctttcctttctttttgtagataagtgcatacaatgtttaaaagtcgattttttttttttttttttttttggaaacatggtttctttgtatagttctggttgtccctgaacttgttctgtagaccaggttggcctggaactcacagagatccacttgcctctgcctcctgaatgctgggattaaaggtgggtgccaccactgcccagcaagtggataaaatataattgatagtatataagccaaagcaaaggtcaacagctttaaaatggctactctaattgtacagaacttcattaagatgtgtaggcttggggctacatcagcctagctggatgttgttgtgttttagtttgcaggttacacacacacacacacacacacacacacacacacaccccttaagttagaagcttactgtactccttactctcttttctcattgctgtgaccagatacctggcaagaagcgacttagggaaagaaagatttatttcggttcatggtatgagaggtacagcctatcatggggaggaaggcagggcagcaggaacaggtggctggtcacgtgatgcccttagtcaggaagcagagagaggtagtgctgccgcttcctcctcgccccccttttattcagtctggaccccaggccatggggccccagcccacacttccttcctcagttaaccctctctggaaacatcatcgcagacacaccaagacttgtctcctagatgacttcaaatcaagttaagtcaactctgaaaatgaactatcacacctggtacatcttcctgtctataaaatggattacatctatctcacagcattgttgcagtgaataaacaagattgtgtatattaaagtgtatattaacatatcagggctattatttgataatctgtgggtatctgtcctagtaacagaataaacgtttgtagagtttcacaaccatgatcattgccattctgtaggttttctggtcctctgcctttgccttcagggtcttggtcctgttgatgtcagctgccacggtaagaacacgagagtttccaggaagtaacgcatgcttaattgtaacagaaggctaaaaataaaaggtgttttgggataaaatgtgatcgagattactggagccagagaagtgtaagcaaaatcttcaaggactattggaagttggtctagtttctgaaacaaaggtcacacaggcaatttactgacgggaaaactgagttccagagtgacagacgtcaagcccagtccaaagagggcagtctttcctcagttcctgacaagcaaagcagaagcatctacagctacacagagccatggctgtgccttgaaagctcctaactgttggatatgaatgaataaggaaaatttttttaaaaaatcacttcaaatcaaaggaaaggcgcctgtgtctaacatggtttctgagccgtcagcctgtgccctgaccttgagaggctgggttaaagctgtgaaaaggggaaaggaaacaaagacagaaaacaagttggcagaaaagtgcaagacgttttcaagactagacagaccagtttaactgaatggagaggaaagagaggcccacagatggatgaggtgtgcctgtggaggctttaaatttttcagtaagctactagaagtttagacaggaagatattgtttctagtttttgaatagagtactcaaatttagcctatattcgtattgaactttagtaagtttgtgttggacatggatatactgtactgtgtggctctttctaaaactcctataatatgtgagtcacacttgtctttgagaattagggagaacgtggttataattcagtattacaaatgcttggctagatgtgacagcccctgagttcactcacacacacacacacacacacacacacacacacacacacacaaacactacataaataagcattttgtttagagccatgtttgtggtccttcaaagctaagaagtaggactgaggggtgtggctcgggcggggtgggggggtggggagaggagagagtatgagaatatttgatttttttttcagtttggggatcaaatccactaggttcctatagtaaccagggctaagtatttaaataaacattacaattttgtaagtctatattagaggtatatagatggtaattctttctagtagagaagttaataaggatttgagaagagggaagaagccttaggcatagggtttctattgctgtgataatacaccatgcccataggcagctcgggaggaaaaggtctatttcacttatacgttcacaccacagttcattactggatgaactcaggggaagaacctggacgcaggagctgatgcagaggaagagctctgcttactggattgcttttcccatggcttactcagctagccctctgaaaaaaatccagggactccaagcctggggtggtgtgaccaactcagctgggccctcccatatcaatcctccatcaagaaaatataccataagcttgttccttcttccaaaaggaccttagcttgtgtcaagctgactcaaaacccagccagtacaccatatctccattctgtctccgtgcattttaaaggaaatggatacccagtccccacccccaccccagtgttgggaattcttatgtgtgctaggcaagtactgtcacctctgcggttgatctatatccccagctcagacactggtacttttaaatgcctgtagttgtaaatagcatatttcattagtctctaaaagtgtatttaatgcattccccctaattcttcttttacatgaaaagtaaaattctaaccaaaaaagtgtattgagaaatgaatcactgagcctcattctgtagaacatgtgggagagacactccttctggagggtagaacatgtgcaaaggtgttgaagtgggaagtggtgtgtgtttgggaaactaactgttgttgaacggcggcacattgcgctgattaaagccagcctgttctccagacaaattgaaccttggcggttggctctgccactcaggtttctgacttagggtggattacttaagttatttcaacttccatttccttacaaatgtcagctcctgttactctgattttgcccttgtttccttctattttactaactcctccaccaccactggtgctaaattgaacttaggatctcatgtaccccagacaaatctccactgagttgcatttccagggaagaaaaggaatgtgtagctcaatgttataactctacacactagacccttggaccagttctcaggtctgacaaaaacagacttgatgacctattaggattggagcttagaaggtttgaggaggttgagagcggttgggtaaattggaacttattgagtgcagtgtagctgtataacaccaggggagaggtagtgaacaaatatcacatgtaattatgatagaatcatctagaattctataatgcttactatatgctatgtatttgccttggtgctttacacttgtttttaaattatttacttattgattgattgattatatgtaagtacactgtagctgtcttcagacactccagaagagggcttcagatttcgttatggatggttatgagccaccatgtggttgctgggatttgaactcaggacctttggaagagcagtcggtgctcttaaccgctgagccatctcactagccccctaaattacttatttttacttatttaacttttggtttttcaaacagggtttttctgtgcatccttggctgtcctagaactctgtagaccaggctggcctcaaactcagagatccacctgcctctgattcttgagtgctgggattaaaggcgtgtgccaccactgtcctgctcttttacacttattgatttatttaactctggaggcaatctgtggtaggcagcactattctccaattctgcagatcagaaactgagacccaaatgtcctttaaacaagggattgactttattattattttatgtgtacaggtgttttgcttgtatatgtgtctgtgcacatgtgttcctggtacccccagaagccagaagaaagtgttggatcccctgttattagagttatagactgttttaagccaccacatgtgggctgggaatcgaaccctggtcctctgaagaacagttagtgctcttaaacattgagccatcactccagccccgtagactttaatcttagccaagagcacatgtttaggaaaatgatgtgactatgctatagatagggctggggcttgggacagaggtccaagaaagctagctgactatacgctaagaaccagaaaagaatccagaacaaggcaaaccccaggctctgtttacatgcagtttacagcctaatcccagacacaagagggtcataagaagtaaccaaggaagtgaaggataagaaacaaaaccaagggctggagagatgactcagcgatttagagcactgactgctcttccagaggtcctgagttcaattcccagcaaccacatggtgactcacaaatatctataatgagatctgacgccctcttctagtgtgtctgaagacagcgacagtgtactcatataaataaaataaataaatctttaaaaaaaaaagaaagaaaggaaaaaaaaagagagaaacaaacccaaaagatcaaattctaggacggatcatatttaagaggtaaagagaagaaagccttagggaagtcaaagagagaaacacagctcagtgtcaggaggaaagcaaggagagaacagagccccagagaaccctgggagaggggagattttgatagtaaagtgtcaggtatctgggaggtctggtaagataagaattgaaggtgtctactggcattggcaaccaacagatgtctgatggctcatagcaagagtgactctagaaatgatgaggtggcatcaaattgctgtgaattaaagtgaggttggaaagcaggggaaattggagaagggagatgagctagtcctgtatctggctaagcaagagaaagaaaatgtataaaccagggcgagagcagagagggacggttgaaggctacgaaaaagggaacactcagtatgacttggtgacttgaccacgggtgacgatgtgaggctctaagctgattccccccgcccctcttttttgaaaaacatttattttgaaaaacatttatttttgttttatgtgtatgagagttttgcctgcatgtctgtgcaccatatgtctgcctgctgccctcatagaccagaagagggagtcctatagcctggaactgagttactgacagttatgagctgacatgtggatgctaggaattgaattccaggtcctctggaaagcagccactaatgtagagctactgagccagatctctagccatcggatcctactcttagtcctggttcctgagagaaaggaaatgctgttactacagaaaaggaatggaatatattcctgagtttgaaaaattaaaggtaattgttggtctggagttgcagttcagttgtagagtactggctcagtacgcatacagtgctatatttgattcctagctgcatttgcatgtagttccaactctcaggagttagcagcgaaggaatcagaaacgcaaggttgccctatgctacctggacgatattggtcttagatctgtgcagtaagcattttttctttaatattgttaacctgatacatcacatatggcatttgtttatgaaggaaatgtttcattataacgtagggatactttctatggtcttaacaaaaatcgaaacaaacaaaactcttactcttagcatcaaaaatgtcattattgctgaagtaacactgctgctaaagtaattcgtggaacaggtgggctggacaaacatgatgacctgagtcattcagagcccaaataaaggtcaaggagagagcccactccataaagttgttctctgactcccacatgcttattatgggccaagtatcactccctctccctctacttctccccctccctctcccccaaccctcccccccaccccccagctaaaaaccaaggaatcactattttccactagattagatatttgtttgaggaaataaatggcatttatgtactttatttaccatataacaattattatctgctaagcacttgtaattgctttatagtgttaagtgatctgaatttaatccatcaaaatagttccaaaaggcaattttcattttacaagggaaatgccaaggttacaaagaattttgaaataaccttgccaaagtctatcagcttttaagaggcaggggtgggagtcaaactcaagtgggttgtgatgcatggcatcaatgcagaccttaccccggtacattttctcactttcctcttcacttgtgaaaatgccagtaatggaattaagactttaagcaaagcaatagtccaaacttgtaacatgaaaataccattcattattcattcatatttttaaagaaaagaaacagcattttagatgtaaactcctgcgatttctttgaattaaaaaagaaaatgatctttgcttatgattattagaattgattataaacaatactacctaatatcaaacttgtcacagagatggattaataactcaaaaagtcaaaacttctactgcctgtgagtacataaggcagaaacagcgcatgtgataagcaacatgtctgcaggttactcagaatagacactttacaaaaggaaaaagaaataacagcattcagttactctgtattgattttatatgcttcagtagaaacgaatggacaggacaatcatgatgatgtgggaagttctgactgcagtattgagtttagtaatgtgaagcaaaacaacaattcatttttcaaaacaattaaaataagtatattccttaagtaaggtgtgacggtgcatggaagatgggaggaatcagaagttcatgtttacccttggcctcataaccactcaaagaataacctgggataattagatgagagatgggagatgggggtgggaaaagtattctcatctttatttctgttttctttaaaaaccacattatctacattaacaatgtaggttgtagaaaatatatagggcggaagtaaaaggtttgcaatttattcttattatcaataatataaactcatattctttgagtcaaccgaagcagagttaagtatgatgaagacgttgtagttctttttttttttcatttattcattcgcgttacatccgaagagcagccccgctcctctcctcccagtcccacccttacaaatccctcctcccattactcctaaagttgtagttcttgaatacgagtataaagaatcaaagcgagtaaatgagaagtcaaataccggttttgtagaagttggcatgaaggaggtatgagggaaacagactaacaagcgagcattttctgagctggagactaaggaccaccggcttatttatttatttatttattattatggctaaggcctagtaggtgacatacatttgctaatggttcgggaagatacccctttgggtatttttttcttcctgttggatctttccttttatgttcccatcagagctgtgtatcgcggctaaaatcatggtttgctgggactgcttttgtttacttggcagctgcagagcttcaaaagaaacagatagagaagcaaggaaaacctctagttttttggaggcgaagaagccgaaagcccttcttgacagcttcggggtagggtgtgattccaagagacagtccttaacagctggaagaaccaggtagcactttcacagggaaaagagcgctcccgcccggggcggtgggcggagtctccagcggccccgccctcccaggccaatccctgctctccgccagcggacaggaagcagcggcggggcctagcggcccgggcgctcgcctcggcacgcatgcgcattatcccggggcgcttgggggagcagggcggggcgggaggcaggggtgcggcctcgcgagtgtattgggtgccgtcgcgtcacgtggcgagaaaggaggcggagggccgcggctcagggaaggggctgagaccaggcgaagagcgagggcagggaagcggggaagggaggaaggaagaggccgagggggagggagggccctgttttggcggagcagggcgcgcggctgggcccctgaagtggagcgagagggaggcgcttcgccgggtgccactgccggggaggctcgtcgggacccagcgccggtcgcggctccctcaggatcgatgcaccgcggttaacccgtgaggaggcggcggccggggaagatggtgttgccgacagtgttaattctgctcctctcctgggcggcggggctgggaggtgagacacgaccccgggcggcgacggagcggcggtcggtcgggccgagcgcagcgtcgcggagccgggccgcgcgtgtcaggtctcctcggcttctgtcagctctctcagctcgcctcagccgaccccgagcgacgctccccgcgcgctattgtccctcgcgcgccccgaccgcgctcccgccggcggcggcccgagcaggctgcggagccccgggccaggccttccccgcccccacggcccggcggccctgcctgcccggcttctcgcgccgctttccccgggagcggcggagcccaggccagccgccctcgcgcactccgcagccacctcagccctgccggggtccgagccccgggaccgcgcagactcgcagcaacttgcgaggttggcagcgcggcgggagcattgttctgcaagcgagcgagcggacccgggccgggtgtcggacgccggtgtgcgtgtcccacccgagtgccttccctccgcctcgtgctcttttcggagtgtttgtagccagcgcgccggaggttgtgtgtgtgtgtgtgtctgtcgttctgtctgtctgtcttctgtctccccggggcaagactttagttgactgaggagaagggcaagccgttttaggatgctcttcgatccatctgtctttttgagttgagtccacagagaagcaagaccgacccttcctgggcgaaccaacttgcagagttttcttaaactctcaggtggagcagacgtactgcttagtcagaggattgtcagggctgtgctccctccccctgcaaattggagttcactgttgcttcaagtttcctgatgcttcgggtttgagacagcggtatttcattcccaggctttcctaggacaggttgcatgattattttgttcctatgagaaagtgctttaccataggtaagctaatttgccgcccaagtgtctggagagaggttagcttaaaagcattgaattggaaacaacccccagaacttccaggggtgcttcggatggttgtcagcagcctaatttgatactttagaaaatatcctagtgttttctgtagtgtattgtctgtgttcatccctttgtctcattgacttaaactgcaggacccagcctatttttgtctggcattctgcttactctgaagttggttttgtgtactcagtttctgttgttgtgtgtactattcatttattaagtacacattttagatgacagccactaatagatgcttatttttgttttgtttttgttttttgttttttttaagaaccagattgcagaccgtttgtaaagagcctctttatttaacatttgtatttctgtaacacggcttatagtcctggctggctgttttcactttttgtgattatggtcaggaattagacactgttctctatgaggtaataaaatctaagttaaatgtgatacactttgataagtagtgatacaaaatgccttttattaaggaaaactaaaaccaatgtggcctgttgtttggggaaaaaagtaaattaacagcataagcattgtgggtgaagagttttattcagatctttggagtttctttctgcactaagtaatgattcaaaggccaggttttgttgtgcttctgctaaaaacttaaaaaaaaaataaaagttttcacttaagtattatgtcaaatttgtaatacttgagtatgtaggtatatttataatttggggctgtggaatgtagcccagtggcaattgcctagcaaggccatgcaaggctttggattcaacatctctgtttaaggcccaaaactcctcctatgtttatttgtaactcattatactatatgctgggttttttttttttatctgaactgaatcgcatatagctaagtttatatatttttgtgatgttttgtaggctagtgtgcattcaaacttagtagatattggctgtagtgcattggaaagttgaatgtttgtaaggttagggtagttgtagaaatacagaactttaaggtataagccatgttcaggtgaaactaaactctgttggttgctttcatcttgcctgtttgtgttaatcactgttgtgtgtgaatgtttttcttactgcacataatgtgaggggtgggaagctggaaggaggcaataaagtgcttaaatactaaaacaacttttctagttttcccttctatgttggtggatgtcctgcccagtgttgtatttgtagaaagataccatgatagtttttgagtttatgaagtgtctgtatggaagtattcatatatctgtacaaaatgcttctaaaaagttatttgttgcctagcaaaatggctcagtaggtgggagcacttgctttgaaagcctgactatctgatttctagtccccatcccttagttgaaggagagaaccaactcctgaaaattatcttttgaccttcacatgcacaccatggttcctcgtgcccttactcacacatgtacactacacacaattataagataataaagttatttggagacgtgttaggaacttattggcactatcctgattagccaacaatttttgtgttttgttgttgttgttgttgttgtttgtttttgagatgcagacggattatgtttctagctctaactcctgccttcctagtagctggtactgtgggtgaagaccttgatgtagggctgatggttacttttgagcatagaaaatgtgaaaattaaggtctttctgagcagtggggaagcacacctttgatcacagcacttgggaggcagaggcagacagatcactgagttcaaggccagcttgggctacagagtgagttccaggaactatgtcttgaacacgtcccccccaccccacccccccaaaaaaaaggaaaagaaaaattattttgtgtacttaagaactcagaagatattagttatagcaacaaagtaatcctgtaatgtttggcttaaagaagttatccatgtaatgagccatgcttggtatgtggtgtgtgtgtgtgttttaatttaaaactctggctttgtatgatacacattctacagaaacaaacttggatatttagcccaaggaatttaaaatattaaggcttaagctttaactgttcattttttttttttttccaaacttctgccagcaagtaggagtataggaagataaggtctttttgtcttcggctcaaaggaactttgaatttttatcttttcagctagagtttgagattccagtacactctgtcacctaataaggccaatttcaagtcatccccaacattagcagtggctctgtgtcagtgtgcaggacctctgttggcagagttgaggggactgggcatggcaggcactcctttgttccagaccttcgcatagtgtatattattgggtctctttttcctaaggactttaacctaaagggttggatagaggagtgcaaaggacttttctctgatgctcatcattgatctaatagtgtttaggagtttctcctttaaacatgtataaaaattaaatgtaagtttaaagggataatttttctaatatctgctaagtggtgaaatatccaaacataaggcagtgttttttttttgttttttttttttttaattttaggtggtggggattagatctgaggtctcccaaattctgggcaagtactctattactgaactacattctagtctcccctgtccccaaacagttttgttttagacagggactcctcactaaatactaggctggccaggagcttggtatccttctgagtagctgggattacaggtctgtaccaataggcctgacttatttcaaacaagagaaatctcaaaggttaacatttttaaccctcttttctccatatacctccatacctgtttttaagttttgtttttcttttcttctttctttctggaaacagggtctcagtgtatggcccacacttacgtttatagtcttctgcctcagtttacctagtgttggtattacaggtgaactctaccatgtcagattatataaaaactttctttcttctggatggtggcttatgtctttaatcccagaactcaggaggcagactttaatcccagaactcaggaggcagagacaggtagatctttgagtctgaggccagcctggtctacataatgagttccaggacagccagagctacataataaggccttgtctcaaagaatacaaacaaacaactcagcaactttctgcttttttttttttaattgaaagaatctttctctttctctctttaaaaaaaaaaagatttatgtgtatgggtgtttgcttgcatgtatgtctatgtaccacatgtgtgcttggtagattcctttagaactgggattatagacagttgtgaattatcatattgatgctgggaatcaaacctgaattctctggaagagcagccagtgctctgaatcactaggccatctcttcagcccctagatactagctttctatttagatagataatgcacttaggttttctggttttcttgtgaaatttgaggatgttatttttaggaggtggggagtgggagtcaggcatgatcctaccatgaagcccatgctggccttgaatcaccacatagtttgtgttggcctggagttcttgctgctcctgcctctgcctctggagtattggtattacagttgtgtgccatcataactagccaggttgtcaacttaaactagtttctaacttctccctgtgagaaaactaaataaatatacttaacacttgacctgtaaagtggaagttctgattttcctgtgtgataaagtaaacgtcctttggaagttttatctttttaaatatatgtttggctttgtagagtttactgctgagatcactttgttagtttctgaactattgagagatggtactgatgtgttagttaaagtgaggagggtagaacggaaagaaaacccatgaataacctggaaggcttagcagtgtctatgctcatttatttagttatagatatatcatgtcctgagtctgaatggtgaatactgtagctttaaactaatttaccagattattgataggaaacacatactttttttttaaattcttttttttcaaggtttatttatttattttatatatgtgagtccactgtagctgtcttcagacataccagaagagggcatcagatcccattacagatagttgtgagccaccatgtggttgctgggaattgaactcaggacctctggaagaacagtcagtgctcttaacccctgagccacctctccagcctgaaacacatacttttaaatgtatattgtagtaatgtttattgtaatattccctgtagtaatataaactgaattgagaaaatgcattttctctacttaaaggaaactctgtaaaagctagaagctcccatatttgttttatttatttactgtaagagctgtgctatagtaacattgtttgttattctaggtttgatttttttgtttgtattaaagttgcaattctactttcccattttaccttttttttttttttctcagcatagagaattgaacaccttgcccctgcttggaaagcattctaataatgagacatatgtcccaacccctttttaatatttgaactttaaaaattatttatttactttgtgtgtacatgtgcacatacttgtttgcatgcacatgccatagcatgcttatgcaggttagggaaccgtttggaagttctactttgtgggttctgggaactgaactcagattgctaggttttcactggcccttctttatgattaattttgagacaaggtctcactaagttgaccaatgtggccttgaactctgtttgtagaccagagaagccttaaacttgcaatctttctctttcagtagtttgagtaactaggattatagtaggctcaggtaaagttaactccccacccccactctttctctctctttggtgttggagactaaacctaggccattattaatgttctaccactgagatgcatccacagctctgtgttttaattataatgtttgctgatgtcggtaggggtttggttttttctttttgttaatgcagttagggcttaatcactgagttgcccaagttggcttaaaaacttctagactcaagtaagctctgtagcagtgggatttataggtatatgccatcatggggtcatgtagttttgcaatggtctagcttaaaataaatccgtgtgaatcctaatggtgtagtttgcatgaatggagactgctggagagcaggacacaggtacttattggttatctcaaccggtgcctttcagtgataggccatgttcctatctattaattgtaaagtaggagagtctgtagatagagaagtatatggtgttttcaggttggagccccaagctcagaatcacggaggcagactttagatagcaggaaatgatttgtattttgtctgtttttcacataggcaactccatgtgacaaggttgggtagagccttaaggttgtttaaaattttgttgttgtttaaaaagagttaatttatttaatacttgctaataattctcccatgaaattctaaaaacttggcttggggccagaaagatggaagtgcctgtcatcgggtccgagaacttaaatcggatccccagaatgcacacagtggaaggaaagatctgactcctgtaagttgtactcagaccatacatgtacagagttggcttgttctgtaaaataacctagcagtggtaattctaactaacccagatttcagtgtttttaaaaggttatttatttatttaatatatgtgatgtaattatatttgtgtaagcactttgaaaaggccagagaatgatcttggtgccttcctgtatcatgttccaccttattctttagaagtggggtctctcactgaagcagaagtttgcttttttagctaagctggctggccagagagctcttggatttgtagcagaagcctgtctgtacccactaatagaggaattataggtatgaacatcagtcctcagatttgtttctgtctgctgggcatttaagttcaggtcccagtgtttggactagcattctacctcacagagacatttccccatcctctgtccccatccaccgattgccaatttttatattagggacaatgaagtaatgtcagtgagagtggaaaagctgcaataatttctaccagttggatctctagttattctccaacagcgagactgccttgagttagtacttgtgggcatagctctgatctaggtagatagcagaaacgcatatgagaacagttccagataatgtgctctccctttgcttcagaaagacttcatcctgaacctactacagttctagctaaataggtgttcagtgagaaccagggattgttgggcatctttaattggttggagttttgatgccacagtttgaatgagaagaaaagtaaaaaatactaaatttatcagagtggaggaaatgccaggatgtaagcatacagttccaattatatattgtagttatattgtagtgaggtaaaatttggtgaaaatgtcacctggctaactggcagtttgtgaggtaaagagtggtgatgcatgtagcttgagaaactaggtttgaggagacacagttgtttttgattttgttaatttaacatgttgggattaatttctttggtgctagattgcatggtacatctggttatatgaaaattgtgaatttaccatttcaaacactagttggggaaaagaatctgatctttgagttttaaatggcagtaaagagagatgctaactgggctgtaagaacctggacttgcattattcgtattctgggccataactaggaggtggaatattatggaatgcagttggtctccatattgaatggctggggtaatacaataaggaataagttagctgcttggtgaactgtgtggtttagtctcaggttagagtagttattgtagaaaaaaagattttaaaagtagtgagggctgtcaagctggctcagcaggtaaaggcactgccactaaacctgacaacctgagttttatccctgggacttacatggtagaggagtgaaccaattccataagttgtcctctgacagtcacatatattgcccccccaacccccaccccatatgtacacacacacacataacacatgaaaaagcactagtaaaacttggcaaatgtttaatgttaggctaacaaaatgtactgagggtttactgttgaaatgggatcttaggagcttttacaatggaaagtggctctgtaatgaggatctaagttgttgaagttgaaattgtcttgagattttgattctagctagaaggtgggggtgggtatcacagtctgggacttaatactgtcatccttcttcctggggactgcgtaagagtttgcattgctcttcagttctctgtgtctagtgatttggaaagtatcattctagagagttagatgatagtagtctataaatttggaacagaggggagcgattagtttgaagatacacgaatacatttttacaaagtgattttattttatatgtatgagtgttttgcctacatgtatatatatgcaccgtgtgtatatctggtgcctgtgaaggccaaaagaggttatcagatctcttgggactggagttatagatggttgtgaccacctggtaggtactaggaactaacccaagtcctctgtaagagcagcttgtactttaaactgctaatccatatctgaactatctctttagcctccatttttctactgatttatcttgttggaattagcctttaggattttagactatggtactctaacaatagttccacaaatatctttccatgtctttgcttacattaatgatgattagagacacatagtcacacaaatacttgaacttttgactgagttttggaataatagcatatatcaacctagaagaccattaacagatgaatggataaaggaatgcattatttatacacagtacagtttaattcagctttaaagactgaccaaatttgtaggaaaatggatagaactggaggttgtcatgttaagcaaataagccacactgagataactattgagtgttttctgtcatatgtaaaatctaggtttggagtgtgcatgaatgagtcagtctatctgtctgtctgtcatctgtctaaaacctcactggggcttggggtttactgagcgggctaggctggctgtccagctagtgagtcacagggatttgcttatctctgcctcttcagcactaagcttacaagctttttacaagtgctctggggttctcatgttaatgtggtggacacttttatcaactaggctatctactcatccctgactttatttttagtttatatgttttaggacctagcacaaagcctagctcacatcaagatttataataagtgttttattaaaattgcagaattagtgctggtgaaatggctcagcagggttttttaaaaaaaaaaaaaaaaaaaaaaaaaaaaaagcctgataagctgtcctgtatccacagtaaaaggaggtaaccaactcccaaaagttgtcctctcatatctgccatggcacattaatgtgtgcctgcattcccacactctctctatatatacatgtacacatcatacgcacaatatcaaatgaagttaaaaaacccacagaacaacattgctggtgagtggagtggatttgtgagttcatgttacatagacattttcattaagcaaggttgtagtctagtgaagcagcctttgaattgctgtctgtctacagtgttatgggaatagctccattatataaagctaaatgtcatgatgatttttgttaaagtagagtattcttgcagtacattagagagtataccttccaattaatacagtatattatcagaattccaagtggacaataataaggattaagtactttaatccagaaccatttgctagtctgggagataggtagtcatttgtacttacagactagttagggaattaatcatttgtacttataaattctaactttattttggtcaggatgtttaattttcctggtgacatataaaatctgattttttccaatgtagtacaaatctcttagtaatccaagagttttttttttttttccttcatgtgtagagtaagctacagaatagtgattgccagacaagtgtgacataggtggaaagcgaggtcatggaaatgggtttagggtgaaatgtaagatctctatacagcagcagtggaaatggtggctggagtttcttgcatctgtgtgggagaataatgtaggtaggttggaagcttccgtctttaatgaagattatcatctgtactggtggtatttatttgaaagaatatgaaacatctcagttatatatatcttcatccatccattctggaattttgaaatttcatttcttaagtgaaaggtagaaatagaatagtcagtggattttagtcactcatattttgtgccctgtgtgattgatttagtttgtatttgtgagagggtttcttagcttctcttcagatccaactgtctttattattttgtttataagagtctagattattttttgaaaatggatgtgttgaaatatgctttttggggtcatctactggggcatgagcagactatgggcacaccagctccaccccttcattaacaaaagtaagtcctttctttttctagactccaccctttcttctttctgtctcttttttcagtacttagggtcaacctgagggtcttacacatgcttgttaagtattctaaccctcagatacatatcaaggtcatttctaaagatgtgcgacaaaagaggaaagaaataccttgaatgcggggcatagtacctaatgaatagaaaaaggaggaaatgaaaaagccaacgtgctacaggcatttgtaaacctattagccatcaatatgaaggaagctgttttgcttggccatgcttactccacagtaggagactcaaacctctgaagccatgagccaaaggagtagcagaaagcctcactgctttatttttcaaatatcctcctgggaatccttatgaattttaaaaataacacaaatggcattcctataagtcacatttgaccaaagtattttaaaggctgcattttgttttgtaattaaaaatttaaattgtatttattcattatatgtagctctgagttgcatagggacactttcatgtaactatgtataatatattgagcatatttccccactactttatcttcccattaatgtctttgctatcctagatagtttcacttctatatttatggcatatataaatatatgattttatgtatcattctcacaaatgtaagaagttatatgttatcaaccattctgtgattggggtatatgtattttctctaaatgatataattttattcttaaaaaaaagaaatatgcttttaattatagatataccctgttatcttgaagtttcacttgtaactgtgagatgtagatagttgattctagatgatttgactggtttctagtgaagaaatagatactggtttcagtttgaagttatatagtagaaatggtgtgtctaagtgcattaaaatactctgcaatattgctgaaatataggacatagttcttagaaggctatttttgttatatgagagagcacttttataagtgctgtgtaatatttcaagatcagagtgaatatatagcagcataaagaacattggtcatggatatttcttgaggcaaagataatgattttgaaattacattgttgaacttaattgtcaacttgactgaatttggaattacttaggagatacaactctggggatgtctgtagggtgtttccagagaggtttagctgaggaaggaagacctgaatgtgggtgctgccattctatggattggggtcctggactgattgaaaagggggaaaaaaccccagaaaggatactgaccatcaggaccccatctctgcttgcagactatggatgaattgtgactagttgcctgaccttcctgcacacatcttcctgtcagtggtggactacactgccaggccacagcagtgaaagtattagaaatatcttgattgcagctaattttcttgaggcattagaaatgtaccagctttagtttgtcctttatctaccctttcatatgttgtaattgagttttctataactaggaagatttattatgttaatatttttgttaatttttttcccattcttaagattgtgttatcaacttttttgtttggatatagatagagaaaaaaatttgttaatataaagtgatactattaacctaccatctgtaggctgagtagctaggatttcaggtgtgcacaatcatgcatagtttatttagttacttattttcatgatgttttgcagtactttgattgaacctaagccttctcacacatgctaggaaagtactctgtcctgtggggttaagtggttgaactcagttttcaggcttggtgggaagtgccatcttaccatccctattgtgtgtgtgtgtgtatatgttaactgtgtgtgttaaattgtgttcacaatttcctctggacctttaaagtgttaggtactgagtgcatttactgtgtactttatagaaattcagatttctgaaatctgtaacagggcaaggaagcaaactgctgttgataggcttttctgtgtaaatgaaataaaatagcagaagagaaagataacttacttgataaagtgcagagtggagtgatttaatatagttacaatgctgcagtaaaatagccttaggattattgcatcattgtagcctcccctaatcaagatgcgaggctagggagagaaattataatagttcaagtggaaagatatatgacacatggaaaaacttgggcgatctagaaactttccttcaccagaagttgtcattttccactgacctcagataaggaagtttcactctgcactccaggttaaatgtgtttcttttgctattattaggaaacatttctacatgggaacacctttaatagtattgtctatgtttggagataaaaggagtttgggttggcaaagtttttctttttatctctttttcagtattgggtatcaaactccagtcactgtggatattaggcaagttttctgccattgagctatatatattcctggcctctggttgtcatcttctgagcccttcctgttaacttccctgctgtttgttgggccttgcatggtaatgcataagtagtgaaagggatgctctagctctgtgctgttttggttttggttttggtttcttagtcattagaagattgatcagtagctatttattgtaactttttaatatttgtattctcagaacttaaagtaaagattagcatatacactattaagtgtgctcaaatttctgagagagtgtgtgtgaggagaagctctgaagatttatgttgttgttatttttttttttttaattgacccccttaccattttgagtggtactcaggatcaaacctaagaattcaggatgctagctaagcactttaccacagaggtgtgcctcagccgtactgtaatcaactttaaaatagagcagattaccgttcttgctagtgtatttattttgctcattaagtacttttacatggtcttttaattaaagaggtagagtaagttagactttttttttcctataagaactaagttgctttttaaaaacaactgtgtctttttatctgaaagtacattttattttgtgcatatgggtgtttttactggaaagtatgtttgtgcacttgcatgtctgatgctcatagaggccagaaagtgtcagaatactcagaactggtgtttacagacacttattagctgcagtgcaggtgcttggaacctaacttgtatcctctgaaagagcaggaggtgctcttaactgctgagccaagtctaatccctgaaagcatttggaagcatgtatttgttcattgaaaaaagtagcctaaatggataaatatgttgttgttttgagacaactataaccagattgtttcaacctcatcttcctccctcagctttctttatgctggtttatagatatctctcacaatgtttagcagttattttttaaacaataacttactatattcttaggtagtgcatgctgtataccattctcaacactcaacacacatacatttagtccaaacaatgtcacttttaggtataagtactggtaaatctatttttttttcaaatgggaaaactaaggcataatgaagtaggtagttcagacagttgtgaatgctgcatgattattttgcatgaaaatttcctgaaatgcattcatgatagcagtaagataatccctcctttatcttgaaagtaggtatagaggtttataaaagagtaaattttatgccaatgccaggatttttgaaattctgttcactgaaatgtgttccataggaccacatgtttttcagtgattggattatggctcttaatctctaaaatgtagtttccctttgcatggaacatttggataggttcattcattaattatttatattggtgtttatcgatcaatttttcttttttggagatagggtctccttatatatccctggctggttagcacttgctgtataaaccaaagtgacttcaaactcagaggtcctcctgtgtcagcctctcaagtgctgagattaaaggtgtataccaacatgctgtacctgactgttgtctaggtgctgaggatacatagtgaacagagtgcttatttaacttgtgactgtattctaatagtggtgatgggtagtatatgttagttagaactcataaagaataccagagtagcacattagagagtgagtgatgggaatgtgcactagattgggtgttcagagaactcaggatgacaaaaaaggtgacagatagagatactgcacatagaaggagaagtggaggaggatgagaacggacaggagttgggtgtaggggatgcaatctcctacaaggatcatgctcagctttataaactatagtttagactttgagtctggaaggctaacatacttgtacttttcttgaatagagttaccctgttgtgtaaaggatagatggtagaagggtaggaatagtaccataaaggttagttgtttgtcatggttttgactgtcaagatactttttgtttttgtttgttgtttgtttttgaggcagggtttttctgtgtagctctggctgtcctggaaccagctctgtagatcacactggcctcaaacttgtagagttctacctgcttctgcctgccactcaactgactgttgagatacttttgaaccttgctgtgtttggtacattttcagcttttggagtttcgaatttctttgcagcacatttctttccttctaggcatgtaaagaaagctactgttatggtagttacaggcacctgtaattagaactgtccctggagacttaggttctgaactgagcagacatgcgttcttgatgaaatttaggcattagtgtgcatcttttggtacttttgggaagttttttccccaattgcttttagattgagtttctggcaccaggaaggctggggctcagctcagtggtaatgtgcttgtctcagcacccatgagctccccgtgttaagtccccagcaccacaaagatgacattagaaaggtagcacttttaatattttgatggtcattatggtgcctctgcttgcttctaggagttacttgtgtatttttgaggatgatggtggagaggtttgatactgttttaaaatgtggaattttattcttaaatagactgtattgtatgagaagagtagagattgaagaaaatcatattgagaaatacttaagtatttatggggacagttttcatgaggaggatacaagatgatttgtaagaaacagaacctttgatttctgtttgagtgtgatattgctttgcctgagtcatgatttctcttggttagattgatattataggaaggataatattttcagttcaaaggcatctatagattaatagaacctgttggcaaggattagtactggaatagatggtaaggaattggagtagagcgttggcacattggcactggggaaaccaagagaactttgcctaggaggactggatgcaaaagtgaggtgtgtagaggccgtgctttgtttaggtagagatgtgagagtgtttaacatgtgcctgtgagacctgatggcagtctgtgttctggctttaccttttgagttcctgaccagttgttaaagtataagaacaaaattcagttgagtcagttcagagtctgaactgcatgtagaactctacatgtagaaacaggcagttctgtggtgtctgactgagtaagtggtgcaagggctggagattggcttgtattgctgtggagtcaaccatgccagtctcaattaccagctgtggaaatcaagggtctacacatatatttttgatctataaaaagtacgtttcattcctctttagtatttcattttatgtagctttaaaaagtatatcttaaaggtgaatgctaggcttgaaggccatgtgctgccacctgatggttttcctttcagctctttgtagtcacatcagagtcatgcatgaggccgactttatgaacatagtagagctgttatcatggcctcattgatacatcacttgcctccttcatattgcttctgatttgtccatgcccttggacttattacatatctcttaaaccaccagtttcttctacattgcttgataattttttttaattaatagacctgtttggtggatcagatagaaaagtacagagcagtacatagcctggtaaatagcaagtgcttaacaaattttaattataattacattcagtttataagtactattattgtggtggttgaccttggttatcttgaggctgagattagtagtctagagaggattaactgggtgtaagggcgtgataattcctgaatgtagggggtacctaccatccaatatgttgaggcctgggtagaaaaaaagagaaataaaaaagaagtgttttttctgctccctggccactgatgcgagtcactttgctctgtcacactctctgccatggcagaataaaatctcttgagtgtgtgagtcaaaataagtatttcttcctttacgatgttgtcttcaagtttttttttttgtaaccattatgtaaagttaacaagcttgcacaagcatttattttacttaacctatttttaaatcaggtgctaatttataaaattatttaaaaattgcatttatttttttttttggtgggggtggggtgggagcagaagcctgctgtggtgtgcttggaggtcagaggccaacatttgagaattggttctttttttctacctcatgggttctagggattgaactaaagtcaccaggcttggtagtaggcagctttatatactaagacatctttcctgtcacaagtaagtatttaattaaataaaaactttgcctaatcaggatagtccttttccttctttatacatagtaaactgtcagtgtccattaaaaacaaacaacaaagccaaaaaacaaaataaaaccctacaactaaagtacttaaaaaataaaatagctcttggtagttttgggatttaaattttccttcttaagatgtaaaatgttcacatttgtacatgtaaaatgtacagtttttttgtttcttttagccagattttcatgtgaattttaaaatactagatttctaaaatagatctggaaggaaagaattagcatgattttatgaatatgtgatgaactgaaaggtattcttactaaagttgagggaaaagtaaaaatgctctcatttctcatggtttgtggtaatcctggttagtatagtaagttaaacagataaggctataagtagatgagaaagagatttaaataggagaaacagaaacagtgccagggaagaaaataaaaaaaatattttcacaagtttttatgcataatcacagactttacaggttctcaccagagaaataaaaccaataagaaacagataaatggagctggatgatctaggtatgtgagggggtttatcagaggaattgacttgttattgactacgagaagtctcatgggaggccatcaaagagagagaaagggagaaaaatgcatgcaggatggtgagctggtgatgttctcctgtgtttgtcttccccactcacatccataactcacatggcagtctcatagaaacacccagaaatagcactttgactgctcttcacgttattttgtttgtttgtctgtttgtttagagatagatgtatttatttatttatttatttatttatttatttaatgtgtttgagtacactgtagctgtctccagacacagtagaagagggcatcagatcccattatagatgattgtgagccactgtgtggttgctgggaattgaactcaagatctctggaagagcagtcagtgctcttaacctctgagccatctctccagccctaggttattattttttttaaattaaattaaaaaacagaaacaaaatcaagtttatcttacatgtatgagtatttgcctgcctgtatgtctgtgtattacatgggtgcctggtatactctggaactcagaagaaggggttggattccctggaactagagttacaaactgttgtgagctgccctttgggtactgggagtcaaaccttagtcctctggaagaacaacagctagtgcttccaagagcagagctgtctttcttgccctatctctagatatttgttaatctattcaggggggcactattacagaggtcttttgatctcatgttggtgttcttattgcagcagaaaaaaaggatgcattgttgttaaatcaacactaaagaaacttaatgtctttagtgacttctgtaacattctgcaatgctccaacctgcctcagcctcctgagtgctaggattacaagtttactcagctctgttgcacaaaagccacgatgaaaaccaacacagagcttatctgtgttaaacacaggtaccatttgaaaactggcttttggattataggttgtggactcttgtaaaattttcttagcagttcttttacctagaagcataggtggtccttagccctgttaatactctattgatgcttaaagcaattctgtagggggttgggggaaagggaaatagctgctgattgaagtttggaatttcttcatgaagaaaaattgcaatgcttcctgagcttgaatgtacatatggatgactttggaaatctggtctggacttagattgtgtgcctttctgttactgtgacagatgcctgagacagtcagcttaaggaaagagtagtttcttttggctcatggtttcagaggttccagcccatgggctgatacagtcattgtttttgggcctatagagcggcggacagagcgttctgatggaacagagtgctcacgtcatagtggccaggaaagaggaggagtcacaggaggtttggggtcaaggtaaatatgcttattaaaggcatgcatactcccaatgactaacttctttaaaatagggcccatcttccatagctccatccagtagtctcctcaacattgtaaatctgtctgtggctgagagcattggttaggtcagagtcctgatgatctaccagtatctggaaatttccacagacactgtacaggatctgtcctaaccgtctggatgtctctcaatccagtccaggcaacattcaaagttacttaccacactgagttatttgggagtgccagtagatgctgtggagtgctccagaatctaccctgttaacattttcccagtgtgtacctatcctcttgcccttgaaacaacttagacagtgaggtttcttgtgataggaaaaatctgtgcatggaaaagtatttgtgtaggattaaaacatctacagaattgtatttctaggttctacaaatgttctctcatactggaattgattggtacttgatcttttatttttgcctacttcttgctttgtcttgttcaaaatggaggtatttaggaacaacagattattgaaagatgggctaatagtttattagaagtgattagaatgctgataattaaattttgagagaacaaatgggaacttttgttttttgaattgtctgatttttgttttttatcctgtactttaacaagtatgaataattaaaagcaaatttatattttgtttatttttatgtgcatgggatttttttctgcttgaatgtctctgtatcatgtgcacatctggtgtccttaaaggccagaagagtgtataggattccctggagtacctgccatgtgggtgctgagaactcaagtcctctgcaagagcagtaattcttaatggctgagccatctctccagtcccctgttactattttttctatctgaaaattttcttttaatatttctagttgtataggtctgttattaataatttagaagttttgatatctaaacaagtcttagttttgacctctaagaccctttatttaactgcttaaaggatcttgggctaaaagtttcaactttaaacataagtgcctaccttgtgatttatacagagttgtgtcttcattcttccctgtgtatctctttgtggcttttgttgttgttccctgtcccagtttattttaatattttgacctctagttttcacccattagtctatgatttgactttatctggtttcttttacatgtattctttttggcttactgttgacttagatttttacatgcacacgcgcgcacacacacacatgcatatatatacatatatgtaaacatatgtattatgtgtatgtacacacacatacacacttctttgtttttggttttatgagacagagtttctcagaatagccttggctaccctggaattcattctgtagaccaggctgacctggaaactgcctctgcctctcaagtgctggggttataggtatcccaccaatgggcttaagtgtggcttaattttaatatctgcttttacaacctcatctgcaaatttcatcatctctaacattctattactaaggactaatttttgttttagttatgggagaatatgtatacacacatatatatgtatcgtaattgttggataaagaaattcctatttttatatttggaggtgtttcattatatctttaaacatattcagacttttctggcagttaagctacttggaatcagttgaatctaatttgttatttaaatttggaagaaaatgtttatttaagctttgttaatatagatctagaacagctgtttgactatggctacttgtaccccgttactaaggagttacttctctgagggttatacccagtgctttatacacttttaggactttctttcttggtgatatgactatgaatactcaccagtcctgtgttagatgtgttatggctgggcttagtagtacatacatacctttaagcccagtactcaggaggcagatacaggtagatctctgtgagttcagggttaacccagcctgcatagtgaattgtagggcagccaaggccacatggaaagaccctgtctcaaaacaaaaatgaaaaaaaatccaagaagaattattctcttcttctctggtggttcttatttttttgtggtggaataatttattcttttacattcagattattactcatcaaacaatccaggtattacaactctttttttcttggcaactctgtcccacagatcttaaatgtttggcctcactgaactcagctgtttaggttgcttcttggaagctgtgggcatttggaaaagagctcacctcatttgtggctttgtcaggcttctcattgttagggtggttggataaattctgtttgtctttatttcatcctaacgagaactggatattgacttaacaatttgcatcttttttcttgaatcacttcagtgtaagttatggatatcattccaattaactcataaaatacttcaaaaaagtgtctttgaaaattcaagaccttctgttatgtaaccatggtactgtactaaagaaaagtagcaagaattccttaatgtcctcaaagactgattctggtttgttgcaaattattttcatatgtttgttttcatcctgggttgatttttttcccccccttttattttgtttcttttgtgggtttgctctaatgtgattatgcagggttatatttaagtgcacatgtaacagttctcaggagagattttcattctgggttatgaaaggaatttaagtgtatttaaaaggacattctttggctatttaagaattaagttaggccgggcagtggtggcgcacgcctttatcccagcacttgggaggcagaggcaggttattactgagaagaattattctcctcttctctggtggttcttattttttgtggtgggataatttattcttttaaagtttctgagttcgtggccagcctggtctacagagtgagttccaggacacaggacagccagggctacacagagaaaccctgtcttgaaaaaaaaaaaaaaaaaagaaagaaagaaagaaaagaagttagaaggcaataacaggaacaggttctgggatatactcagtggtagagtgattgctggtgtgtatgaggctctgggctggtccccagaaccataaacatatttagagtttagaactaaatatcattagtatttaaaatggcatatggatcaaagaataagttaggaataatgagagataaaaatagaaatgaaatgtaacagaatatgtgagttacctctgaggcagtactgagggaacatttataatacttaatacccataaagttcacccaggactgactgcctgcctgcctgcctgcctgcctgcctgcctgcctgcctgcctccctccctgccctgctattataggccatatgaatatggctctataaagaattcttccctggaatgcctacaaatgcttctcttaattattacaagtgccaccacttgtagtatttttagaagttctgtctagacaatttacaactatgaatatgttataaagaaaccnnnnnnnnnnnnnnnnnnnnctccctccctccctccctccctccctctttctctctttctctctttctctctttctctctttctctctttctctctttctctctttctctctttctctctttctctctttctctctttctctttttctctctttctctcttttcaaatctatctgttgtttgaggcaggatctcactgtgcagctccgggtgtgctggtgcttgttttgttttgtagaccaggttggcttctgacttgtagagatccgccagtctcttcctcctgaatgctgggattaaaggtgtgtacaaccatgcccagctttttagtttatttataaaatgaaattgtagttaatatgtttctacaaaacagtaagattatttcattgattaattttgaccagacttgaagggggaaatgataacttattttcttttaatttatctagaaaattgaagacacaccattatttcacttatcttttactcagataatatcaatagttactgagtggaccaggtgacaaaattggcttcaatggtgataatttctatcagcaaaatgtgattaatgtgaatttgtgaaacctgataaagcatataagacaagcctacagcagatgcaaaagcttttgtgtgtggttaatgtcacccttatgttaagttcttgtttgtttatttatttgtctggctttgtttttgtttttgttttttgtttgtttttgagacaggatttatcttcatagccttttctgtcctagaactcactatgtagaccaggttgactcagagatcctcttgcctttgctccccaagtactgggattaaaggcatgcatcgccatatccagccaatgtcactcttataacaataagtttaaaagtgtgcaaaaattatttttgtgggagatttatcatagtagtcaggattaataagacagttggtatatacttattcatagatatttgaaaataatggataagttaggactaataagttagaactagaaagagccttcaagttggtattaattcagactgttacctgtgtgcttgtttttataggtcagtatggaaatcctttaaataaatatattagacattatgaaggattatcttacaatgtggattcattacaccaaaaacaccagcgtgccaaacgagcagtctcacatgaggaccagtttttacttctagatttccatgctcatggaaggtgagtaaattcattgctctcagtatctgaagtcttttgaaatagtctgctaatggaagaaactttttatcctgatgtaaagcttcctgtttgaatattcatcctcaatgaatataccacattttttatactggaatttggtatatacattaaaaaatgccatcattaaaaatggattgcccttttatgtatttaagtcacttgtaaatgtttttgaattgtgactgtgaggtctaagcatggatatttttaaagggtggtcacaggaggataagaggttgtagaaaatgtgaggagccatagacagataagacatactttatttaatcagtaacatacaggtggctatgaagagagatgctgaactgaggcacaaattgcacacagggggacacatgcatgcatgcatgcacacactcatctggcacatcggccatacagaggtggggcagtggcagacacacataggcattcacctttgatcttaaggccatatatcacacaaaatggcactctgctaggaatagttatataacagatgacatcacatttttttttaatctggtgttagccatgggtgtcagctatgtttcagctaactcataccagatagccatattagcaacgtgttttctaagtattagctagcccttacggctggcgaggatgtggagaaaggggaacactcctccattgttggtgggattgcaagcttgtacaaccactcttgaattcagtctggcggttcctcagaaaattggacatagtactactggaggatcccgcaatacctctcctgggcatatatccagaagatgtcccaaccggtaagaaggacacatcctccactatgttcatagcagccttatttatgatagccagaagctggaaagaacccagatgcccctcaacagaggaatggatacagaaaatgtggtacatttacacaatggaatactactcagctattaaaaaaatgaatttatgaaattcctaggcaaatggatggacctggagggcatcatcctgagtgaggtaacccaatcacaaaggaactcgcacaatatgtactcactgataagtggatattagcccagaaacttaggatacccaagatataagatacaacttgccaaacgcatgaaattcaagaagaacgaagaccaaagtgtggacactttaccctttcttagaaatgggaacaaaacacccatggaaggagttacagagacaaaatttggagctgtgacgaaaggatggacattctgatcttttaatgtacaattcagcttctgcctcttccatgttcttttgaacttttaaatttctcactgtttcattgacatttgatttgtgctctccttcctttcatgtatttcttgcttatttttcttttttttaaaaaaattattttatgtatttggatatttggcctgccttgtatgttgtgcatcatatatgtgtctgttacccatggaggccagaactaggtatcaaattccctggaactggagttacaggtgtttgtgtactgctgtgtgggtgctgggaattgacttcggttctcttcagagcagccattgcccttaagcacttagctgtctctttagccctgcttgttttctgtattgtgttgttttcttcttcacaggcaagcactttgctatttagtattgctcagtatatttcatatctgatctaggtgtttttggaaaaatgttaatggattaatcaaaagattaatttgaagatgtttctttatactaaaaagattagggctagcagtttacaacactaaataaaattttatgactcttagttttaggtattattaaaaatcatccattctttattagtaccataaaataataatatcattagcttttctaactttagtaacctctcaaaataaacttactactgtgtctccaaatatatgtactattgtcttcctcactaaacagaggaggagatttcagtagctgcctttgttttggatgccacattgttgtataggtagatttttattaggtaagttacatattttatatttgacaaaccaaatctctagttcttttatgtgtctgtgagtgagaatgagtaaccatgcaagtatgcagtcatctacaaaataatttgattgttggctaaaagtgatctctatgatttaagccttggctgataggaccataaacatatagctaataggaatagtaagtaaggtgtgcagaagtcacttcacagaagggaaacttgctgtggtgttttggagatgaaatactgtgggaacttacaggaggagcacatcttattgaggtgatggtttgatggtgtagcgtctccttttctttgaaatagaaagtacaaagtgatgaagctatgtaagaaattatagatttcttactagatctattatttcctctgacttataagaaatgctaaaaccaggtgtgatgctacatgactgtaatctagtccctgtactcaagagacccaggaaggaggagctcatgttctagaacaatgtattctacagaacaagatcctgtctcaaaaaacaaattgaaatactagttaggcacatcataacatctctaataggatatgcatctgtgtaaagagtaacttgcattttacttttctaaatgatcctgtgtgtttctattggataatgagtacactataaggaagactttggcttacccttaactgtagccacatctataaacattgactgtcatatgcattgtggctagagtacttacctgctttttcagcctttaaaagatatcaataagtttatttatcttaattgcaaaccagggcccagtctctcagaaccaggcaaattaatcaattatggaacatgttgaatacagaacagttagctcacatacataacgattttgcttgcactgtgtcttagggttttcattgctgtaaagacataccatgaccaaggcaactttcataaagaaaacaattaattggagctggcttacagtttcagaggttcagtccattatcatcatgatgggaagcatggcagtatccaggcagacatggtactggaagaggagacttctacatcttgatcctacagccaggaggagactgtcttctgcaggcagcaaggaggaggctcttggcagagcttgagcattatatatgaaacctcaaagttctgcctccagagtgacacacttcctctaacaaggccatgccgcctccaatgaggccataccttgtagtagtgccacttcccctggcccaagcatattcaagagtttattgatcttatttgaaaacctgcattatgattagacaaatattgcattgtattattgcattatgattagacaattatgatttgaatattttagaagtattccagcccctgtgtgttcaaatattaaagtccttttttataaataagcatatgaacaaactttcaactttgcttaatattaagggcttttttttttccaggccaggaataggtaggcggtgtactcctttaataccagtgctcaggaggcagaggtaggtaggtctctgagtttgaggccagcctggtctatgtagtgagttacaggataaccagggctgtgtagagagttcctgttcccaaaaaccagaccaaaataaaatactgtatgtgtgtgagtgtgtatgcatgcagccttttttcaagtctaagatttttttcctttctcccttgaggcagggactcatatatgttagtctggtcttggctgaacttgctacatagccaaagatgaccatcaacttctgatcttcctgcctccatatccccactgttgaaattataggcatataaccatacctggcttacgcagtgttggggcttgaattgaggtctttgttcatgctaggcaagcactctactaactgaggtatataaccagcccatgtctttgtggttttttgagacagggtctcactctgcatctcaggatagcctagaactgaagatatagataatgctggccttgaatttgtggcaattctagcttccttagccttcagagtgcaagaattacaggcatgagctaccctgcctggcttctaagcccaaaattaagaattctacgaaaaggcattggttttgaaagagttgaaagtttgtgaaaagtgcgacttgagccagtactacagttgttgaagaaggtattttaaaagaatttaccaattaggtactaaggtaaaatacatcaaagataatttgcttagaataataaattttctggatttctgaaatgatttcatttggataaatgggattgtttagttagtgctatatttacatcaattatgactttttccttttttgattattttgttttactgtgtccaaatgtgcatatcttcccttaagaacttgaggtacagagcctgagtcttacttaggtttttacatatggttgtaatgaggggaaggaggggaggagaaggaaggaatgaatatgaaaatatccagaatatgcagaaatggcaggtctatcatattctaagacagaatttttctaataattttggataatttgtgcttctcaatccttgtcttcatgtaatagtgtataatgtaccagaaacttgtttttctatattccttttaaatactagctggagacatgttgcatcttgctataactatcatagagtcctaccttaactatcatgttccgtggtttgactaccatgcattttaggcttctataatgccaatggactataatctcctgaggaatttaattgatgtggtttgtaaaatgtggtttgtgtgctaccttaaatctcatttaagtcttggttttgcagttctgcattttgtgatgtaataactccatagattagttggatatgtcttgggctttgtttctgccatatcatgagttgggtagcagaaaaacccatcccttcaaaagcatttatttatgtagtgtgtgtgtgtgttttgtgtgtgtgtttctgcacatgcatatgaaggtaggagaacaattcttaaggagttctttcctttcacctttacatgggttttaaagatcaaactcaggttttagtaagatttgtgttttatgagcccttagctgttgaatcatctcagcaactttttgttttgtgtgtgtgtgtgtgtgtgtgtgtgtgtgtgtgtgtgtctttgtaagagacaaggtctggccttgcactaacagcagtcctcctgcctctgctcctaagagctgttttatttacgttttactatgtaactcagactagcctggatctcactatgtagcataagctggtctggtacttaccttgtagttcaggttgcccttgaacaagtgtaatcttcttatctcacttttataagggctatacttcttttgtgtttgtgtgtaagtgtacacatttgtacatccatgtttgtgaacatgaatatggaagtgagaagacaaccttggatgttgttcctcaggtgtatcctatctctttttttgaggcatgttattcactggtctacaacttgtcaaataggctaagcttgttgaccaaggagcctaagggattcattctcctgtctctgtttcccattgctgggcccagccttttcttctaaaatggattctggggatcaaactcaacagattgtgcatgcctaatggaccagtcagtctaggaggaacgatctctgttaattctgtggtgataacagggagccagtgacttttgatttggataatttcttccttatggaatgaagtaaaaacatattttgcttgaccctggtaaagacgttctatctatgtatttgactcccagctgttttttgtttgtttcttccaatttcacaaagagcttactctcactagtcagtaactctttgattttatcttgaaggcctttattgttgatagaataaatatggtgaaagtggggtacctttggcaggtggtgccattgtgtgctactaagaaattatgccaagcaacagatttaatgttggggaggagggagagtgaaaggctgtttaggagtggggacatgagagagaaacagagagatagggacagagagaacgaacaagacacagaatgagagagatagaataaaggagatagaggcaaagagggaatgggagagagagatgtggggtgcctgggacctttttttgtactgcacatgttgcatgggtggaaatgcctaattgctaacactggtcattttgcccagactgatattggatgacatcctgagacagagtattcagcctgttttacttctttgatctgcttcttttaggctccccttatttacacattttcaaatttcccactattggttatactttttcattcagtcctttgatttttgatttttgctagaaggcctgcattttgccaattgtgattccttgtacatcctaagcaggcgatctataacttggtatggtgagaaggccgttggctggctaaatacagatgactggtcagactcagactctggttttacttgtgctatattcatgttactgtgctctgacttgtgaaattattaagtgtatgtttttctgcttaatttgtgtttttttttttttgcctttgtttacagtctgtagagccttagaactcttgtgaatgatacccaaggtgcacagagtgattctatcttgtacttctacaaaactgttctgcttattctttatatatgtgactgtgatgcatagtaagcttataaaaggagatttgaaaaaaaaaaccttttcttttttttttaatttattctttaaagtccagactttatccccctcctgatacaccctccaactgttccatatcccatacctcccccttgctcctgtctccaagaagatgttccccacccccgttccaccagacccccccactccctgggaccaacttttctatttaaaaaaaaaatgttactgcactagtgaatggctcagtaaagacacttgctgacaagcctgatagcctgagttcaatctctgggacccacgtggttcaaggagagaacagaatctcagtgtcttccaacctctacatgtgtgtactcacacacacacacacacacaagtaaatgatatgaaatgtaataaaaagtatactagtgaaagcaaactcataatatttgatgcttatattggcaacttacctttttattcttttaaaattagtatgtaagaatatttttgttaaaacctttacccgtgagcatcatgtgtattgctcatattcactcctacaatagaaatggaaagaaaatatagatagagtgactatctcaggcatctttataagaagacagagaaaatgaacgtctggaaatggcagacatgtctcttgaatgccttgtggtttaaatgagaaatatcttccataggtttatgtatctgaatacttggttccagctggtggttctttttggggaggttatggccatctgttttcttttcagagttgctttactggtctaggtcctttgcatgtccatcgtgttagagctgacttgtcagcatttacagcaaaacttgctattttgatggagactggtatatctttagataactcggaaagttgatagctttttggaaggcgtgctaagtcttgatactcaggacctcatgtcctaagcccactgtgtgctaagcacacattctaccgcactgtacacccagcccaacaacactacagtgtcttcatatcctgaatctgatacctctatttatttaagtcttatttaatttctttgaaatttttttctaaagagatttcagtgtagagacatgatacatcttttgttgaacttattcctaaccactttaaaaatgctattgtacagagagcaaattgtctgtcttagagttgtaccatttatggtgttgacctgggagtgaattaaaaatgggtgatgttgagaaaggcaagaagattttagtttagaagtgtgccacaatgtgaaacgggaggcaagcataagactggaccaaatctccatggtctgttcgggcagaagacaggtcaggctactggattcttttatacagatgccagcaagaacaaagttaccacctggaaagaggatatcctgagggagtatttggaggatctcaaaaagtacatccctggaacaaaaattatcttcaccgggagtgagaagggagaaaggctagacctaatagcttatcttaaaaaggctactaacaagtaattctattgccttatttattacaaaacaaatgtctcttgggttttaaattatactataatttaatgcatataccaaaattcagatcatgaatggctaagtgtttttcttatacagtcctaatttaagtaaaactggattgtagtaaagtcgatattatctttttaaaaataacaatctcagctgcatacttggtatgtactgctcatcctttctcaagataagagtgaacttaattagtaatgttctactttccagaaagatgggggtgttacctcaaaccattaaatagttttataattagatttataaaactgggcatatgaatatgtttaaacactgggaaagttctatcactatctcagaaacaagaagacttacttgtgtttcagtttgtgttcactggcttgttacaggcaatggttaaatatcaggagggcaactatctattctggacaatgctgatttaattataattccctatgtcaagtatgctcttttaccactgagaggtactttctgtggtttttgtataatatcaaataaagagtatataatattaaaaaaatactattgtagctgagaatggtgacatacatcttgaatttcctagtacttgggaggcagctgcaggtggatctcttgatttcaaggctagccagggttatatagtgagaccctgtctaataaaacaaaacaaaacccccattagaaaaactcagacacacacacacacacacacacacacacacacacacacacactaattgcaattgtttcttaaatttcctctttcatgtgtttgcttctagatataaaaacgtgctggtgggttttgttttggtcttggtatattagccctgtgttttgtgactttattagtgtccagtagttgattttatttcatctacaaataaaggtatatttatttgtttgtttatatattgagttattgtgctatctggtaccttcatttagtgttggaaagaattggcaagtgcaaatgcctttttatttctaccttaggggaagaatgattgtctttaatattaaaacatattagcaatattttgataggttaaggaagctctgactcttgttttctatcagtttttatcttgagtgagtgctgaaaatttcagttgctttttctacaactaatgttatgactgtgtgggttttctcccctttgaatacagtcagttacattgatggtttttttttacacatttttaaaaagatttatgtatttactttatgtatgagtatactgccactgtcttcagacacaccagaagagggcatcagattccattacagatggttgtgagccaccatatggttgctgggaattgaactcaggacctctggaagagcagccagtgctcttacccactgcgccatctctccagctctacattgatttttaaatgtaaacctacctgactcctgaataagctaagttgaccatgaaatattatttttattaaggcacttttctggtttctctgactaaatgcctggtaagagacagtttaaggaaggaaggatttctccaggctcatggcttgagggcacatcatgacatcatgacacagaagacacaacagcaggagtagctcaggacaagtgatggcaggagcaccaggctgcttgcttacacttgtacagatcaggaagcagagaggtagccagaaccaggcctgcctctcagagaggcaccataactaaaagattctttactcagttctcgttcagaccacatgatcattttttatattgccatttccttcttgtccttttcctcgtagtttgttttctcctaataatgctaatatgctccccctaattcagtggttctcaacctgtgggttgggaccccttggggacacatatcagatatcctacatgtcagatatttacattatgattcataacagcaaaattacagttgtgatgtagcaaaaaaaatactttatggttgggggtcattgtgttgtatcttaaggttgtctttgttttgttttgtacctttttgtggcactgggctaaaatagagggccttggcgtatatactaggtagtgctttatcactgaactatactcctagaaattaagatgttaatttacattttgttttttaagtaaagaataagttcatatatttcaagtctagatggtgcagaagagtaaaagggacaatttcctttcatttcctgtccccagccactcattttccattccaggttgacccttgcttttaatttcctttttatttttaaagtcatttggcatacacttggacactatgtctttcacacaaaaatgttctttgcagaaatatgtgtgtgtatatgtatatgtttattcataatctttactatttaaaaaatatgatatggactggaaagttggcacagagggtaagagcacttttctctttcaaaggacccatgtttgagtcccagcaccaatgtggtagcttacaaacatctgtaatttcaattctagaggatctagtgccctctttggacttctacaggtgtcaggcacacacatggtacacaggtatacctgcaggctaatatccactcatttacataaaataataaaataaaaatagaaaaatatttaactgtacttattatgctatttacttttatattggaggaataggggccttctatgggagacttagacagcgaggctctgtaactaaggcttcctccatgctccctacagccgttcttgatgagagagacagttcaagcttatccatactgtttattgactgttcatcatggaaaatgggttgtatactacttcctcagggtggactagagattaaataccttttgtagaaaggaatgttctggtagggaagcttattggctaaaccctgagggcccatctaaatacattattagcatgaagaactaggagtgtggtcatgtgtttcaggccaggaatctggtagggagcagggaaactccttacaaatgagtgcttataatttcttctaaagttataagttcaagaatgggttacagaagtcaggaaaatcatttccttatactttttattgaaaaaattttatataatatattctgatctttttactcttcactgagttctttccagatcttccccatatctctacacatccaacttcacttttcccctttctttcaaaaaacaaaacaagacaaaaaagcaagaagaaacaagaaacataaacctttcagaaaccacaggacaaaatctaaacaagtaaaagtctaataagacaaaaaaaaatggagtaaataatgcaaaataaaacagaagttgacaaaaataccattgagttctgtgttaactaactactcctgggtttgtggcttgctcagaagtgtggttaatatacacaaagagacttcattggaggagacagattttccctttgtccatgggtatcagttgcagatagtttcttggtcaggggtaagacattgtgtctacctctccctctcagtactgggctcttatctggcttgaacttgtacaggttttgtgcatgctactacagttactgtgaattcattatgtgcatcagtcttgttgtggctggaagacatgatttctttggattcttccatcacttctggctcttagaatctttttgcttcttattctgcatatatctctgagccttaaggggatggacttgatgaaaacatcctatttaggactgagtgctccagagtttctctgcacattgtccacttgccggtctctgttaaattccatctactgcaagaagatgtctctctgatgaaggctctgatctatgggtatagcagtatgtcattaagagttgttccaaaacacaagaaaatcaagaaggaagaccaacgtgtggatacttcattcctccctagaatacggaataaaatatccgcagaaggagttgcagagacaaagtttggagctaagatgaaaggatggaccagccagagactgccccacctgggggtccatcccataatcagccaccaaatgtagacactagtgcatacgccagcaagattttgctgaagggaccctgatatagcctcctgtgaggctttgccagtgcctggcaaatatagaagtggatgctcacagtcatctataggatggaacaaagggcccccaatataggagctagagaaagtacccaagagctgaaggggtctgcaaccctataggtggaacaacaatatgaactaatcagtacccccggagctcatgtctctagctgcatatgtagcagaagatggcctagtcagccatcattgggaagagaggccccttggtctagcaaactttatatgccccagtacaggggaacgccagggccaagaagtaggagtgagtgggtaggggagcagggcaggggagggtataggggacttttgggatagcatttgaatgtaaatgtaaatgaaaaaaatatctaataaaaaaagtgggaaaaaacaaaacaaaacaaaaaaaaaaagagttgttttactgccatgttcctttagtaaaataatagtatgtagtttttattatttattctcctgtacctgtgacctatctagtctcaggctcttgaccaagttagcagtgccaggtatgggttatatctcattgaatgggctttaaatccaatcagaaagtgattggttactgcaataatatatgtgccagtattgtaccactttatcttgtgggtaggtcaccattgtagatcacagggtttgtaactgggtgatactgatgattgcttttctctgtgtatagccagcagagtacattccagtaccgtgaatgctagtcattggagttctcatagtttaacagtaagtgttgtctttagcaataaggcctttctatcaaattgtgaagagtagccttggcaatagcctatgatgtttggaggtttctgtaagggccctttggccaatgaatcaacaagatgcaacctatttctagccttggaggttttattggtagcataagatggtctagttggggcattgtatcttattatttagtgactcttatttgtatctattttagaaagcttttatagtagtaggattccatatggtttttcagtggtttagtgttagttgtacttcaccgtattcctttctttacctttctctcccatctccttccctatttaatcgtcatattctacttaagccttttgtctcttttataacacaaaaagctatttcttctttattgagatcttctctcttcattagtcccttactggaatcttgtgttcaaattgtagcacatatattgagagcttaaaacctaacatggtcatgtaagagaaaatatacatttgtattttggggtctggattacctcactcaggatgattgttttttacccacagatttcacaattaaaattttcttaatgacagaatatttcattatgtaatgtactacattttcattatttatttatcagttgatggatatctggactactgctttctggctattatggacagagcagcaatgaacatggataagcaattatctctgtagtgggatatagagtcctttgagtatatgctcaagagtgatatagctggattttgaggtagattgactcccagcttcccgaggaaccaccaaactgatatacatagtgtctatactggtttgtgtttgcaccagcagttgaataagtgtttcttttccctcacatccatataaagtctttattttcattgatgcaggtaataaattcatacctcttaagcatagtaatcaagtactttacctcttagcgataccacaagccctacagtttacttaactaatattagtttgttgtaaaggacgggacttaggaacagcaaaatgaaagtgacacaaaggacagataggagtacagaacttccatgccctttcttgatgtatcacctttgcagtacttccatgtgttaaccactggtggacactcaccaatttcactgactgtgataatgaagtgactgaacatgggctgaccctcagacagcctcaggttgggctgatcatcagatatgcccaagtgactgagggctggaattttagccccagagatctataaacatgttacacagcccctgatgaacctgaggatatgtgggggccccatgttcagacacctctttatagatttgggtgtgattagaaatggacacttgaatagggatgaggacactcctatcatccagaagatcccagagttttaaggaatttgtcataggaaatggggacagaggccgtttattgaagtctgttgtactggaggtcatttcattatatggaagcatgcctaagaattctagaagaattcctgtactagaagccactgccactgattcttttgatcagttttcctaagcagatgttgtacagacttatttatgtcacaaatgagtatagtgactggtgcaaatttgtaatgtgttttaaacaaggtttcttcctcctgttctactattcaaaacatgcttgagaagataaactattacaacacatctttgttatatttgtcataaagatcatggagtagaaattgtattgtgtgcagacttctgtaacaattatggaactatgatatacttttaagagtttagtgatgacacttaagttgttgccatttatccacatttcctgcaggctaagtattgtactgactttatgttatgatctaatccttaaaacaattccacaagatgggcagaattataatttacttcagtttcgctttgagacatggtttcattttatagttccacctggcctggaactcactatatttcccaaatagatgaattgtgttacacagcccttgtcttgtgtactttttttttttaatagtaaaagaaatcatttaggatttggatcctttaaatttcttttctcatcctattttgcagacagttcaacctacgaatgaagagggacacttccctttttagtgatgaatttaaagtagaaacatcaaataaagtacttgattatgatacctctcatatttacactggacatatttatggtaagttggacttttatctgacatattatttgattttttttttttttggtttttcaagacttttttttctacacacaggagtataatgataaatataggcagatagctcagaaaaggttttgtaaatactgaggagaggaaagaaagtggcagaggaagaatttcttgtcatttgatggttcagagtgtcaagaattctagaagattctaagatcctttttttttctttttttctttattagatattttctgtatttacatttcaaatgttatcccctttcctcatttgccctcccaaaaccccctatcacataccccctttccctgctcattaacccacccactccggcttccctgtcttggcattcccctacacgtgggcatcgagtcctcacaggaccaagggcctcccctctcattgattaaaaatcaagcttaccattttgttggccagggacctttcccctagagatccataaaggatggagaaagtgttcccctgactctgtggtccctgattcaactttgatttgtacctcagtgtgcaatctgaacaggagtcatatatctatgagataggggagaagagattgcatctgatcccaggtggctgtcttatctctttagaagcccatatctgtactttggtttatactgtcctttccctaaatacttctgtccccaaaattagttgctcaaaaaccaaaacaacaacaacaaaacccaaaacaaacaaaaacccaaccttgtcaatgaatttccaactttgttaaaacaaaagcaaaaacaaaaaaacaaaacaaaaccaagatggtagtggctgttggtatacattctttctgcccagcctttcctagactggaccaccgtgtgcagcagaggcacagagcctggaagagatgaaaggtctacttagagtcacttgtcttgcctggctttgagcctggtattcccatgctcaaggcatgtagggaattttgtggagttttaaaattttaactaattaattaacttaatccaattaatttttttctgttttaaaacaaaacctgaggcggtagatcaggtcatcttaggcaatggtctttgaaaatgaagtcatctgtggagccactttacatgatgtttaatagtgtaccacaacaaaaatctgtaacgctttgacgcttggtgctttcaagtttaagagttactgttgttttagcctcttgtttgtttgtttgtttttgagattatcttattatgtagtctacactggcctagaactagcaaacctcatacctgtctcatacttgtagttgataagactacaggcatgtaccaccacattcaatcagagttttcaaaaaaactttcaatgatttttataatttctgattttccaaggaagaaataagtgggaatttctgagttatataaatagaaaaagttaaaaggaaactgacagtagagatcatcttagttcaaaacaatataacaaagtcacctaagaaaattttcccaggttctttctccctaaaatccatgtggtttgttgttgttgtttggttattttacacttgtaacaaatatctcttaagagtttaaaatgtgctgggaggcacagacacatacttaatctaacaggaaggtcaccagacagcaaagtgggacagacagggaagtcataaagaaactaacataattcagacaatcctcaactattaactcaacagtggtcaacaatttccttctgtaaatgagattttttttttgcttgaagtcataacattttgaaaaattaaatgcttaaagagaaacttttaattttttattatactagataaatgatacatggttttacttacctgtacactaatgttactaaattttagtggttctttgcagtcttctaattgtaaccaaggaaagtatttttggcagtttctagtactctcttacattcttcatcacatgtcttactgggcaaactgtgctgattttgtaggtgatggtcataaaaaataaaagtataaatgagcttgtaaagaaaggtgatgccatttaaaatatctcagggatgagatttgatggcacacacctgcaattctgataatctggaggcataggcaggaggagcatgagttcaaggccagctaagtctacacaacaaggcggtttcaagaaaagtacagattttattttcagctcgtgatttattaaaaatcaaccagtgttaatgtgtaacttagaaatcttgagaggtcgggtcgtgttatttcacgtgggtggtgtatgtgctcagcatgtatcaggaccagacaatttggccccttccttctccccaaattacagaaaatcctatgaggtgatttcagccttgtcttcctctttcctcctcttcctccccttttcttcttgtcatttctctctctattttccactgccctcttccttctcttctttccttccattctttccctaccctgcctttccacttttctcctctccttttttttcttcccttcccccttctctactttaccctccctctctttcctttcatatggtctcttctctcctctccctcccttttctctcttctcctctctttgtaatgtttgggattgagaccatgaaaatttgtttttagtgagagatgtttgttgttgaagaaaaagtcttgttaatagtgtccaggctgatttcaagcactcccatcccagtctcatgccacctttgttaatttaacttttgagtcctgccccttttaaaggcatgtgcatatagttttggctgcttggaaggttgaggtagggggagtttgaggccaatttgagcaatatagccaagatgctctctttaaacaaaaccaaatgactggtggtgctgtaacatggctcagaggtagaattcttgtgcagcactcgagaaaccatgggttcagaactatcagagcaactgaaatgaagcaaggtgaagctacgtgcctccatgtcacttaattctgtgcctccatgtcacttaattctgttgacttaggtttatgactgtattgaaatagaactaaaagcactcattttttgatgttacttctcttagtagagaatagtacggtagtattacaaatctgtccagtacttttttcaaagactcattttttaaaaaggtttaaaaatcttacctcccaggctggcttagttctcagtgtgcagttcattctcactttgaaattgcaggttcctaaactctggtattaaaagcttgagacactacatctagcttctttgtccaacatctcaaactagattataggaatgagtttttttaaaaattacttctgaactacttggccatttcatgtatttataaaatttataggtggcaagaaggccaaaaaatgtacaatgtcaagttagaaagaaggttttcacttgtggtaaattaggaaaagttttccagggtactttaagtttctttattctggaaatacctagtttattagaggatctctttgctttttaaaaaatttaagttaatgtgatgattattgaatgactgctatgtgtatgtcagtcattgtgctaggtagtaggcatatgattgtcagtatgacagatgttccacttttattgctgtataagtaattgtatatctgttttaactaaatactggttgctattcatatctcaacttgatgtattttacgtgaaaattaatttcccagcacatttatacttaggatagttgtatatatgtgaatatgtgtgtgtgtgcgcattcatatatgaatggcttttttttaaataggagaatgtgcaaattaaaatttcaagaatttgttgctttcatcaataggtgaagaaggaagctttagtcatgggtctgtcattgatggaagatttgaaggtttcatcaagactcgtggtggcacgttttacattgagccagcagagagatacattaaagatcgaatcctgccatttcactctgtcatttatcatgaagatgatattagtaagtattcatgctttatattaggtagtctttgcaaaggcataggaatcctcataactgtgtggagacaaatgtagcctgggctgtttctttcctaagcttattcaggttaaacaaccagagtgtaataagcaaagtctccatttagtaaataatgggtctctgtggtatagcagttgtcaacacaggccagtcatactctgttgatataaaacaaccaattctgtttgaactgtgagttagccaaaccgacttgaactgtcattctaaattctggtatcagccagtctgcttggttacaacatctgatgtctgtggcttcaacagacattgtgctgaaggtacaacaatgtcttatcttcaaatatccatttctatatgaatatttatgtaatataggatttttctaatttctaaatccactgagtgcttctctttagaatcttgaaataatgatgtgaccacagcctggtgtatgattccaggctttccatggatttgttgggtaattctttttctatgtttaaggatagaaaattcatttaacctttacattttaattctgtcagtttgtgtttccgtggttattcaattgtgagactgtaccattaaaataacacaaacacattcctgtaatttctatgcaccttgaatactttccttcctttttaacgtaagcaggctagtttctctagttttgcctgttttcctgacttggcagcttccttttgctttcattttttttctacagatagggatttattatccatatttcattcctgtgcttcgtaatatactggcaaatgtgaattattttgcttttttgctccattgtctctgactgtttctgtgtttccatctgcccaactgcttgttgcttctgatggtgagctgctatgggagaatagccaactttacttaaggatgtgattatgactgttgttgtttgcagcctcgtggatttattaatgctgcctcgcttgcattttcagtcatccttatttgatacctttcccactctacctggaatttcttttggcctcttaagccttatagtcctcctcccataaataggaatatggattctttgcttttctttctactgacagaacttttcttcattgggcttgtgtttttccttgaaattttcttataaattaagtcttttttgcagttttatctccactattacaatgtgcttttctacaaatacaggttctgtgggttttgcccatttaatattcaagtaacagtatctgtgaagtagatcttgatgaatttctaataaaatgttgaaatatgctccctatcgagtgtcttcaaacttggaccaggtctttctggacaagaaagttgagaagtgtgaccgctcaggctggttttcctccttcggcactgtgactgctgctacgtctggccatcagctcccctgtggtttgtgctgcttgtgacctgagatgcttctttctcctgtgttctttcttctgcttatccctgttttggttttttgttttgttttgctttttacatttacacttcccccttgttacagctcataacttccaaatatcttacgtcaatattttttattaggtaccagtagtagtattaaaacttaaagatagttatgtttagatgattttgcttataacttctctgttaagtggaaatgcagtggtgtcaagatgggcatatgggaagcaacagtttataaaaatgtttatcaccttttgttagtgtcaaatgaataggtttgttacattttcattcagtgtattttaaactttattcatacaaaaagctgagttgttagggcaggagagatggttcagtggataaaagtgtgcagcataagtgtgaaggctatcctattatcccataaaagcctgagaggtgtaacagcagcatttgggaggcagagctagctagactatccagaactgatggccccaggttcaccaagagactttgagcataaataaaatggagagtaatcagtaagacacccaatatccagttttggctttgacttgcacctgtgcccatgtacccttcccccacatatgtaccccacacagttagtataaaaaccaattttagcaagtatgctaatcaaaaacagggagttagacttacttgtctggcaaactgtagtttacctactccaattataggggattgacaagtaaatttacttttaattgaccatttaaactctggatgttggtgatcctaaaagaagcagcattaattagaaggatagttgtaatttaatgttgcttggcactagataaaattctttatgtatgttaactattttaccctcagaggctctgtgaggtataggaaaacattattcctgttttataggtgaggaaaggaagacttagaatctaatgtgacttgtggatattgtcttctgtgccatgtacccatggggaaaaacagtataatcctcattaccctttactactaggattactggggcttttctgaaatctgcacgccttcccaaaattatacaattacatctattgctgtgttagaccaaaatctattcttgggtttcttttttctttccctcagctagtgaaaagaaagggtctgctcctaaatgcatgttattatttttacataactagcttagtgtcaataatttattttcttttttttttatggttgtagaagagtaggaagttcttttttattttttattttttttaataatttattttcacaactgaagtactacttgattatgtatatactgtaggtatgtataagtgaacttacataaagattctgataatttagctatgctttctgaatattcattttgtacctattggcataagtgtatacatccatgtggaaaatgatgcttttgttctggagaacattaggtgatgtgttttaggcagaaatactgagcagcctctccaggtgcttttgatacacacctggatgtgatgctgctcactgcatacagttatcagcttagaaatcacgtatgctcagttctccattgcagcagtaaaaaacactctcatagtattacacgatgacaaagcaaaaatgccacttagttctctacttgctagcatagtttattttgaagaaatagaaaaaccactgtctggtaaactagtatttttttttaaagaattgtttattttgtgtatatgagtacactgtagctgttttagatacatcagaagagggcatcagatcccattacagatggttgtgagctaccatgtggttgccaggaattgaactcagtacctctggaaaagcagtcagtgctcttaactgctgagccatctcttcagccctctaatagtaattttaaaatgtgtagattttaggaatgcctgactattttctccttggaaccttctgtatactctgaggcagaagtttaagtcatttttttcctgttatattttcataaaaatccttaaactctgaatttaaaaaccttttaattgtataaagctatatagaatatttggtttattcttttagagttattgtttttatttattttcctatgtgtagacatttgcctgtctcttctaggaatgtaggtgctcaggctcttagcatgtgttagttatagctgtatgtatctcttcttttgtgtgtgtgtacttcagtgagaaagcacataatcttatgaacttaaaaatgaaggtatttaaaactttgttttaccatctcaagatggagattccattggtgtagaaatgttatttatggaggcgtgagtatattacttttaatatctttaaaatatcagttagagagttgcttttcgttgtgggttctcttctcctctaatcacctcgaggaaatataaatttctccatccattttacaggtgaaaaaattgagaaagccataagaaatggcagttatttttaaaatgatagttaagtagaaatgtaatatgcttaaaaattaaatatgaagacaccaggtaaatgaggaacatctgcaatacagcatataggttatttgagtaataaagattccaagataaaatccagcttgtgtttcatagggagttctgaccatcctagacaacagaaccaagccatgtctcaaaaaacaaaacaataagtacaacaaacaaactacaatgcacaagcaaaaattaggttaaaaaaaaaacgacttatttagtcagaaattatacaagtaggacttgttgagaaaattttagatcaagaccttttctaatttgttaccatatgtatctgtatatatatttatctttataaagtaaaatatagctacaataaaatacaatgtttcagaagcacaaacatcaaagatctgttataaagcaactctaagaagtaacattgatgttttttgctcttctgagaactgctcatgattctgttttacagaattttacaaaaagattagattagcaggacattgtggctcatgtgtgtagtttagcactcaggagcctaaggcaggaggattgtgaacttgaggccatactggactacataatgagttccaagacagcctgggctatattatgagactttgtcttaaataagcaacatcaaccaaaagcagagattaatttatcatacaatctagatgttatagttgagtattttcaaatgtacaatgtggtgaaatgtttgggaatattcagtctgttactaagaagactgaatttttaaaaaaatcttaaaattttacatctgtgttcattttaaaaatcattataatagagtattggcacataagttaatacaactcaggataatattaacacatattagtcaaagcatctggccactttttaaatttttttcttttcaacttttaaagagcaagtattgtatatgttctggacaagttctacagaaccatatttccaactcagcccttaattttcaatttgtcttttgtagtaatctgtaaaaacagagatttaaaacatattttttggagaagcagtttagaaatgttagataattcctagttgttgatggaatgaaagccagtaggaggctattgaaactatgtttttgttattgtttttaaatatttgtctttgcatgatagatgcctttgagaaagagccatagaaaacagctgctggttggaaattaaattcaattatattggtttataaatgtacaggaaagattaagttaaaaaaaatgcaccgtgatagcaaattctgacttggtacaagaatgtgctaaataaaagctgtaactaaaacaaagagggtggaacaatctcataaatcataaatctcataaataagttggatatagaaaggcttcctggggattgtgacattggatttgaaccttaagacaaaaggtctttgctgaaaagaatctgtgattacagaagctgttacctggttgtgaccccgtctgtctgtctgtctgtctgtctgtctgtctgtctgtgtctgtctgtctaactaaaatttgcctgtcatacagcttaagaaatttgagaaaagaaaatttagaaacaaaaacaaaaagtccaagaactaacattggctttgtcttggaggcactgtggacagatgtaccatcccaagatggacttataaatcaatgtgttaaaagtattcttatgtatttcagttctaagcttttcagttcacaagtgtgttagttttgtacttcaacttgtgattttttttccttaaaaagcttttagagaaaggatttagtttcttatgttctggggttttagtcaatggtttgtttgccctattgctttgtgcctctgggggcaacagtgtatatatcatggtgggggagcctggtaaatattgttcactttatgtcctctgggaattcagagaaagtgacaggacagggcctgggtccagttatcttcttcactggttgtttctagtgacctaattcctgctaggtttattccactgcttttgagcacaataggtggccaggccttcagcaaatactccattaacaggtttgtatgattactttatttcttaactgacatttgaatggctgatcctctctttaggtcctggtatacggtggtgaatactgcaaaagttcatccattggacttcaaagtctagtgattctgtttataattgatcataatacagcaaattttcctgttgctctgactcccatgatctccttcctgccagcactaatcctttgttcctaaaggccagggtgagggtagacttgcttgagtcagctctcccacctgtttcctggaagatgaatgctgtgtgtctgctgctctttccatccttcccaaccttacaaagctggggctggggctggggctagatcagaggggatagggctctcacaccggaattgcagagaagcatttggagtccttctctacctctacattctttgttctttctcctcttggttattgttatttgggcaactttggaataaatagaaattttcttagttaaggaacaagttggtggtatgacaacagttttcatatattatctgcttgtggaggtgttctatttaaatttctgctcagattaaggattgaaatatttaattgaatttgtgttaaatagcacattactagattttagaacttcttttgtctaagagagccctggtgaagaacctagatcttaactgcacagaggtgctgtcctcacggtagtgaagctgttggaagtgggtgttttgtgactgttggtgctgggcagataattcaaagaataaatatcctgctttagtagagtggataattgagagtcaactacttacttcctgtgtgaggtggtaccataatgtatgtgttattgatatttgtgtttcctacagaaaacaaaagcaagaggtttgcatgcacaggaactggaggaaaggcaggagctctgagcggatctttgtttgaaactgcctaatgttctccactcactgctcattcttttgaaagaatctctgtttggccttttcagggaaccgcagtgcatcctatgattttgcatctcaatgagggcttattcattagttgaacaaaggctttttctagaaatggggattatattgtcagtaattttacagannnnnnnnnnnnnnnnnnnntattgtcagtaattttacagagaaaatgtcattgttctttttttttttttttttttttttttttttttttccttggggttaatgtggtggccagggaaaatagtctcttagaaattttggaagtatacagacaaaattatatacttggcctctgtcctttttctgtcatgagaattttgtgctgacagaatttgaaacatataatagtgttttgttgccttggaatttttttcttaccctaacaagttttcaaaataatttatgtttttaacttatataaaatataatttacaaagagaaaaacactacttgtttaaacactaattttagttttttcaattacagcatattaagtaaataaatgatacttttattgttctacattcccatatgcattgataacattagaaagttttagtcttttgacaaaagtatttaaacattatagtggttatagttttttcattgtttattaaggtcactttgtggagtttgataagtttgtaggattagttttatggcctatgctactgtgcatgaggtctccttggtgtagctttgtgtgagagaaactgcaaatgtactttggggtagaatggaggtttctaggctgtgttgggaacttaaggctacaggtcatgactttgaactgagaaagtcctgcttatcagaggtgtggataaagagttgtatttaaaggggatttggctgggagtcaagggagtaggataggggacaaaggaagtaaaggtgaatgcagtaagtaattatgaccctagatgttatataaactgaataagcagaaggaaactgccctatggtagtgcacaggatgagaggcattggtgaattgaaagatttattgtgtttgaatgggttgggtctatctagaggtattgtgtagatggtggacagaacataggatgctgaaagttgacgttgtggaggagctagagaaagtactcaaggagctaaagggatctgcagccctataggtggaacaacaatatgaactaaccagtacccccagagctcgtgtctctagctgcatatgtatcagaagatgacctagtcggccatcagtggaaagagaggcccattggacttgcaaacttttatctgcctcagtataggggaacaccagggccaagaagtgggaggaggaggggagtgtagggggtagaatatggggggcttttgggatagcactggaaatgtaaatgaagaaaatacctaatttaaaaaaaaagaatagaaggataataaacagcatatccatctctgaaaaaaaaaaaggaaaaaaggaatgagaagttcaaaagtagagttgtagactagagtaaagatctaagaatactagagggatcatctgcatgaatgttgtagtttcaaagaattatgatggttgatgtgagagtgagtcaagatctaaaaataaataatgggaagtgactttgaattcctgtggtacatgggatagtcactggtataatctagtggctattttaataatccaaggcagaaagtagtagatagccctgagtacttattaaaatgagagggggggagataattatctttccaacaataggttgcccttgacttcatgatgaaagtaaagatgctcttggcctttgccagatgatggattttagaggaactgattttattaaaaacattctttttttccccattaatcaatttattcactttatatcccatctcctcctagtcccgccctcacaggcccttcccctgtccctccatccctctctgagaaaggaaggggaagtcctccctgttaccaacctaccctggcacctcaagtcactgcaggactaagcacatcctctcccactaaggccagggaggacaggccagagaggggaacaggatccatagacaggcagcagagtcagggtaagcccccacctcctgttgttaaacatgtactcttggttatagagagctgtaatcttttctcagtgaagtaggggcatagcagttttattattaattctaggctccctttcaactcggaggagtgacaacctattagatattggttctgatatgtttctactgactttctctcaattcctgctgctgatagctcatataggcaatatgatatactctgaacactgacacatacttgactattatatgaagactagaaatctactctaatatcaagtatatgtaattgcactgtgttacagatagatgtgtttatgtgtataaatgtattaactcaaatcttttatcagtaaaggaggaagtaaaatacccaggagatattatttgttagattattttagaattaataatgaaataactagcctgcatccataacaatgtattggtgaaaaccagtgctgatcttaatctcagatgacacagtaccaaacgctgaaatatccctaaagatcaaaatccttaaagtctaaaatagcagaaattttaaatgatgcatagtaatgtatagtgggtagttgtaattgctttaggaggctgagatatgggagtccagttcaagagtttgaggctagcatgtgcaatatggcgaggccctgccactcctctctaaaacatcaccactctaaaagactaaagtcccaaatgttggtgtcccaaaagatgaaatctccaaaacaaaaattctcgtgtgtgtgtgtgtgtgtgtgtgtgtgtgtgtgtgtgtataaagtgagctatgtgtgaggaacagaaaggcagattctaggtaagggattagtcttgccatatggcagcccaaaggtttcattttaaaactgttctcaggtgtaatggctcatgcttgtaatcctagaactggacaggctgaggtgagggggaatcatgagtttgaggccagcctggattacatagtaagttttaaatcagccttaactacatagggagaccctgcttaaaacaacaaaacaaaacaaggctgttttttgtcttcatttgcttttgttttagctggtgaaatttgaaaataattatttgcagagtaggataagaagacttttgttctacagtgttgcattttgaatattacatgttatatataatagtatattatattatatgcagtatattatgtgccagttttgtgatttgtatgagtgtgtttcaaatggatttcccagtaccaaaaaaagagtgtgtggagatgattcagtcgtcttgcaggcatgatgatctctgagtgcataaccagcgtgcatgtaataaactagaacagacaacttatgcaggctccttgccagcaggtccaggcaagaggagagaggtcctggtcttactggggtctctctggggctgagctagatggcgagtgtcgatggcccaaaagaaaacatacagagccaggagtcctgtagaagcaggaactcaactttatggcactggcctctcgcttatataagttcagaacatagggaggggagtcttggtgggtaagatgatataggaggcagagaagtgtgacagaggatatggagtgatggacagggccagtggcagagctctacaacagcaagggcggggcagaggcagggccaaacaggtcttgctgagtcaccccaataagtggggagtgactgagacaggtctcaaaattcaagccagtctcaggtttgtcctcaaggcccaaaccagagcctaaatggggcccaacaaacttacacctgcattaccagcattggagaggtgagacaggaggatctctggagtttgctagataggtaggctaactgaatcagtgaattccaggtttagcaggagaccctgtctctaaaataaaacaaacaaacatggtggtgtggtgatggtggtggtagtggtagtgtcatcgtctagagagatggcttagtggttaagaacactggctgcttttccagaggacttaggctctattccagtacctacacagtagctcacaactgcctataacttcagttccaggagagtcagtacttttttctggcctcaacaggcaccaggcatgcaagtggctcacagacaaatattcagacaaaatgcccacatacatttaaacagaaagaaagaaagaaagaaagaaagaaagaaagaaagaaagaaaggaaggaaggaaggaaggaaggaaggaaggaaaaaagaaagaaaggaaaaaagaaaagaaaagaaaaaagaaagggcaggcagggaaggaaggcaaggaaggaacagaaagagggagggagggagagagagagagagagagagagagagagagagagagagagagagagagagagaggagcaggtggattgaaaagacccccaatgttgaactcgtgtggacatgcaagcacatatacatacaccacatatatatatgtaccattgctgttaccatggaacaacacagaatcatggcatgacagtaggtgcagaaatctagtagtgaatgctcatgtctacatatatagactacatagggatttcaaaaggagcagcaccacatgacctaaaagacaagcaaacagctgttcattcctatacagtacttcaacataaagctgatgctgtaaaagtcagccagctctcatatgcttcttctgtacagttgctagtctttctctgtagtgtactttttcatatgcggaactttgagtatttttcattttcgttttttcactgtttaaaatttaacattattttctgtaatttgctatgctatttattttatcccttattatttataatactgaaagtaaatagtagtttggactaggttcagttttattttatggagttttgtgtgtttgactccatgaaaatacattataagctgggcatagtggtgtctttattcctagcacttgggaggcagaaacaggcagatctgagagttctaggccaacctctatattggaagttctcgagcaaccagagctacatgttaagatcttatatcaaagctaacaaaacctgtagcattaccttaggtgtaaattgtatgtgtgtgtgtgtgtgtgtgtgtgtgtgtgtgtgtgtgtgtgtgtgtgtgtatgtgtgtatgtgtgtatgtgtgtacacatcattgaactatccttatttagtcaagaatttttgcatttttgaatgataagcttcttttgagaacttggctattgaagtaactgcatacataatgttgttcttgtgtggtttttaattgatctaatcaaaagattcagtttgtcactgtgtattgaatgctttacatatagtttatgtatagttgctttacatatagaatgctctgtccatattcacccgcctacctcttggacctgatggctgccattagtaagccagttgtgctgaggcagtgcttagtacttacagacgtgtgctttattgctttaaagaaatttttttttcaaaaatttgtgcaaagtggcctttaaaaaactttttcgtgccgggtggtggtggcacacacctttaatcccagcacttgggaggcagaggcaggcagatttctgagttcgaggccagcctggtctacaaagtgagttccaggacagccagggctacacagagaaatcctgtctcgaactccccctccccaaaaaaactctgtttcgtgttttttatgtttcttaaacaagttctcttttaaaagtgtaagtaaatgaccaaaggagttttaaaaggtttttagtggtgtatgtgcacaccaatgtacgtgtgtgtgcacacagacaggcttgaggagcagctccagctctgtccagcagtcactcacttagtctttccttcctacctacctcccttctctctccttccttccttccttccttccttccttccttccttccttccttccttccttccttccttcctttttgagcaagagtacagagtctcttagaatttacattcttttttgaaaatacataagatatttatttctatatattgttacacttggcagtgaaatcaatggctgttgacaaaggtacaaatcttaccaatagatgcacagaaacagccagaacgttttccatttcaaagtcattaggccattacaggattcatagctagagaacattttattattattattcaaatcatagtatcattctgctattgccagattggagtctattagccattcaggacaaaagatcagggaggatcatattgtggctaattacttgagctagaacttgtttgtctgtgataccttacttgaagctatgaagttcgttctacagacatatgcctaggataatgagaagtagtttggtcaatgacttttaaattgctttttttcaaaaaataaaatttgaaagtttaataatgtttttaaaggtctgaatacatggtatgctaatataaaagggtatgtattatgttgaacagatcattcctacccaactctagcacacactttttttttagtggtaggtggtattgaggtgtaaagagaggaggaggaggaggaggcatttgggtaatgttattgtgaaacttgctgcaagtggttcgatcacagaggttgtcttttgaaactcttagtttcagtagtcatttatttgggagtaatatctatgaggtcttgtgtctgttctctcatttgagtgtaagatggagtttgaatgtggctgggggtgggggctgggaggttaggatgtaacagctttagaaacttcataataaattaaaactgtaagcatagttctttgcaggagagtgcccaattcagttcagtaaaaattgtatcaaatattgaataatttttcctattaaacttagattagcctaaggtaaatgttaagatgggatcttattattaaatgaagtattggcaccattcttagaaatttatatagaggcatcatgtacttactcacaaaggaaaaccaagaacatggcatactaattgaatagtaatttatttgctcctcatattgaaacaagaatttaaaaatttaaatatcacagtttatatagtaaaccatttagtatgtcagtactcctagaacttttgtttttcatttgcttctgtagtcaccgctgtcatagttacttttctgttgctgtgaagacaccatgatcaaggcaacttacagaagaaagagattattgggggcttacagtttgagggtgagtctatgatcatgatggcagggagcatggcagcagacaggcaggcatgtcttgagcagtaattgagtgcttacatgttgagacaacaaccacaaggcagaaagagttaactgggtatgatacaggcttttgaaaccttaaagcccatccccaagtgacacacctccaataaggccatatctcctaatcctttctaaatagttctaccgactgttagataaccaattaatcctgggggaaaactatttctcccactctcagcattccttagttgcctgtagttctttgactagggttggggacttgtaggctttttcctatctactttagcatgcccattggtgtcatccatgttcagctcatgtttgggcaaagtggcctttaaaaaactttttcgtgccgggtttcgtgttggtgagactttatggatgtggcttctgacatttctaggagacaaattcccagatcttcttactcttacagtctttctgccttctcttttacggtgttccctgtgggagtgttttgtagatatattcattgggactgggtttcaactctgtattttgattggttgtggttttctgtaatggtctctgttgcaaaaaagagattttcttgatgtggggtgaagactatacttccaggttgaaggacaaatgtttagatttttgttagaaattatgctggtttatttagtaaagtgatagttgtagagtttcctctaatatccatgagttcactagcactgagtggttagctaggtttccagtacttgaaatggtttttaattaattaattaattaatttttttatactccatattttattccccaccttagtaatagtgtcagaccttaggaccttgagctggatcccactttgggcctgtcactggaccttcttttcctcaggctcctctccatttccatccctgtaattctttcagacaggaacaattatgggtcagagttgtgactgtgggatggctccccctctccctcatttgatgccttgtcttcctgctggaggtgggctctataagttccctctctctattgtggagcatttcatctaaggtccctccctttgagtcctgagagtctctcacctcccaggtctctagtgcattctagagggtcccccaaacctatctcctgaggttgcctgtttccattctttctgctggccctcagagcttcagtccttttctctcacccaattagcagatcaggttcccctctcacccccactcccccgccccatccacttttcctcccaggtcccttcccttcctccccacttgtgattgcagtcacaagtggttttcttcttcttaagcaagtcttaaacccaattagagctgttggatgcctccaaggtatgtgtgatcctactacactattagctccttgccttcctcttttggaagctgcatggtgccttctggtaccatgaaagctagtcctcgagggagaggcattcaagtcagtttcagttaagggcatcagaactttgttttcacctcagggagcaaccaagggcagcagcaataggctgtatgttctgagaatcttctggacaaccctgaccaagagttcaaacagccttctcatgtctggttttggtggtttttttttaggtggtccttgactgttgatgggagcattgccatctcagatgagaaattcactaaaactatttaaatacatttatgtcagaactttatgtattataaggtttttgttaaggttgataattaatagtatggttcctcatcacactatcatcttgttatcataccatgtccttttcagacatccttactgttaattttccttccttccttccttccttccttccttccttcctaagagcccattttttcctatcttcctctcagatccttcccctttatactcttcccactttcttctatttttatcctccactccctcctaaggagccccccactttgggaaaagtgatccctgttcagatcactgtaccctctactctgcctctattgttccccaacccccatcctggcaatggtcccattttacctggtttctacagttgctgctcaagcactttacagtgcacactgtcctacttacatcttggtgtttgattttgtacgttctcttaattgtgcttattggattggattgtaaactatacttatgaacttggtaagaagtttttagaatgttgagagaatagaataagtaaattgaatagcttatttgaaaacaaaaacagcttagctaaggataaattaatgtatgaagagagaacaaatgataaaatactagtttgaatagcattaatttggattatacatgggataaatttaaaataaatctactttttatcgtgccatgaaatgtttttggaggtcactttatctgaggccagttagtattcgtagaaggacctaaaaccaaaggtacatatattgaccttactgtgttcaaattgagggaatttgtacatttgtagtgtggaaaatataatgtactgaaaggaaagttataaatatcaaaatgaggtaaattacagttttaagatgttctttttatccatagtgggaaagttaagtccaaaataaaaaatgattatgattctgtttttgagttcagaagttgtccacagacaaaaagctagatttttatcaaggaagacagttgctaagattcaggtccctagcatagtgtctttctcgtgaatgttcagtaaacacttacggccttcattaattatgatagttaatttttaaaatgtacttctatttggtatgtatgttgcctgcatgtgtgtctgtgcaccatatttgtgtctggtatttacagaggcattggatggatcccctggaactggaattacattcatttgtgagatgccatgtgggtgctgggatttgaaaccaggtcttctaagaagaggctggaaaaagaggctcttaaccactataccatctctccagccccaaattaggatagtcaatttttattgataagatgctggctctatctaaatacataacaatgatttttcttctctgctttagactatccccataaatacggcccacaggggggctgtgcagatcactccgtttttgaaaggatgaggaagtaccaaatgactggagtagaggaaggagcccgggtaaggatttcagcgttctctaagttaagcagaatgcacttgggcaagtgtttcttcatttcacacatatgttctaggagttgtgaaacatttataccactgttgtgaaatattcccatttaaataaatgaaaattaactatcctaatttggggctggagagatgctatagtgataaagagcctcttctttcagcctcttccagaagacctggtttcgactccaagaggccatccacacaattcagcagtagtaaagcggtggctgatcacctgttttaaaactgaatcttgaatctttagacaaaccaagatgattattcaccctaaataaaagctcagtgctttggacattttaattacacattgatctttccctttttccatttgatatttaaaactttttcatcacaaacattctctgatagattaccatgctcccaggtctttacagcatttaagtgtctaagcaaatgctagataaacactccaggggaaaacaggctttaagaatatgtaaaactgcccatggtagtgaacaccgtgctggaatctcagtactgggaggctgaagcagtatgaaagataacaaatgttttctcaggttcttaaactttctgtgaatagttaaaactatatttgattttgttaacttaaggattatatggttatctctaagttaacttcttcctctaaaatataagaatccagaaagactgaaaaaaaaccctaacatacaagatataagtatttcaaattcctaccagtattatatatattttgttaatatcaaagtagactttaggcaagaaagcaacaataaaataaatatttataaaaaggtttagttctctcatgttgtagcaataaattgaaacttatataaagccgggcctggggctgtagctcacttgatagatgcctgtattcctagcacttgggagtacaggtaagaagatctgaacttcaagattgtccttagctccacttccaatttaaggctagccttgctattatgagaccttgtctctaaaatagaacaatacagctaaagttgactaactcaaaaggagcagtagaaagaccatatgacagattttagtccacttcttagagaataattagacaaagaataaagcccaataaagatacagaaattctgaattatataattgataaacttgaccgcttaacttatgttaattcctttacttgacagtttttttcacatttaagaataacttaatttaaacatttttactccttatctggggatccatcccataatcagcttccaaacgctgacaccattgcatacactagcaagattttgctgaaaggacccagatatagctgtctcttgtgagactatgctggggcctagcaaacacagaagtggatgctcacagtcagctattggatggatcacagggctcccaatggaggagctagagaaagtacccaaggagctaaagggatctgcaaccctataggtggaacaaaatatgaactaaccagtaccccggagctcgtgtctctagctgcatatgtatcagaagacggcctagtcggccatcagtggaaagagaggcccattggtcgtgcaaactttatatgcctcagtacaggggaacgccagggcccagaagtgggagttggtaggtgggggagtgggtgggggagcgtatgggggacttttgggataccattggaaatgtaaatgaaataaatacctaaaaaaatttttttttttactaaaaaaaatattttcatattggagcattcagacttccctcccaaagttaaaaaaaaaaaaaaagctgtatatacaactttaagtgtagctaagattaacatgtgtatgaagtaacatgattgtaaagataaactatataacacaaatttgggcccatgaagtatttttcagtcattttcaagctgaacagattggtacctagaaacaacctaaatgagtatatagaggaaaatagtattaaagacatgcttcctccaaatgtcctgcttaggactgtattgattctcccctcccccatgactgggaattgaatttagggctcactcttggttagagtgctagccaagcactcaacaactgagctatataactcgcccagtagaattcggggttttttgtttgtttgtttgtttttgtttttgaactataatagtatttgaaacttttatttaaaattgtgtatttttatgatatagtttctgtaatacatatagactaaaatgactattataggaaacaaattaatgttttcattatcacactgttacatctcctcttgtgaacataatacagcatttaagtttgtataaattaacagaattatcaaggaagaaggaaaacataaaatgcgaatgtagatttagaattgtgacttaaaacttaagttctatgtgactgtcaagttaggcttaacatgatgtttttgatgtcttaaacattttgaatgtttgaattcagcagttgtggtaattcattaaagaaatactttctgttaaatttactaagtgatgacaatctagtgaaaaagaaacacaatgtggttcctcttcaaaaacatatattctagttgttgatgagttagggacagaaattaaacagaagataataaatgtaaggttgcattgtagaaggaagataggtgcatagctctgtgaagtgataaaatgggtgaattaacagtctctatatctgaggaaagacactaactggatccagagagacagcataagtgacatacaaagaatggcgggaggcagacaggctgtgtgctttagaatcatagaaggcttcagttttgcaaagattacagtatgaaaaccagttcaaagtccagacatggtaggtagctttaggtgaagtggcagagccagagaaaatggctggaggagataaatttgctaagactaggtcatagatgggaaaggaaagatgatattaaattattatgcatgacgctttatatttaaatgaatatattttatataccttgaaaatgtttttaaagatggaggaattgtttgaatagtaagttcccatgtggaaaatattttatggacaaagtgttatttataagtaaattctaaatattataaaatgtatgcaacatgatgtacatatttataggtttggtgcaaactcccaaacaaagagactgggaatcnnnnnnnnnnnnnnnnnnnnnnnnnnnnnnnnnnnnnnnnnnnnnnnnnnnnnnnnnnnnnnnnnnnnnnnnnntttgggagtttgtcattggctatagtagagtacagttgtcctgctgagccatacaacacaagcgcatggcggccctccactcctagcttttggtgtccactagccacttctcacacttgtacctttcttcctaacttctagtggcccttttatactatgaggtattttctagtgaccttagaaaagcttgggggtattgcatagccatgtgatttaaaattgtttaacatatgtgttcttaactgtaaaactgtaattgtaaaacaagctaataatcagaaatgactttgacgtacaggcacatccagagaagcatgctgctagtagtggtcctgagctcctgaggaaaaaacgcacaactctggctgaaagaaatacttgtcagctctatatccagacagatcacctgttctttaaatactatggaacacgagaagctgtgattgctcaggtactgaaagttactcattgtgttacgtgttttctcctattgttttgtattattgtttcagttgtgtcataggaaagtctgtaaacttagtgtagaggagatggaaagtccagtttagattttggattgccaaacagaagagagataaaggaaacaattttaattaaaagttgctagtaacattggaacttaggcttttgttctttgttttgttttgttttggggaaaaagtgttttggatttgggtctggtgacatgcatggtaaacaagtatgaaactcacctttgtaaacagttccgtttttcatttggattttgcaagagaaaacaggaattttctcttagctagaagtctataatttctgttttgtatttcattgtatttacttagcattttccaagtaaaattattatttatagttgtccccatcttccctgctgagaacaggttctttgtggcccagagtggcttgtgctcacttcattctgagggtgtcctggaagttatggtaatccttccatttcagcctcctgagtgtgctgggattacaggtttgctgtacctgtatgaaaatctttatgaaaatagaatattttagggtaccctttaaaatgtctttttatgttgaagatacctagagaaagtttattaaatttatttttgacaaagaatttgagcatgagaagatagaagtgctgtggtataaatgatgattacgttttggtggtggggattgacagggttttaagaaatgtgagaaatagaaaggatgcaataagctataatttgagaataatggaataatggagagcaatgagcacagttaaagactgggaagcacctttgtagagagacagtataaacacgggtaatgttaatatccccacagtattttttttgttgttgttttttttttttttgtttttttcgagacagggtttctctatatagccctggctgtcctggagctcactttgtagaccaggctggcctcgaactcagaaatccgcctgcctctgcctcccgagtgctgggattaaaggtgtgcgccaccgcgcccggcgtcccacagtatttttgaagagaaagtgctctagaacattccctaaggagtggggtaaccttaagtgaccctttcaggagaagtctccatctgaggagataggaaaatttagagggaaagatagaaaagaaaaagataaaaaggaagggactccaagtaaagtaggcaatgtaaacctgcctggagacatatctgaattgccacagatgcacatggagcagaaacagtggggaaactgaaccaggcattggaagctgctgaggccaggcatgcgagttcaggatggacccttcaacactgttgtcctactcctcggagtgtttgtcagtgtggactgcttttgaaatgctacttcttgaccgtcttctgtgccttctcaataagttttgaaatggcacatacatatttccacctagatggtagccagggtgctcttttgtagataaagttggaaggttgcatgtagagtggttagagccgatgcttagttgggagtcagctaagtaaacaaatgccgcttgtgttctttcactaagtttatttcctttcagaatttaagtagctattaccatatttattttatattcagattatctttccctcctgtatacttcattacagtaagcctctattaatttatagagaccttctctatttcatttattagtttatctctgacccctaaaacagtgcccagttgtagaaagtaatcaggatgtttggaatttgtgtcagtgcagcaacagaaggactattgtggaggaaggaatgcatgccctgagattgctagatccctgtagatggtgtttgagtcttaaggactcaaactaatgcagacattccaggcactaagtccagcagcatgtgaaaagcagagggagtgggactctgcaggctgggctgatgaaggagttttaataggactgaaataggggtacactttctaattgatgcattggttgattgattagccagagcctgggaaagacaagagtatccactctgtcctagctcactcatcttttccattctgtacaacatatggcatacatattttaaaatttaaatgtgtagcataaataactcttgatgttacaaagagaaattgtctttttcatatttcagtattgtccctaaaatgttttgttttctattttaattactagatatccagtcatgttaaagcaattgatacaatttaccagactacagacttctccggaatccgtaacatcagcttcatggtgaaacgcataagagtaaggaactttagtagatccattttaaaaagtgttaagggggctggaaagatgggctcaacagttaaagcactcacactcttccagaggacttgggtttggttagcattcacatggtggctcacaactgtctgtaactcgtgttccagaggatctaatgcccttttctgtacccccccacccccacatgggcaattgcatacttgtgacatatttacatacatgaaagcaaaacacataaaataaaaataaataaaacttaaggttacaaaaattagtaaggaataagtttaaaaagaaagaaaatacttgctttttacttcatccttagaacggagagagactgatctctgaagctcattggctgtgcttgctagctaattttatgagccccaggtttagggagcatccgtgtctcaaaaatgaagtggagatctttagaggaagatacctagtaccaacctctgacctctatacaaacatgcattcacatgtatataccacatgagcatgtatacataccactacaagaatcaaatctacaaggccttaattgagactacagtagaggtaaaacagtattgttttttgtctgataaacattgcttgccccccacccccattactaatttcttaaggtttgctttgtgcgtgttgttttgggtgtgcccgacttgttattctagggctgaggaaaaataaaggcagtgtttaaataaagttagactttggagaaacacttattgttataatcttgaaacattacagcttagaatgtcatctatcaggttttagaagtcctccaagaaagaaagctctaagtttggccatggaatccttttttgttgtaatatcatttctaactctcagaactgctgaacagaaccacagggtactggttgcagtttcttgacattgttgttataatggctgtaactaaaaactgaacctagattttagctatattaaaaacaggtaataaatatttaagtataattgctttaaactaaacttacaatctcagttatgaactttgaagctgccatagtttttgttgatgtacacatcttcagagtgccaatcatttactaaactctccattccctccaaagctgtaaaggtctggtgttgactgttcttcagtttgtgaaggagggtccatggaggagaacagtagccaagtatcagaaaaaagatgtgcaggaacttagcttaaacagtaagagaagtgaagtgaaagtagaaatcaaaattcttgtatacatcaagaaaacagtggatcaagtagttagggttaacttacctgctttctaggcaagaaggaccagggaaatctggcaaactcagccttgcatttcaaacttattctacctataagctaatgatgaggttttatgttttcatacttgtgcccattcatagagctcccataaagagccctgctcaggcagttgagtttgagaaaccggacatcatttgttagaacttgcagaggtgcagcgtcttctctgcatgcttctgttcaggaatctgcagatccttgctgaggcatttaatagcatcagctccgttcttcctgccctgctctccttttgttctttttgtctgtgtgtttatgctttctacaatcagttcagggctgtgctcagggagaacatctctggagcccatgagaatgttgtccaggtctgtgggaggggctggggagagaacaactagaagtaatcattgacttcagttattgttttggattttagatcaatacaacctctgatgaaaaagaccctacaaatcctttccgtttcccaaatattggtgtggagaagttcctggagttgaattctgagcagaatcatgatgactactgcctggcctatgtcttcacagaccgggattttgatgatggtgttcttggtctggcctgggttggagcaccttcaggtagattgtgtaacaatgtcttaatacttggaagaaaaggcaagtttgggggaagattaggttttactaaatataggagaaaacaatgcctgtgcagaaatttaattcacacagcctgggttaagactagatacataacataaagcaaatggcagaatagatgaagcagccttttattttaaaaggaatataagagttgaccctgtggcacacacctacagtctcagctcttatgctgaatcaggaggcttgggaaggtaagttcaaagccaccctggacttgggattagggagaccctatctcaagtaactaagcaaataagtaaaaatttaaaaagaaaagagaagtttgggaagtaccctgattttgggatttccagaagttaaccattttgtgggaagaagtagtatgtgtgacactataaaagggaaacctaagttttcccacaaaagctaaatgctgctaaattcccctgcctgctccttggaatggggcctgaaagtcaacagcagaaactgtttttgctttgtcaaaagggaaaacaacaacaacaaacctatcttcttttctgttctgtaatgagagaaagaaactctggtcaggagcagcaggtagaaagaaagaaaacatatcttcatttgctgtcctcgggtcattatttcaacagcagagatgtactacctggaaggcagtccaggcagcagcacaagtgccgcatgcagcttgctggcatcatccaagctcaccatggggtggggtccaacactgagaaggctgagatgggctgtccccttcccattacagtgggtttgagtacgctgttggcaaattgagattattcactgaaagacaggtagaaaggaagtcatattctttggatctgagtgtggctgtggagtgtgagttgtgtgtaaactttggagtcctaagcagtgatttctccttctgatgcctcatttctacttagaaattgacctttctttacctggtataaagcacgtttttcttactgtttagtttattctacgatttattatgtatattttatcttacatttcttgctttttaaagaagccaacagtaaacaccttatttttatttccagtgcttttctttcttttcttttccgcccatgttgtaaaatgcacttgattcctgtgtctctgaggtacagatgtctgtcatggccttcttctcttaccatagtgttgttttcatcttgtttgtgcgtagtcctcttttcatgtttcttgcattgtgaaaaggtgttcagctcttccttcccaggatgtttcaggttttataaattctctttcccctcaaatagctggatattttttctcacaagattaatgattcccttttactattaattagtattataaaagcttgggtatttctttgggtttcctttgcatattttctagatactcttgggtaagtcaatggctctcctcctgtggagcatagctagacgtgcgtgcgttgccagaacctttgagaaatgttatggttcataggctccacctatgtcctttgaatcagggacgcttgttattcatctcagtgtctttgtttaaataagcattgctgctcactaaaatgagactgagaaccaccaaactatttatgtctctaatgctccctcaccaaatacctccagagcaaacacagcaatttccaaatgggagcctgctaccgttttgtattttcatttacagactattgttcatcaaaatgtctgtaatcctggcagaatcatgagttcaaggacagccttcactacatagtaagagcttgtctctaaaacaaaggagtgggggtaggtggattcttcaggagcttgaaccactttgttgaaatctttagatgccttcatgttttttacacatataactgcttaatttccttttacattccttaatttgtttctttagaatactttttagagttaaagagttaaatgaagcagatgctatggagagtccctcctctcagctactggctttgaagaacactgtttgactgaattctaggatattttgtcctgaagttagatgattttatgatcaaatggggctgtgggcttagggacactcagtatttatgtctagatttcgggatatttgaaacatcactttgtgatgttgctcattttgttaacatggcactgggtagagtttcaggttgaaaacaatgtgacatggttttttttttggttttttgttgttgttgttgttgttagattctttgtatgaatgaaacaggactctaccttagcctatcatgagcaaaaagagaagattcaacctttatccttatttccaccttttctttttctttacttcaggtgtgaaatgcactctgacttgactgttaaatccccaactctgggccttagaaggctttttccaaaagctgtttcagagagtataggccgagagattagaggccagagtgagggaaagaagtctactctcttggctcagttgctttaattcagggtcctgtcttgaaataacaccagcagctttgtctgaacagattttgagtttgatatacactttcttttataaaggatgttacatacgtaatctgcttgattactccagggtaatggctcctgcttcccagtagatattatattttattgattgcttttccttctttcttaagagaaggtggacatgggaactctgttgcacaatacgttccactaaattactttgcatcagataatttgtgttataatttcttttctctccttgctttgagactccatctttctgcttgtaagtcttaattatgtttgctattatcttgttctttttagataacacttcatagccaatttattgagtttatagtctttaatatttcttaatctttcatttttatttggtttaattaatctttgttaattctcatcttgttgtataatttgccctaagtttaattcattaaattctgaagttatctcactattctaaaatatgatagtcgagatttttgttacattatggttaattatcacagaatatgtatgtagattattagtggtagtcctttttgctgacccagttgatgcagggaaatcaatgagggttacttacacttaatagtaagtttctagtctttatgtcttcctatttttcaaataatctcttttacttttgtgttagaattaggacaccatgtatcctagtttcttctttgtatgaatacatgtgtactaggacaactctgtctcttctttttcagtactttcctctagttgaatttttttttaaggtgtctttgatcaagaaaacagtatctacctgttgaactgagtttacctggagatttctacttaaaattatgctatgcctacagtggagccatcagaaaagagtctggttcccatacaaagatctacagggggtgtggctcagtggtagagcacaggctttagcatgtacaaggcctagggtttgatcagcacaagggagaaagtcaaaacaaaactcgggaaaactatatacagttgccattttgattgttattaccatgattttataacaaagtaaattttattttgtaccagagggctcactgtatacaggctgagcttggatttgtgttaagcttaggacttggttgttgcaggttcccatgcattggttctaagagagccatcaccttccttcagtttcatttcacttgctgaacatctttatcatgcttctgcaatggagttctctggcttgttcagatatgtcctgacctgtattaactggtctcggtgttagtcagttaagtgaacatagccgaggcttgctcagattactgtcactcttctcatttactcacaaggttagtttctgtgataactgcagtaaaagcttacatgtcactgatattctggtatatcaaaactagttgcagtatttaaaacaatatttataaaataaaatttagtaaattttctgtgtgatttagcactccttaaactgaggagttatttaggagattaagcaatatacacatcacagagattatgtttaagaagagtattctcaaacctacatatgatcttgctaagttagctagacttaaatacatcaatatgtcagaagtttttaatgtgcctatttagtcttttttctttttaactgttaagatgtgtattggagtcttctgtgcctagatcaaatttgacaggacttattttgggtcagtttcatatgacaagtctttactgaggcaggatattaatttactacttgctcaaagctaacatgtggttgtgtaattgttacagagtacttactcatagatttaattttttagttcctagagtgatgtaaccttcagaaaaagaacagaaaaaatattcataaatcaaaatctattttctctattgttttttgttcaggaaagggtgtgtatagaaaccacatgaaggcctgtgggctaattctgctcttggcttagtattcattttcctttttcacaaagttcatcatgatttcatcttgctaaatcataaaattaattaaaagaattgggagtctaaaatcaggaagatggcaaatgcagggagctgagcataggcagaccctctcaaatacaagacaaacacaggagagttcattcttgtcagtgtaggcattgacaagctagttgagttggttttcttatttgtcccttattaattttgtgtaactgctgttggctatgaagtattgtcattttgatcttgagctccaaagttcttttaataaaaagacaaattacagaatgcttactatgcttactttaattcctttcaattcctttcctttccttcccttcccttccnnnnnnnnnnnnnnnnnnnncccctccccctccccctccctcttcctcttcttcttcctcctcttccttccttccttctctctctctctctctctctctctctctctctctctctctctctctctctctcttccagtctagtctttatccctttcccagtctgccctttgactgttctttatcccatacctcctcctccaagaggatatcctcaccccccactcccatctcaccagacctccccactccctgaggcctcaataatttcttttaaaatttgaaaattatttcagggcacatcaaaattacagttcagttcttttgttttgttttaagttccacagctgctgaagagttgtgtgaatagtgcagtgaacgcctggccgaccagatatccatattcttccatatttgctttcctgtccctttttttcttcctaccttctctccacccttctttttccatgtctattccttaaatccatgtcacgcagtgtcttgctgacaaatgagtgatagagtgcatcacagaactatgagcacatgctgaatgcccctcactctttgtataaatttctttcagagaatgtaaaatattgaggatattttaatgtgtatttaatttttaagtttcccctttaaaaggtgaagggatttaaaaggtgaagggatataagctttggttcagtgtaaatgtgaactcacccaaatttaaaggaaataaaaatgttttgctatgttaatggcaggaaaaaataactttttgatgctgaaaaatatgtaaggattgtttactaaatcctgggattttttttcagggaccattaatgttttattttaaatgatttttaaaatcttggactaattgaagtatttgaatcagttatgttcatttagtcattgtattttaaataaatataaatgttttagctccatgtaatgattttaattactgtttacctattttttataggggaatagataactaatttagtctttttttattattattttaaaatctgaattaggaagctctgggggaatatgtgagaaaagcaagttgtattcagatggcaagaagaagtcattgaacacaggcatcattactgttcagaactatggctcccatgtgcctcccaaagtctctcatattacgtttgctcatgaagttggacataactttggatctccagtgagtactgcctaattattaaaagtttaaaaagcagttagcttgacttttatcttcagtggtattttgcagtacaataatgtacatatgaatgtttagtgttaatatgccagtacatagtgatgcaattgattatactgaaagtaagaagagttctgtgaaagccagaattttatttagctcctttgtgggagggtagttttgagatacggtctcatgtagcatagacagtcttgagttcctaaccctcctgtccctgcttcccaagttctaagtgaatatctgtatgctccaaccatgtctggcttgtttatgcaggtcatctgtctatatttgctggtttagaaacagttaccatcacataatacactcaaatatattttgaatgagtctccttttagtaatttcgtaaattgtgtgatggctttttggcttttgtttctattaaaacaatattgtgatttacttgaatatatttctctactgtataaatagattgatattttatacttttttataataggtttctgacacaaagaagaaaaaatagcatagcaggccatgttctcatcacctagaacaggagtggcaagcacttcccgaagggctctcgtgaacatttcttctaggctttgggggctagcatttgttttatgctccatgttctttattttccagttctttaaatcttcaaatacggaaagctattcttagcttaggctttgtaatagcagctcatgtgtaatgtaggttcatttgctgacccctgagtcagttggtaattatcaaggtttttgcattgtttgctttttgtgttcctttctttttctttgttaagatgtttaaatttacattttttagaaaaaggctttatatgtaaccacagtgtgattattacacttatagcagctgtctttggtattctgcaatacttaggtccattctgatgattttacagtgatctaaataaacatcaattcaacccagaaataggaaatagtaaaagattttctctgcttttggtggagcttatcaagtatgtttcttttgggaaaattctacttgaaaattgtgtaaattcattttacttgaatgttatcatttgtagacatggaagttattatttttttaaggataatttgttggtgttgagagtataggtcagtatagagtacatatgcagcatacatgaggcctagggtttaatctctagtaccaaaataaactaataaaaacattcatgagtttgtagtttaaaatcttaaaaggcacttctaaatattccaggtttttaaaatgtatcacctcagactttccttgtctaagtatccatcagaaactgagaggttgttttcaaaggagttcttaaagtaccagagatgagcagagggctgatgctgatggttaagttgcaatttcaagtgcaaggagacacaccttcttcacaagcaccatacccttctagttccttttctctgcctcagggtctggcttgttatttatttatttatttatttatttgcttttggggagtatgtagacttggtgactgggctgttctagaactctctatgtagatcaggcctactcatggcaatccaactgtttcaactttctgaatgctgaagttaaaggcatgtaccaccatacctggtttgtttgttagcagtcagaagccaaggttggctcttcctccattgcactccctccattgtttcatagtcttcttttaaggcaggacagctcactgaacctggagcccacctttttagctagtctgactggttggcctgtaaatccctgagatttgtctaaaggccagcatactaccttgttcacctttgatgtggattctggggaatctaaactcacatctacagacttgggtggcaagcactttaacttgctgagccagttctccccagtcccctcacactcatcttaatctttatctcacagccaacaattgcatttagtaaattagtattattgtatattttatgtattgcttaataagtaatttggttctcattccttgtcaactttgttaaccttttcctttcctaatggactacttttaatgaccttactatgcttaaccagactctttctttgcatatgctgttaattctacatggtagatcctgaataagtatttattgagtgatttatggtaagatgaactggagccataaactcccaaacctgtccactttgacatctctctctgaaatctttctttctccctgctttcctcttgctgtgtctctgtgctacatgatactttctccaagtggcttgcattattctttatattcatttttctttatatgagtacactgtagctgtcttcagacacaccagaagagggcatcagatcccattgcagttggttctgagccaccatgtggttgctgggaattgaactcaggacctctaggaagagcactcagtgctcttaacgactaagccatctctcccgcccttatattctctttacttatcccaaatatttgttgagcattctttccccaaaaagccacacccactccaacaaggctacacgtaatagtgccattccctattgtcctattgaaggacattttctttcaaaccactacattccacaccctggccctataattttgtagccatatcatagtgctgaaattaattaagtccaacttccaaagtgcccatagtttattataatatcagcactttttaaaacttcaaactgtcatctgagactcatgcagtctagctgtgtaaaaccaaaatgaaaatgcagatcccaggcttccaacacacagtggcacaggatctatattaccattctaaactggaggaaagagagcatagtaaggaaatactggaccaaagcaagatgaaaacccagctgggcaaactccagactttatctccatgtctgatgtcaaagcattcttcagaactccaactcctttcatctttgttgactgcaacacacttcttgctcttgggctggttccgttccctgttagcagcttaccttggcaggtatcccacagctctggtatctctaacattttgggctctccaaagcaatccaggcttcacctttacagcttcacacaatggcttctctgggcttccatgcaggaacacccctgacacacacctggccttagtggcttttcttagttgcagagggagattctgtaacccctttaatctatccttgattccaaagctgccaagttctggtgcttgctggggctggaacatgtcgtgtgtcccctccccctcccctacccctgttcaattacatcttattaacttactgtttttgatagtttccttcattgtctaagtttggctgccctggctcattgaccagactggccttaaactcagggatctgctagcttctgcttctgaagtgctgggattgaaggtgtggacccctaatctggctctgagcgtttctttaatttcttttcataagttggtctcagctgggtggaatcttgccctgagctctcctccttttatccatttaacatcatgcttctctttaatatgtttctctccttaaacacaggatttagctccatttcttctccctgtaccccttttctccttgatctgtatgttttgtattttcccttgttcagcttgctccttttaattatacatcttcatatgagttttttcattatacatttccttaagcgtgaacactaacaaccacaagacagagtcagtactaggctgttctgagatttcctctgccaatgcaattaatccaaaactttactgtagcctcaggcaaacttttcagacaagagcagaaaatagcaacaatgttagccaaaatatcataagaatagtctctaggccacatattaaaattcttctcctctgaaacttcttgagccaggccaccacagttcaaatcacgatcagcaccactgtctttcatcttcctactagactggtccattaagccccacttaaaatgttcattcaactgcttttctaatccaaagtcccaaagtctacattcctccaaacagaagcatggtcaggcctatcagtaatattccaatactaacttctgtcctaggattttattgctgtgaagagacaccatgaccatggaaatttttataaaggaaaatatttagttggggctggcttactgtttcagagattaaatttattatcatcatggtgggacacatggcagcatgcaggcagacatgctggagaaggagctgagagttctatatcttgatccacagacagtgaactgtcttgagcttggagacctcaaagcccaagtgacatacctactctaacaaagctatacctcctaatattgccacttcctatgggcttatgagggccatttctttcaaacctctacaggtttcatcatttatggccttttcataattcaagtcaaagtatatatgctgtgtcatttctcacctctcaaatctgatgaatctcctgctcttaccttaaaatctttttttaagtattatttttatatgtatgggtgttttgtctgtatatatgtctgggtacaacatggatgcctcaatccttagagtagaaggtgcagaacccttgggactggaatttatagattgtgagctcagtgtgggtactgggaactagcatagatcttctcagagaagcagcaaatgcctttgactgataccatggaatattcttcagccattgaaaagcaggctcttcagtgcttcttatactggtaagctgagatatagataattatatataccagatcccaaagtttatattaagatgtgatacagccaattatagtcataggaaatacaacaaaatgtcaatagttgtgggctatagattataatttattttttcatatgttcttaaatctttttcttacttttctgtgaatattttctcccttctttctctctttgttgccttcttctttctgtttcttcttttttttttttgataggttctcactggatagcctaggctgacctcaaacttgtgatctttctgtctcagcctctttaatgctgggattgcagtctgttccaccaaatgcatctgatattatgaacttagaatacccaaaaacctaactctttacgaacaaacaacttgggtacttagcttagaaagtagtttttcttaatttcttttttaactagagttgtagtatactcatgaaacctgagtcctttttgacatccagtcaggatagtccattgtgtgtatgtgtgtcggaggtgttttttttttttttattcctttctttgccagttttgttcctgtatctgctgtagcaaataataagcattctttgtttaccgtccattcttccttttacggctgttggtgagatctgttacaccattcctgagagattaagactaggcaggtaggtcacaattagctatttttaagaatgtaactccttgccaagttagggacaatgtttattccgtctgtatcagtttgtatattttagcacttccatgtataacaagctactcattagaaggcaatattcaatgccttctaacatagctactgtttctttgatcacattaacagccattcagtattggaacttttctttctgtttctcaatttgaatgatgagattgttgctagtaccatacttaataaaaaaccaaattgtaaggagcagaagcataaagcaaggtaatatacagagcaagtagtttccagaggctgaatctaggctcaggagaaaagcagggcagtatcaggaagagtaggatgtgagacatctgatgaggaaatgtaaaatcagagtgacttggtattattgtttgttcgtaaagagttaggtttttgggtattcaaactaaggtcaagttaaatacaactgctattctaatgtccaacattttttccctttagaataatgaataccttaattacttgaggacattttgaggtttctttcgggtgtgtgttgtgtgtgtattgagggtattttgtgtgtggtacatgcacctgagtattcacctttgtatgtacacacacagatgtcagagaaggatgttgaatgtcttcttcttacttactcttgggacaattagccttgagtgatgctctctgaaccagaagctttgggctcgacgagtcatctaatgagctcttggtatctgtctctgaattctagtgatgaggttgttgcaaaaaaagcacagtcatgtctggctttaaatttttttcttaaaattgttattacattttgtgtgtgtatgtgtgtgtgtgttcatgttcatttgtatgccacagcctgtgagtggaggtcagaggacaactacttgcatttgggtcctgggatcaaattgaagttgtcaagcttggtgacatcttgtaccactgagccatctttctgctcctgggcctggatttatgtgggtcctggagttttgaacagaggtccacttgcatatacatcaagtgttcttccccatgaagccatctaacaaaccctggcgttgttgttttagtgcatatgtgcgaggaaagcaggtgcttccttagcccagctttgaaagtgtttttcctttatgaagattcagggagctcttgctttggtctttcttatgcctctggtacctggataaattaccagaatccaaaccacgtctgtgcaggtgctcatatacagaactctgtctcctgtaaagcaatgttttgatcccatgccttgggttttcttagtcttattttaaagtaaaacttgtgtttgactccaatcagcattttgcgtggctgtcttttgcgccaactcacaaggaagtgtcactgccttgagttcttactctgccttcctcagcactggtcttgggtttcattttcacttctgccttcctgaaccagtttgaacatgtacttaccatgcattttaatgaatgtgaatccatattattacggccacccataaaagcttcttcttagtaatctctatgacgatgtatgttcagttctagtccctaattacaaagctctaagtttatgtttagactttcagttttcctctgtgctgcaacagtggccccatagagcaagtgtttatcctaactctgatcctagacagttgttagattcttcttcaaggaaagtatgtgacttctactgttcttctgatgagaaagttccacataagcaggtgactgggcaattttacttcctactaatgtaacaccatattctgtttggcagcatgattctggaacagagtgtactccaggagagtctaagaacttaggacaaaaagaaaatggcaattacatcatgtatgcaagagcaacatctggggacaaacttaacaacaacaaattttcactctgcagcattagaaacataagccaagtgcttgagaagaagaggaacaactgttttgttggtatgtatattttccaacattttaattaactttttcttctacatttgtgcatgtgcacacaagccacagcaggtatgtggaggtcagaggacaatttgatggagtcagttctcccccttcaccatgtggttctgacaactgaacgcagcttgtcaagcttggtggtaagcacctttcccctgagtcatcttcccagcccaaaatatttatagtcaaaaaatatgtaagaggccactcagttcccgcctgtgttttccagttaacactttgcaaaaagtatttgctttatcaaatacttaggaattcatttgcccctttgaaagtaagtatcagatagcagagtgttttacttctaaacgcttttagcttatatctcattagctagagttcaatcttgtttgaggttcttttctcttccctcctccttctctcccttccttcctttctttaataggtgaactgcacagttttatatatatataatttcattcataatacatacatgccttgctgcatgtgtgacatttgcacttactgtacaatgagcaattccccaagcctcttatcctccctttctgcactgtctcctcttgttagttcccttgtttcctagataattttgcttctgctttcatgtcatatatctgtgcatggttttatggatctgtataaaccctataaacaagaagacatcatgatacttgtctttgtgacattggcttgattcatttaaggtgattatctccagttgcatctcttttcctgcagacaacaaataatttcattcctcatgtctaaaaccaactccatcatgtatctactgcatgggtgtggtgttgcacacctttaatcctaagagttgggaggcagaggcaggtggaaggttctgatgtcaaggccagcctggtctatatagcaggctccaggccagccagggcctacagtttttttaattacaggtgtttttttgtttttttttttttgcgggggcgggggggggtaattgtggatttgcacacagggcagtagtaggtactcagtaccatcacccagtgtccccattggtaatactgtgcaggctgatagcatcacaagggccatgctgtcatcagggcacactccccactccttgctcctgttttatcgggatgtttgtttcttttaatataatataaatacatgtgtagttctatatcccaccactatagacaagatacagaactgtccatcaggacaagggtactgctgctatgaacatagtagagcatgtgtccttgttatatgttggaacatcttttcggtatatgtccaggagtggtatagctgggtcctcaggtagtactgtgtccaattttctgaggaactgccagactgatttccagagtggttgtagcagcttgcaatcccaccaccaacaaaggagtgttcctttttctccacatcctcaattcctttataaaatcactggtgatttgttagataccttgggggagctttttggttgttcttggtatagcacacagtcttcctatatttgtgttctgagtgctggattataggtgtgcactattaggctggactcagataatggtttacagatgtttcctcctggcctgtagtatatttctttattcttgtcacagacagagtctttggctttttcttttaaactttcccctcacgggttagattgacattacattgatgctgttattctattattgtcatcaatggttgcttttctgtcacttacttctgtcagttcttaagtgttctatggacggtggagttttcacagtaaacttagaagctgattataaaagtgaatgcactgatctgttggtcactgttacgatgtaggttgtgtcagacactgcacacgcatttttctctagaattatatgtcacatgaattataaagttactagccatttaaagtcattgttttacttatgatggttgttctactagaacagtccaaagacatcatataaggtcagttagtgggctacaatttcagtgactgttaagattttctttaatgaattaagaatgaacttgataagtgtaaagcctaccttcctggagtgattttcaatcacctgtgccacagtgaggtttttgtgctaggtgtgtgttcccttcattcagtagtttattcagttcacattctaaatcctgattggtgcattagaaacaaaagcctaaaatttaagacccaagaacccctgcatttcatctgtttgatcatatcggggtatatacacatggggtacaagcaagtcataggctccttataacttagttttgcttactagaaatgaaggcatttgtttcttgtaattcacggtaaatgattgtgtattgaggtgattttgagatcttacaaagagaattcctggtctgaatttttttcctccatcatttgttttagtattgctggggattgatttaaatctactcttctaattttttagcttcaggacttgagaaagttgaagaaacggctatcactgggaagagaggccccttggtatcgcaaactttatatgcctcaatacaggggaatgccagggccaagaagtgggagtgggtgggtagggtagcagggcggagggagggtatagggaactttcgggatagcatttgaaatgtatataaagaaaatatctaacaacaacaaaaaaagaaatctgggggaaaaaaaagaaagttgaagaaatatattgaaattattcaccaatatttaggccagactttctaactctaattatctaagatctgtccttgttaggctgcttgggacttcagggagtatattaataattcatacctatttcttaaggtgcttggtctcgcaataagtagaataatattcatttaaaagttattattgacactattgtgatcacttttaaaaaatgagttataggataaaattatccaatatccttaacaaataaatgatgtaaaaaataaaaaacaaagtgaacctattctatagtaaaataacttaaatgataaatcacctaaagcaattatggtggaaggggtggggttaggagagccttttttggaacttgatttggtgaccaattattgaagatagttcaggaaatttgaacatggatttgtgtggtaatttcaaaatgctacagaataaaaagtggttgcaagtaagtaagagaagaaaagcattcatgggaggtgtcttgctgtgaaaagacaccatgaccaaggtgactcttactaaaaacagtatttaactggaattgggttacaggttcagaggttcagtccaaggcaggagcatggcagcatccaggaaggcatggtgcaggaggagctgagggttccacatcttcatctaaaaggccactaggagaaaaactggcttctagtcagctagaatgagggtcttcaagcccatgcccacagtgacacacttcttccaacaaggccacacccactccaacaaggccacacctccaaacagtgccactcatattcagaccaccacaggaggtcattgtgctaattttcttactatttttatgtatgtttgaaaacttctgtaacaagctttcctcttttctcttggttgagaaacactaacttcgtttgcatacatatgatacacatgtgtagtcagcaaagctcaactgtaatgtggcctaaacagcaagttattacttctataaagaacataggtaaggccagtcttctcacgatgtagaaacagggtgacatgctgaggttgcaattgctgtttgtagcacttcccatactaaacgacaggtctcctgattttcagattctgttttttgccttacttactcgttaaaatttcctttttctttttggtaaaactctaaagagtttgtcaattttatgtatttatgtgtgtgtggtgttttgcctgcatgcatgtctgcattatatgtaagcttgattcccacagatgctggaagatggtgccagatcccctggatcttgaattatagacagttgtaagctgccctgtgggtgctgggaatgaaatcaggtcctcaggaaggtcaataagtgctcttacataaactgtcaggccccctctccagccctgagctttgaaattttgaaggaattaatgtgtgcatatagcgctcaccgtgtcctgtgactttcctcagaatctggccagcctatctgtggaaacgggatggtggaacaaggggaagagtgtgactgtggctacagtgaccagtgcaaagatgattgctgcttcgatgccaaccagccagaggggaagaaatgcaagctgaagcctgggaagcagtgcaggtacctaccttgccaacctgtgatgccaacgtccctgcaaggccacccacagcagttaggacagatgaaatgctgatatcaagagagctgtatagccgtggaagtttgccttgctttgttgtattgttatttatttgtttatttggagtgacagcatcctgttttgacatttggaacaatttataatttagtgatttggctattgaaaaagagaatgtgaacaggctgctccatcaaatgcatgtatcatctagttcctaactgtgaaaacatgactgtattactttaaactatttaggtgaagtggggcgtgtaggcttctgtgacttagtaccatatcatcatttcactgtcaaatgcagtcatgatttcaggaaatagactacagcttacacaaactttttaaatggttagtcagtgaatccaagttcaatttagtacagagaggtgtaaattgattaatgtgttatgtagctgtgggggaaaacactaaaaagttttctaatcctgaatttacctcacaaaaggcagattaacaatactgattttagcatttttgactgtggaaaccatgtacataatcatcttcttagacttgctagactgtccaaagagagtagcttgttactagtaataactgaagttgtagtccagtaatgaacttaccacttaagaggtgacgttcatgatgtgaaaatatggctcatatctaggtgtataataaatagctagtgatttactttatctgattatttaacacttctcctagtccgagtcaaggaccctgctgtacagcacagtgtgcattcaagtcaaagtctgaaaagtgccgggatgattctgactgtgcaaaggaagggatatgcaatggcttcacagccctttgcccagcatctgatcccaagcccaactttacagactgtaacaggcacacacaagtgtgcattaatggggtaagcatgtgatttaagatgttttaaattttattgaacatcctttttcagaataatgattgccacccatcaggtaactattctggggttcccattcagtaagatcctatctgttccccacaaaacctggagtgtatgtaacacaattgcctggtggcatatagttagctcctgactcacctttcatttttgcaactgtgtatctttggtatgcacaagagtacaactaggcatgtggtcttatctgcactgcttttaagttgtataaattaatatttcaggagtctgaataaaagaactcatctggtcattttctcagagtgtgaaatcttctgagctcccatggctaaatgttactttgttctgcatgaggaaaacttattttttctctgcttatagaggagccatagtaaccaacacaaatgtggagctgccccttcctctgcttttaagttttttgtttttttcttcattgctttaaaagttgtacagctttctttcatttactctcagatctatatatgtggtattattgacgctggtgttcatctgtgggtttgttttgtggtgctgcggatcagacccagggccttgcatgtgctggcaagtgcttgccatggaggcgcaaacccacacctgttgtttgtaactcccattgccactttattatttgacatcaaaagcatatacctacctaataccatgaacagtcttgactacacagagatgaaataaaatttgcctttcccccagcaatgtgcaggttctatttgtgaaaagtatgacttggaggagtgcacctgtgccagctctgatggcaaagatgataaggaattatgccatgtttgctgcatgaagaaaagtaaggcttttcaataactcctcctaaaatcaacttccaaaatggtttttttttcatcctttgggaatgaggtttattgggagaaaggcctttgagaccatgatggagccttgatgtggagagcataagaaagggacagcagtatcaaaaatagcttagcagctccttaaagagaaagaagcttccctctaaaacctggagagaggggctggagagatagctcagtggttaagagccctgactgctcttccaaaggtcctgagttcaattcctagcaaccacatggtggctcacaaccatttgtaatgggatctgatgccctcttctggtgtgtctgaagtgtactcattaaataaataaataaataaataaatatttttttaaaaacctggagagaagcctgttatagcttacagtgggacacagaaaagacagagacagagaaagacctagaaagagcgccatgacagtgatggcagcggtgggatggtatgggtcagagaagatccttgcctttaattgttaaacagtttagacagatactttccagctaaatcagttcttttgagaaaaatttaaatgtagcattgcactatggtctttacaatgttgctaagtaatacattagaacagatcttgccagccttagataataattcatgtaaacatacctcaatggttttaaagccattgcaggcactaagtcaattgtttgtttatattttaacatttaaggtaaatgagtaatgatgttactctgacaaaaagtatagatctgtgaaacatgggaaagagcttaagtagtctgtttttttccgagactgccctgccaggtattctgacctctgtttatgtttggcacttctttttccagtggctccatcaacttgtgccagtacaggctctttgcagtggagcaagcagttcagtggtcggactatcactctgcagccgggctctccatgtaatgacttcagaggctactgtgatgttttcatgcggtgcagattagtagatgctgatggccctctagctaggctgaaaaaagccatttttagtccacaactctatgaaaacattgctgagtggattgtggtaagtctagtcttcattcattaaaaacctcaaaatgtttgatcttaattttacttgggtagaggtcaccaatattggaggatgaacaccttgcctgtttatactagaatcactatatgtatagtctttgaatgtttagatatccctggctcttatttccttctgtagtgatcggcatatccacctgaaagtattgaaaactgtgttaggtggtaggagtcgttctgtgtccctctgctgctttgcttacattgtctcttgcaggtgacttctggtggtacgtgttggtgttttcactgggctttttgggaaaatgctccttgtttttcttatttctctgttgtttcagtagaacagatagccagctatgggtcttaccttgctcaagagtaaaaatgagaaagacattttctgaaggctttttttcctgcatttgttgttgtttttcttctgatctttcagtgtaatttttgggtcttagtcttgtctgtgatagatgttgaacaatgtaagatcatatgaagagtcagttacagattctttaatggctgtactgcatacgtggtcctcatctattatattgaatttttaagttcacatttctcaaaactgtaaaatcactgacttgagggggcaactcagttagtagagtgcttgtctactatgcatgagcctctgagttgttggaaccagtattcatgaaatggggtatggtagcacatgtggttattcctagcatttggaaggtaaaggaggaagattgatgttaaggtcttcctcacatagtatctagctcattctagccagtctggattatgtaagaagctgtctcagaaacagagaaacagccagccagtgatactggagaccctgtctcaaaacaaaacaaaacaaacctttgaaacattgtatttcctgtggttttcttaaagaattgctgagattagcctaaatgttcatgcattccaagtgtaggagacttactttcaagtggcatgtttagggacatgttatacctaaaaccaagtagtttgctttgtaaattgatttagaactcaaactctttccaagtttttttttttttttaaagtagatttaatgaaagattcctttctgtgaattagcaatgagaatgcttatcttaagttctggaatgattaatcagacactgtatgtgagtgagggttaacacatgccttttattttataatgtcaatgtgggtgtattatcctcagctagcactatccacaatgcctggagtgcagaccgagatgctttagtgagcatcggccaggtcaaacaagacaataaatgctgagtttgttttacattatttgtctcatctgattttgtgcagtttccttgcataacaaggtttgttttatattaatgatagtttgaatcttgatgtcctatcatttctgtggtgatatatatattgttaggctattctgctatgaggctatgcaagaagtgaaggacttccttcactgtcttttccagtgctgcctggtgtccttttgtctctgttgatggtgctctaggactccttttctcctcatgcagttctgtggcgactgaagaaccttgagaacacttcgatattttatgggtactgttgttgtcatggagataatcatggagataatcaatattttatggatactgttgttgtcatggagataatcttttgtgtgtgtgtgtgtgtgtgaagtgttgttttgacaaccatgtttagatttttccagaatatgctctgctgagtctgtctggcgaggaggcattaactttagtgcctgcttgtagttcttgagaagactgcgagagtgttcaccattaagtctgttgagatcctgggccattatcacctgtttaagtgggatttgaggacatcagtaattcttttccagtttctgctatagttgatatggtcttacttctctttgcatcttttgcactgggtttgatctggcaaagaaccattttttaccatttttgggttttgttttgtttttttatttttttgatttatcattatgtgtctcctttctttcattctcactgtgctgtgactttttttgtttttgtttttgctttttttgtttgtttgtttttttgtagcatgtgcaattttaatataggaatcgttcaatagcctggtcatttactttaaaacatgtcattgttcatcaacaaatactctcttactgtataatttagtgagaatgttctcagcataagaggaatatgctaaatttcatttttttccaattttttattagatattttctttttgtttgtttttttctttgtagaccaggctggcctcgaactcagaaatccacctggctctgcctcccgattgctgggattaaaggcgtgggccaccacgcccagctttttttttttttaagatattttcttcatttacatttcaaatactatcccaaaagtcctctataccctccccccacctccccaacccgtgctgtgactttttatttaagtttgccaaaatcttgtgatgatgaagatgatggatccttataccccttttcactatggtgtccaggtctctaatccctgggcttcaggagtctctctaccttcagcctctgagtagctgagctcgtacacactcctttatttttttttgaggcaagtcttgtatcatagctctaaatctggctctatatggcccaagctgagctctaaccaacagcagtcctatagcatcctcnnnnnnnnnnnnnnnnnnnnnnnnnnnnnnnnnnnnnnnnnnnnnnnnnnnnnnnnnnnnnnnnnnnnnnnnnnnnnnnnnnnnnnnnnnnnnnnnnnnnnnnnnnnnnnnnnnnnnnnnnnnnnnnnnnnnnnnnnnnnnnnnnnnnnnnnnnnnnnnnnnnnnnnnnnnnnnnnnnnnnnnnnnnnnnnnnnnnnnnnnnnnnnnnnnnnnnnnnnnnnnnnnnnnnnnnnnnnnnnnnnnnnnnnnnnnnnnnnnnnnnnnnnnnnnnnnnnnnnnnnnnnnnnnnnnnnnnnnnnnnnnnnnnnnnnnnnnnnnnnnnnnnnnnnnnnnnnnnnnnnnnnnnnnnnnnnnnnnnnnnnnnnnnnnnnnnnnnnnnnnnnnnnnnnnnnnnnnnnnnnnnnnnnnnnnnnnnnnnnnnnnnnnnnnnnnnnnnnnnnnnnnnnnnnnnnnnnnnnnnnnnnnnnnnnnnnnnnnnnnnnnnnnnnnnnnnnnnnnnnnnnnnnnnnnnnnnnnnnnnnnnnnnnnnnnnnnnnnnnnnnnnnnnnnnnnnnnnnnnnnnnnnnnnnnnnnnnnnnnnnnntatttcagttctgtgtgttgttttcatagaaacacagcaggttctattggagaagtcttaaattttttaaatttttttgttttttgtttttgattttgtttgtttttggtttttgtttgttttccgcacacacatgtggtgctgggaacttacctcagggcctgatgtgctttagacaaattatctgcgactcagccactgaaaagttctctttaaaaagacattacaacttgattcttaagtgcggcagtagcaaatatacaggaatgtttcatggagaagaaagtgcatgaatcttccacatgaaaactgtttgaaaagtcttttgaaagcttagtgaattttagtgattgacaaaatactccatttaaaagcaggcctgctccttgccctgcagcctgtctgcccaggatgaattttttgtgtgctctttagggtctaagtagagccgtgctgctttgcacactcaggcttcatttcctgctttctttccccgctcctgtgctatccagctttaggacaaagagtttaaatgaaaagggggcaaaattaaaccctttgtttgcatagttgtagcactgatagctgaatggaaggtgttaggagcacagatggctggagactaagtgttaaagaacacagaagcactaaggatggaggtagctgctctgacagcactagacctcagcctcagtggagcaggactaccattgccctttgcactaaagagttgactgcagtacggttcccctggtattaactaactgggctccaggactgctgagcttccaacattgctcacaattgtctttggactgtttggacagactgacaacagtaccctgcctcttgataaatagcaactatgttacttgagagtgaataaaaatagaaaaataaaagaaatccatagaaaacttctataacaaggatgatatatcatcctgaggacaaagaagaaaggaactctgaaaattgctttctatagcaaataaaagaatgttttagaaaactaacaatctaagataggatacaaggaatagattaaagagcagattgtaagtaagctccgggtcttcaaatgaacattcagcagaatacaaaagtatacctgagcatccttggaacagctggaaaacagcagaaactgatattttgtctttctggactttttactcatagatcataaaccagcacaatagttgtcttaaatgactgtgggggaaaagagtagattgtaaacccatggtttctaagccaaattcagccccatcaacatgttttgtgtggtttgcacattgcttttagacaatctgaacaagtttgccagcatttacaatagacttcatatagaaattcagatttgtaacttctaaaaaacaaatctttgggagggaagattgagttgcattgcactttcttgccaagaggacattgctacggtgagcggaagagtgacagactagaaacttctgtcacaggctatagcatacaaaggaaatagaagaaaggtggttgtgggactctctcatgcatacctgcaacccaaggatggtcagagactgacgagaagccacgtgcagtgtaaaccattctaagttcattttgaattcaaaacaaaatcaccctctttctgttttctgttccctctcttttctttcatatttttggggtggaggtggggaaaggattgagacagaatctcctgtggcccagtctagcctcaaagtgagtattagttgaggctaaactcctgcttctcctgccttcatgtccctgttgctggaatcacagacataccaccacatctggcctcctcctcctcctttcattacttttaattttcacatcctgggtatttcagtgttctgtgtaccatggatgtacctggtatctgcagggcccagaagacagttgttagatcccttggcacttcagttccagatggttgtatgaactaccatgttgattctgggaattgaacctagatcctggaagagcagccagtgttcttaaacactgagctatctctccattgcctttacacaaaaacaaacaaacctaaaagtgtggggcgggtttgtgtgtgtgtggtacgtgcatacgtacgcatgttgaacagtttgttcctaaagcctttgggtgattctaagcaaggtaggaatccatccaaggtgtgtacagctgtagaaccacagagatggctggcttacaggtgagtcttatgtggttaggagggtgtggggaagagcacactgtggcatggcatcccccaagtaatggaaggtgagtgccatgtcagagtacaagtggagtgagcgggttctacagtgagttgcctctcccatgtagaaggcaagttccatgtcagagtgcaagtaggttaaggaggggtcttcctaggaggagaaacactacaaggaaccaggcttcaacagcaacatgggtggtccgggactcaggtattgaaagaacaagatgaacctggaagcttttgtgtcacaaagtaagtccttaaagaacgaggtggggagagtgtcaaaaaccccatggtaatggtggtattgggttataacccattgtatagagtaggaaacgccaaaggaacagtaagtaagtaaatgataatttatggggaatggaatgtatacatagttccaaattacatctccataaaatactcattgattctacaaaggaaaagtatattgttgattaagtctggtgaataatatcacaatcaagaaatcaaggttagcatcagagtgatgaagtcagagtcatatcccctgtgttaggacgtggtaaaagagtacaagagcccttttgtgatactcccgatgcttggtcagaatctgatcatatgaaacaccagagaattcaaagtaggttgttacaatcctgtattaacaactgccctgaaaatgccaagtgtccaagttttaaaggccagagggagctgtgctaccctccagaatgaaggtcagcagtagggcccaacagcacatggtgctgaagatgtgatgagacgtctttgatgaacaaggtctatccaggaaaatactcttatatcttagatttaataagaatttgtgcgtatatgtctgtctatctctccaaccatctgtctgtggtctgcatgtgcatgtgcatatgtgggaggccagagtttgatgctgggtagtgttttccacttttgttgttgttattgagatagggcctttcactgaacttgtagatttctgattgacaaaactgcaagcccaagagattctcttgtctctgctccacagtgctgggattatagatatatgcttttacatctggctttttagtgtcaagggatctgagcttgggtcctcattttggtgacaagacaggccctttaccaattgagccctatgttatgggactttcatggggaatagtgtggtgcataaagctgggtccgatttttgaaagttctttgcactgtgcttacaacttttcattatattagcaattctttcaagaggaaacaaaaggtttttttttttttaatatgagggaacttacgtatgcagaaaaagtgacttggggtgttttgagatagcatgtgtttttattttaggatctgggtaaacagtacagagttagtaagttgtgtaaagcctcagatgatagaggcgttttgaatgttttgctagaaacaatgagtagtaattgcataagtgttacagtaatctgcattaaacccagtgtggacattcagaaattgaaaattgtgaatatttcatatgatggatgttagtatctgctgtcttaaaacagtttaattctgttcctgtcaggctcactggtgggcagtactgcttatgggaattgccctgatcatgttaatggctggatttatcaagatttgcagtgttcacactccaagtagtaatccaaagttgccgcctcctaaaccacttccaggtaaggtgctgagcgctgggtgctgctgtgagcagagccagagctgtgggcagggaggacgcagcctcaggaggctttagtttagtaactgagtttagagggctgtgtttttgataaattgcctgacaaatgattcactggctgtgtaattgttcgtcagtccaatctagttattgactaccattgtaatgctgatctatcctgagtgccaagaaacatttgaccaacattttgatttttggttggatcctccttccttgtttttgtctcagtctcttgccataccttgtttgtgttactgtagtggaggtgattttaaattattggcctttgtatctaaatagttaatggctctgataccatttgtaatgtctgtgttcttgaaatagtttctggtaggaagcacattttcctctgcaagaggcttactgagaaatataagtttgcatgtagggagtcttagcttcagatgttaagaacctgtcagatagtctccacccttccctctggaggacactgccactaggacaagtcaactttgagcatttgaagaagacagaaggggatggctgttttgttgcagttagtctgatcagtttccccttcccctctccaaggtgtggctagtcattacaggtgtggggaagactgcctaaggcagtggcagggaagccagggctgtgtgctactgtgtggcctcctcaggagagccttgcctcagagtggtttcttctactttgtatttcccctcagctgttccttgcattttcccgtgttaggacaagagtgcccaggagtcatgatgggggtggaggatgtctgatttgatatacttgctttcttaagtttcctaagtcagaacccaggcacttgtgtgagttgaacacatttccaagagctataggacacttttgaggcatggttgccatggtgtccttcttcattggagcagataatgcacttgtgtgttgacacctctgaaaatgatcgtcacttgttaaatcttcataaaagtgctgacttaaggacggctttaaagtcttcatgatagactgtgtgaatgacttcccatcctgctgtgcagacaggcctcaagagtctgtcagggctccagtcagagattctgctctcaaagctaaaataattctgactggtcagtctaattctttaagtacttgaaatgtgccccatctccactgagatgtgctgttaaatattaaatatggatcagacttaaagacaacataaaatagtaaaatattttagtaatttttatattgagtacatgctacagttggtatttttaacttgaattggcctagataaaataaatattaaaatttatttttattttattatggccaccagaaaactgaaaagtgttacggggtacctatttctgctggtcagtgccaaaaaatagcttttcttggtgaaagagtgcttcccttttgaagattaggaggtggtgctcagggagctgttttgctttcgttgcaggcactttaaagaggaggagaccgccacagcccattcagcagcccccgcgtcagaggccccgagagagttatcaaatgggacacatgcgacgctaatgcagcttttgccttggttcttcctagtgcctacagtgggaaaacttcactccaaagagaaacctgttaagtcatcatctgcaaatgatacccttacagttaatagttgaagaaaaatggcaagagatcatgtcctcagatcaggtggaattactcaaaatttaaagcctgaaaattccaattttgggggtgggggtgggatggaaaaggaacccaattttcttatgaacagatatttttaacctaatggcacaaagtcttagaatattattatgtgccccatgttccctgttcttcgttgctgcattttcttcacttgcagacagacttggctctcgataaacttttatcacaaattgaaatatatttttttcaactgccaatcaaggctgggaggctcgaccacctcaacattggatacatcacttgccaatgtacataccttgttatatgcagacatgtatttcttacgtacactgtacttctctgtgcaattgtaaacagaaattgcaatatggatgtttctttgtattataaatttttccgctcttaatgaaaaattactgtttaattgacatactcaggataacagagaatggtggtgtgcagtggtccaggattctgtaatgctttatgcaggcagttttgaaatgagaatcattttcccttttcttatggtggagttggttcttacatacatttttttccttgttacatggctgctgtgagcaggagaggctgtgctgaagaacgcagctgatggcttgcaaactggacagcaacagcatttggcttcagagtcagctctttttgtagatgtctgatttctgcttagtattttatactttctaaatcaattccatttttaaattgctaggtgaattttttcatgccttggaattatgttggaaatgattaattttcatctgtagcctgcttattactttgtgtattccatatacttcaagcctgctaattctgtttttatccaatatgaaaaagaaaatcagtgtcttcattgaaatacttggacagttagttcttcagcactgtcactgatcactggtaaccactagagatgggtgatttgctcagcaggtagttgaaattgtagataggtttttcgacgttgttttccccccaacattttagcaacaatgaaggtagacagcacagtgtcccattacaaacttcttttttaagcagataaaatattggcttttttaaagaaagagaaagcaaaagcatttaatgtattaacaggcttatcgctatgcagaaaatggagggggcattaaaaaatgtaagcttgtgacatattcattgcttctgttttccagctacatcacttaaattagaagtcagcagcagtgatcttcctggctttacataggaggcaatctagagaaggttgacaagattactgtgtttggcttttttttttttttccttttttcttaagagtctaaggtttacacaatcactcacaatgtgacgcgagccagcaaggccaaaaccgctagagaaacaatgggatctctccttgtaaacttgtacagtacgcgggacttttttcaaaacagctttttgtacatgatttagagacaaattttgtacatgaaaccccagatagactataaataattctaacccaacaagtaggtagctgtgtatgacactgctttaaatcattcaaatgcctttgtttttggactgtgcaaaggttggaagtggatttgcatttctaaaatggtgacttttattctgcaagagttcttagtaacttcttgagtgtggtagactttggaacatgtacattttttgcttgtaatgttatcctgtggtagggttttgccctattttattttgagtctaagttaaatgttttctgaagagatacatgcactgaactgtttccactacaaatcaagatgtggttaaaaaatgaaaggaccaggaccagtgagatctaatactactgtcagtttaatgtccactgtgttttatacagtatcttttttttgttgttcactttggaaatttttactaaaacctgcaaaaaataaagtattgtgcaaagatgtaaggttttttgaaacttgaaatgcattaataaatagacttgatgaaatcaacttgaggtctatgctctttggactcagaaacatcagaagtagccaccatgctgaatgaaggactattcagcagaaaggtctctccatgcaagtgagggcatcactgctacagtccagagccatggtgcacagttgattgccattatcacatgtacactgtatgttgaaagttactcaacacaacggcttctcactgtttctaagcagtgtccaggacttgtcctagtgaagagctgaagctaactggaaacttgtagtcttctttctgtgttctcaaagttctgtctgggtgctaagtgcttttattaatgtctgatttatctggatgtggtagtgcctatccataatttcagtactgtagaggctaacgtaggaggatctggagagaaaaggtaaacctaggctatatgcaagattccttccctaaacaatcctggtaaagaaattacctagcatgcacgtggaccttgtcttcaattcataactcccctgtcagttcccccacacaaaagaagacttggtctaatgaaaatgtatttgaaattctgaactaacattttcccgtcttaccagatttattatatattgtaagcagagaattgacattgtaatattacctacaaaagaaattattttgtatacaggatagtgccctttatggaataatatgccccaaattcctattttaaaattaagactagctataaatattggtatatattaagtaagtaaatatgtaatactttgttttttcttttgtttttgtttctgtttttgttttttaagtggacgtctcacgctgtagctggccttgaactcactgcctttgccttgcaactgctggaatcaggggcacttatatttgtgcctactttttcatacttttacagtagcgttacttaataattagggggttgttttgttttgtttccccatgaaactggtaatttttaccaagtcagataattgcaaatttgttgctgcttaaattttgtttggaatttatttttggtatagttttctaaatttcaacaccagtttacaaacaaatatatcattacagtttcgggatttagtgatttccatagcaccaggcaatatgtaggctggggaagggtttatctaagggaaagacagctttataagattagtcttggcttttcagtatctttaatactttgttgtctaggtacttcaaacttgttgcattcatagttgaatgtaaaactgaagatttgcccaaactgagcagttttctatttctaagtcaggtcttgggctgctattgttttttaaggcccaactgttgctctcaacatggtgtctttggtagatgtgaggtgcatacttgtccttgaaaaggcctttaagttctcctggagtatttttagtcaaatgtctcagagcatctcggaacaaaaggtttgggctttcccagagccagggagcagggaggatgccagtttgaagcagatggtaaggataaatcgtctttagagaagtcaccaatgctgtaagagattataggaggaaacttttttctgtctcagaaacaaaagatcatcactttgcccagagtatagcttttttttttttttttttttttaagcattttagattctcaattaagaactctcaagccaggtacagtgcatatgccagtagtcctaactacttaggaggctgaggtagccttgcttgttccctaagatagaagccaggctgggcaacagagcagacacgtttccaaacaggagagccacatcagcagcaacaaaagtaaagacttccagttgatttttttttcctcatttattactagtgtagcatttttattgtttctggagccaactctttagtgagacacagattaaacctttgtattctgtattcccatatgctttgtgttttcagacatatacctatgtgctattttcattagaaacttgtgtatttataactgacaagcatttcagaatgtgttttcttttaaaacgcaactggatactagataaatacaagagggttgaatgcagtgtttattaccttctctgtctggaaatccccgtgaaaatggcagggctaatccaacacagagtaggtgaagtgaagagcgtggtaacaagaatacatttttggccacttggaacagatggaagtgtctgcatggtttggcagctccagggtcaccacattctaagcctgaagtgaaatgggcaactgggcatgggataatggatgccctggtctccactgtcaagatttcagggcacaatatatgagtaaatgcatgtgactcacaatataatttgtaacctacctttctcatttagcaaaaatagtgatggtgtattaacctttctgatggcagtaatgatctcaccctatggaggtattgcatgcctttttacactaatcacttccccattgtttgcatatgtaagttccagatatttcattgttttaaacaatcctttgtggaaatcctaaatctaataatacagtcttaaaactagagtttggggttaaaggtgtttgaaaggtcattgatttaaaaaggtgatagtgtctttgactttaaatataagactttcttcttaaagaaatatgaggggttgaaaatctgcatgtattgcccccacttacgattattagaaacaacagtagaagacgtttcttgatttcatggaggccaaaatttagtgctccagctgtggtcttcaaatactgttttcttaaaaggaatcagacttccttggataaatggataattctggatatagggaaagatatgtacaaaaaaaaaatcggtcacactagtctatacaatgattcaggaagcactttgaagattttagcaacagtgaaaataatatcttcaagagattgaaactctggttttacaagttcatacttactttggaatgtgaaaaacttaaagacatgctgaccaaaaaaaactgaagaaaaatatagaattacgatgttgccattttcctcttccgggattaaggggtagagaggatcccctccagtggctgtcagcctcaggaagcgacagcagaccgaggacacccctcagcggaagcacatctcttcaggagcaaacccaccatgtccgaccatatcctgcctgatcaagcttccagacctgacaccacttcctaaaaatagaaggaacaaatgaaagcacaggggaattcaacagaatccaggcttacagggaactgcagagcaagtgaccaacgaaaattcaaagaaagaaaacgattaataagaagggacttagcttgccaagacttatttggattctgcagtgggaaaacttaaaagatcattagggatatgtgaaatatgatttgatagttggtgatggtaagagattacagtaatttttagtgttaatttttagttaagtttagtgttaaattttgtttaattttttgttaggtgctggggattgagccagggcttcatgtgtactgggcatgtgtcctaccacgtgagctatacttcccagtccacttgtgagagtgccattcttaaaggaagtccatatcacttagagatacaaactgaaatattattaaagtgatgattagtgtcttcagatgtctgtaaaaatactgaagagtggagacggccagtgtatgaaagaaagttgagaagagattgtgagttggtaattgttgaagctaggcaatggggtacttaacaattcagcatactgtttttttctacctatatttaaatgttttcattaaaagtgttttaaatatggattgagttcatatagagaggtttactcaaggctgtatttataacctgtattcatgatgagtttcataatgattttttagtggaattaagcttgaaccaatcaagctaacatgattaattatattctgctccagttccaatgaatgattaattgattttgagtatgagggtaaaatttgaaactatcagtcatttgggagtcttcataagcaactgtttgatccctccttactttcacagtattgtgtgacttgctaactacttaaggaaaagaactgtcttctgttatacatcaggaataatggtcaagttaccacagtaaactcacaaactgtattttgggataaatgttaagtagctcagtacagtaaactggagtcccatctttcttgtttaagtaacactgatccctggaggttcaaatgtatcttttaaaaggtatcctggggttgcctccccccaccccgactataaggggattagaataatttggcatgatgtgggttgtctgtcatgaaaagtgaaaaaaatgttttcagttttcacttcaggaaggctgagtctgctcagtaatgctgatagacgggttactgtgcttgtcatagcgtgttttactggcctttttcccctctgacttgggcttcggagttaaccttgtgtgttactgactgtcagcttttacagattaaagtgttgtatgttactcatgtttcctaatttagttctgtgatagtcctggtacccatatttacatctttgttaacacttttctgccccctctcaccatatcagcaggatagaaattctgtcctatactattcatagtcgctaaactatgtggactggttattcatttcagtcactcactggacagattgtttgaaaaattatttactttagtgagagatggctcagcagttaagatggctgctctttgaaaggacctgcttttggttcccagcacccacattgtacctcacacccagctgtaaatccagtcccaggggatcaaaggatgtcttctgcctctgctggcacaggcattacaggcatacatacatgtaggcaaaacactcatatacagaaaacagaaaaagtaccttttaaaaccagacattaaaaaaattattttaaatactttgtattctttggtagtttttacatgtttataatcacctacaattgctaggctccaattccagcatgtaccctgtccagtttcctgtttatattcttttaaaataacatactgtgtccacttagtgctgcctgcatgagtataagtaagccatcagtggccaccacacacacacacacacacacacactcacacacacacacacacacttccctatcacccatcaattgttaataactcctcagctagagagagagaggctgcctcatggctgccttccatatccatgatggagttgttgactgcctgatcttgtgcaggtgaccacagctgctagaagacagcatttcccaacactccaacccactttctgtgatgctctctgagccttgtggcggctgagtgagtactcaagtcacttgcgtatgttgaccaggtatgggtctcttcactgactgctgcccattgcagaaggaagcagcactattctacagatataaacacttagatggcagcttcacaacatgtccacttatcaaaacaacagtagtgggttcccctattatggcccatgtcctccccacctgtggccctttgtccagtatcaggcataaatcttctcttatttattctggggtatgtgtgtgtgtgtgtgtacacagctttaaggagtcagttgtagcctcccaccttgttgaggtggggtgttcgttttttctgcagttgcattgatctttccaggctttccgttagcttctgggcaattctgcctttgccgcccatcttgtcgtatactgggattagccatagccccacatctgactttttttatgtagactccaggaattaaacttcaggatgtctgttttgcatggtaatcccttttatctgaggagccagcccctgctggctctgaatgggttattttttaagggcttgttgtgcaaggccactactacctaagaataaagtagtgaacttaaccatgtccttgtcctggtggagcttgtggtccagtaggctaaatagatggtagtgttaatcaagcacgcatggaattaaagtgtgccatcccagctatggtaagtgttgagggaggaggcagggcctagttagaaagggaaagggtgtgcgaaaacattgctggaaccagaaggccgagtgagggttaaatggtgtgcatagtgattttaatgatactggcttggctgtatgctggccattatgttgttagatgtaaccctagtcatttggaatcctctaaatgtttttaatgtttgtttgtttgtttctgcttgacacttccatttgtgagcagctaggagagtaacctagcaaatgtcatgcttggtgattctctttaggatgttggcctagtagtctaggagatataaaaggcccttggacttttaaaccatgtcctcaatatcatgaatgctataaacttgggctcaggacatggagccctcctgctagactaaatggtgtacctctcatttgctgtccccacctccccaatctactcatttcaagtcacatactgcagcatttggtcaaactcttgacagaatgccttacactcagaggctttggcaagtcctgttcactcactgactgtggtttttccctgcagcccttcagggctggcatgtagaggtcagaaggtgccttagagaagtggtcttggcagtgagtgcggctactggctgagccacctcaacagcccctataaaaggattcagagcaaagccgataaccccaagactctgagtgtagggatcaagcacagtgacttcctaacatgaagagatggtgaatcgaggatgaaggatgctgggggttaaagtgtaaaggatggtgtcagttgctaattgcagcagtagctacatttatagctgacagaatctgtaaggaaggagctgatgggtcattacctgtgtgaccttgcaaaggtaagtaaagctcttagtctctcatctgtgaaacaagtataatattaactgccttaaggaagtgtgctgaagaaagaatatatataaggcaccttgcacggggtgggggnnnnnnnnnnnnnnnnnnnnnnnnnnnnnnnnnnnnnnnnnnnnnnnnnnnnnnnnnnnnnnnnnnnnnnnnnnnnnnnnnnnnnnnnnnnnnnnnnnnnnnnnnnnnnnnnnnnnnnnnnnnnnnnnnnnnnnnnnnnnnnnnnnnnnnnnnnnnnnnnnnnnnnnnnnnnnnnnnnnnnnnnnnnnnnnnnnnnnnnnnnnnnnnnnnnnnnnnnnnnnnnnnatcacgcagcacgcacagccaggaagtggctgctcaagtgtctctgtccattttatatagtcatgcctctgggtcttctgcccaagggattgttccttccagaatcaaaatgggtcttctcacgccaattaatataagggatataattcccttcacacactcagaagtccaaaactgattctagatctcgtcaagcaagctcacaacaggaaccattttaccaactttctgttgtaacaaaatacctgagacaatccactcagagagaggaaagatttattttagctcactatttttgtttggttgtttgcttgcttttctggaccaaaagcataattttgagctttggatttttcaagagatgagttggataaagcaggcatcataagcgtttgaaaagaaatccagaagagcatgcgtgtgacagaagagacaatggaaagtaaggagtttctgagatggagagggacttgtatctgagttctgggaggcatcagtggtgagaaaacgtactcgcaggcaagctccaagaacaagagaggagcaggagaaagacctgtgctgactttagtctgctcactaactgtactgcaactacaacctggaaactggccgtcccggaggggaaaaaggacaatgtagaaatggaccttggcagacctgcagcttggccctccacttagacacttcttggttattattcttgttgtttggtggttttgttgtttgtttgttttgttgttttgagatgaagtcttactatgtaaccttgcttggcttgggacccactctgtagatcaggctggtcttgcactcagagagatccacctgtctctgctgtccaagtgctgagattaaaggcaaa

SEQ ID NO: 657 - DNA, 2480 bp, Mus musculus
ccgtgaggaggcggcggccggggaagatggtgttgccgacagtgttaattctgctcctctcctgggcggcggggctgggaggtcagtatggaaatcctttaaataaatatattagacattatgaaggattatcttacaatgtggattcattacaccaaaaacaccagcgtgccaaacgagcagtctcacatgaggaccagtttttacttctagatttccatgctcatggaagacagttcaacctacgaatgaagagggacacttccctttttagtgatgaatttaaagtagaaacatcaaataaagtacttgattatgatacctctcatatttacactggacatatttatggtgaagaaggaagctttagtcatgggtctgtcattgatggaagatttgaaggtttcatcaagactcgtggtggcacgttttacattgagccagcagagagatacattaaagatcgaatcctgccatttcactctgtcatttatcatgaagatgatattaactatccccataaatacggcccacaggggggctgtgcagatcactccgtttttgaaaggatgaggaagtaccaaatgactggagtagaggaaggagcccgggcacatccagagaagcatgctgctagtagtggtcctgagctcctgaggaaaaaacgcacaactctggctgaaagaaatacttgtcagctctatatccagacagatcacctgttctttaaatactatggaacacgagaagctgtgattgctcagatatccagtcatgttaaagcaattgatacaatttaccagactacagacttctccggaatccgtaacatcagcttcatggtgaaacgcataagaatcaatacaacctctgatgaaaaagaccctacaaatcctttccgtttcccaaatattggtgtggagaagttcctggagttgaattctgagcagaatcatgatgactactgcctggcctatgtcttcacagaccgggattttgatgatggtgttcttggtctggcctgggttggagcaccttcaggaagctctgggggaatatgtgagaaaagcaagttgtattcagatggcaagaagaagtcattgaacacaggcatcattactgttcagaactatggctcccatgtgcctcccaaagtctctcatattacgtttgctcatgaagttggacataactttggatctccacatgattctggaacagagtgtactccaggagagtctaagaacttaggacaaaaagaaaatggcaattacatcatgtatgcaagagcaacatctggggacaaacttaacaacaacaaattttcactctgcagcattagaaacataagccaagtgcttgagaagaagaggaacaactgttttgttgaatctggccagcctatctgtggaaacgggatggtggaacaaggggaagagtgtgactgtggctacagtgaccagtgcaaagatgattgctgcttcgatgccaaccagccagaggggaagaaatgcaagctgaagcctgggaagcagtgcagtccgagtcaaggaccctgctgtacagcacagtgtgcattcaagtcaaagtctgaaaagtgccgggatgattctgactgtgcaaaggaagggatatgcaatggcttcacagccctttgcccagcatctgatcccaagcccaactttacagactgtaacaggcacacacaagtgtgcattaatgggcaatgtgcaggttctatttgtgaaaagtatgacttggaggagtgcacctgtgccagctctgatggcaaagatgataaggaattatgccatgtttgctgcatgaagaaaatggctccatcaacttgtgccagtacaggctctttgcagtggagcaagcagttcagtggtcggactatcactctgcagccgggctctccatgtaatgacttcagaggctactgtgatgttttcatgcggtgcagattagtagatgctgatggccctctagctaggctgaaaaaagccatttttagtccacaactctatgaaaacattgctgagtggattgtggctcactggtgggcagtactgcttatgggaattgccctgatcatgttaatggctggatttatcaagatttgcagtgttcacactccaagtagtaatccaaagttgccgcctcctaaaccacttccaggcactttaaagaggaggagaccgccacagcccattcagcagcccccgcgtcagaggccccgagagagttatcaaatgggacacatgcgacgctaatgcagcttttgccttggttcttcctagtgcctacagtgggaaaacttcactccaaagagaaacctgttaagtcatcatctgcaaatgatacccttacagttaatagttgaagaaaaatggcaagagatcatgtcctcagatcaggtggaattactcaaaatttaaagcctgaaaattccaattttgggggtgggggtgggatgg

SEQ ID NO: 658 - protein, 755 aa, Mus musculus
VRRRRPGKMVLPTVLILLLSWAAGLGGQYGNPLNKYIRHYEGLSYNVDSLHQKHQRAKRAVSHEDQFLLLDFHAHGRQFNLRMKRDTSLFSDEFKVETSNKVLDYDTSHIYTGHIYGEEGSFSHGSVIDGRFEGFIKTRGGTFYIEPAERYIKDRILPFHSVIYHEDDINYPHKYGPQGGCADHSVFERMRKYQMTGVEEGARAHPEKHAASSGPELLRKKRTTLAERNTCQLYIQTDHLFFKYYGTREAVIAQISSHVKAIDTIYQTTDFSGIRNISFMVKRIRINTTSDEKDPTNPFRFPNIGVEKFLELNSEQNHDDYCLAYVFTDRDFDDGVLGLAWVGAPSGSSGGICEKSKKDGKKKSLNTGIITVQNYGSHVPPKVSHITFAHEVGHNFGSPHDSGTECTPGESKNLGQKENGNYIMYARATSGDKLNNNKFSLCSIRNISQVLEKKRNNCFVESGQPICGNGMVEQGEECDCGYSDQCKDDCCFDANQPEGKKCKLKPGKQCSPSQGPCCTAQCAFKSKSEKCRDDSDCAKEGICNGFTALCPASDPKPNFTDCNRHTQVCINGQCAGSICEKYDLEECTCASSDGKDDKELCHVCCMKKMAPSTCASTGSLQWSKQFSGRTITLQPGSPCNDFRGYCDVFMRCRLVDADGPLARLKKAIFSPQLYENIAEWIVAHWWAVLLMGIALIMLMAGFIKICSVHTPSSNPKLPPPKPLPGTLKRRRPPQPIQQPPRQRPRESYQMGHMRR

SEQ ID NO: 659 - DNA, 174472 bp, Homo sapiens
tgagaaagagtttcactttgttgcccaggctggagttcagtggcatggtctcggctcactgcaacctctgcctaccgagttcaagcaattctcctgtctcagcctcccacgtagctgggattacaagtacttgccaccacgcccggctgatttttttttttttttggtattttagtagagatggggtttcaccatgttgcccaagctggtctcgaactcctgagctcaggcaatctgcccatctcagcctcccaaagtgctaggattacaggcatgagccactgtgcctggcctaattttttatatttttagtagagacggggtttgaccatattggccaggctggtctcgaactcctgaccttgtgatccacctgccttggcctcccaaagtgctgggattacagtcatgagccacggtgcccagccagcttagctatttgtaacagttactttagaagataggattcgttcagtgtttaaaagaagtgagagtaaggctggaaatagaatcaaagtctgaataaatgcaaaaaaaagtggtctaaacaattatattattcccaaagaaagcatataataactggaagggagacggtggtctgcatggagtccagagaatatcccacagtgtaagggtttgctgaagtatgctttgatcaccatctattgtggaggtcccctgaacatgtggatggtctggtacctatctattccctcgatagattctactgtggcatggtaagttgaatagttggatgaattagccagcaaaatcattcagttaattttttcttcagtgatgccttgcttactaagccactttgaattatgctttagcttctcaactattgacaagaaataatgcattgacttgctaacatgaatagctaactcataaaattatgaggtgacattttaagacctaagtcccttaagagtttagctcctataaattagtgcttgtcagttgatcaaatcaggttgcactgagaaaaatctagcttctgggccttgaaagctaacaggtagattctggaccatggcaatgataataaggatgcatttacccagtaattcaaaagaccagactacaagatttggagtcaaacaaacttcgattagaagcctggtctgcctgtttcctcatctgttaaatgagatatatctaattcatagcattgttacaaagagtaaatggaatcatgtacataaatttcttaccaaggtacctggtaccatgtcaggatcatgttttgttttgttttggtaatctggaaatccccatagtaggaacaaaataaatacttgtcaaatgaatgaatgattattatcattgccatcctgtaacgttgtgggttgtcctctgctttgcctcaaaactttcctatctctgctgtccttaacactgggataatagaatttccagaaagtaacacatggttaattgcagatgagagatataaatcataggtgtttcagactaaaatgtgattgagattactatggcaagggggatctaggaaaaaacttcaaggaccattttgaacttggtctagtttttaaaacgggtcataaactcaaatactgacagggataactggagtggggttagattagacaaaccctgtccaaagagggcagcctctactcagtttctgccaattgattctgtgcaagaatctaggtcggcttgacctttcagtttccacagaaaatctagaatcttggtttaaccatgaaaccttacaattatttaatattgatgaataattgagaaaaaaaatttttggccaggctcgatggctcatgcctatactcccagtgctttgggaggttgaggagggaggatcacttgagcccaggagttcaagaccagcctggacaacatagaaagatcctgtgtctacaaaaaaaaaaaaaaaaaaaaaatagtggagcatggcagtgcatacctaatacctatagtcccagctacttaggaggatgaggcaggaggatcacttaagcccaggagcttgaggctgtggtgagtcccactgtactccagcctgggtgacagagcaagactgtctattccattagaatagacattctaaatagaatagggaagatattttaaaaaatacaatatagtttgataaagctacattagaattatgtaaatggtagacattaagttttgtctagagggcaagtttaaaattttacagaagggaagaagcctgagccatatatttaagaatgtctattcctttacattttaagggaatgtgttctaattgctgtaagttataaataccgtatttcactgttctcttttccctagacgtggatttttttttttttaattttgagacagggtctcactgtgttgcccaggctggagtaaactggtgtgatcatagctcactgcagtctcaacctcctgtgctctagtgatcctcccacctcagcctcccaagtagctgggagtacaggcatgtgccaccatgctcggctaattgttttattttttgtagagacaggatctcgttggtcaagcacggtggctcatgcttgtaatcccagcactttgggaggttgaggcgggcaaattacctgaggtcagcagttcaagaccagcctggccaacatggtgaaaccctgtctctactaacaatacaaaagttagccgggaatggtggtgcatgcttgtaatcccagctccttggatagctgaggcatgagaattgcttgaacccaggaggcagaggttgccttgagccgagatttcaccactgcactccagcctgggtgactaagtgagactctgtctcaaacaaacaaacaaaaaaggtcaggcacagtggctcatgcctgtaatcctagcactttgggaggccgaggcgggtggatagcctgagctcaggagttcgagaccagcctgggcaacacggtgaaatccattctctactagaacacaaaaaattagccgggcgtggcagcatgtgcctataattccagctacgtgggaggctgaggcagaagaattgctagaacctgggaggcagaggttgcaatgagccgagatcatgccagtgcactccagcctggactacagagcaagactccatctcttaggaaaaaaaaaaaagaaagaaacagaaaaagaagacagggtgttgctatattgcccaggctggtgttgaactcctggactcaagaaatcctcttgtccgggcctcccgaagtgctgagattacaggcatgagcccccgtgcccaggcccagaagggatttttaaagtccttttcttctctgattcctcttttatacagaaagtaaaatcctaacaaaaaagtgtcttaaaatgaattattgaaaggattctctgagcctaatttcatagaatttataggataaatgggagaagcattcctcctggagggaataacatgtgcagagatgtcgaagaggaaagtgatatgtgtttgggaaaccaactgcagttgaacagcagcatattgtgattaaagcacatgctcttgaggcagatctaactttaggcattggttctgccatgcaccagctttctgattttgggcaagttatttaagttgccattaccttaccactcctcgaactcccgacctgctagctattattgttattgtaatttttgcaattgctacttttagaagataaagtaggaaagagctggacattggggacagcagacttttcatcctagaaacatggcccagtttgtctaaaacattactgagaaggccccaacaccaccaacgaacactgctgtgacttacttgaaaacctggttggctatattttggcactgtgccaaggttgagctggttcctccaagtcctgcttagattcctagttattcagagctttaaaaaaaatagctgggcacggtggctcacgcctgtaatctcagcactttgggaggccgaggggggcagatcatttgaggtcaggagctcgagaccagcctgggcaacatggtgaaaccctgtctctacttaaaaaaaaatagaaaaattagccgggcatgctaattacgtgcctgtaatctcagctactctggagcctgaggcaggagaattccttgaagccggaaggcagaggttgcagtgggccgagatcgcgccactgcactccagcctgggtggcagagcgagactctgtctcaaaacaacaacaaaaaaaccactcagtaactctcaaactgatagcttcaaacagctcacagttaaggaagctatgctgaatggtttggtggccactgaggtgtggatgtgattttatatccaagagcacaaaggcaaacatggcatcactggctataatgtttgaagaccagtcttaaacatctgattctctttcatttattttttgagtattcttggactatgtgtgatcagactgctttgtgtcaaaaaaaaaaaaagagtggtgaaagacaaagctggcaaggaaaacaatgactagatcatgaggtcttgttttttttgttttttttttgagatggagatggagtttcactcttgttgcccaggctggagtgcaatggcgcaatcttggctcaccgcaacctctgcctcctgggttcaagcgattctcctgcctcagcctcccgagtagctgggattacaggcatgtgccaccatgcccggttaattctgtatttttagcagagatggggtttctccactttggtcaggctggtctcgagctcccgacctcaggtgatccacctgcctcagcctcccaaagtgctgggattacaggtgtaagccactgcgcccgactgaaggtcttgtattttatcttgcagataaaaggatctatattttcaaaagactggcaggtggggaagcggtgggcaggaggtcaggcagtgggtatgtgagacaggaagaccaaggcttgggcagtggcagtaaaggtaggtagagggacttcatacaatggagaataaaggtgacttgataatctatctactgggatgggagtttaggtaattgagtggatggtgttgccattaacctaaatagggaatttaggaggaagagaaggtttgggtaggttgatgtaggggtttttcagtttgggacatgttacggagtatggctgtgtaatttcaggtaggagatgactagtaagagttggatatgtaataataacaacatctaaaatattttataatagtaattgtatgctatgcactgttcttagtgctttacatctgttaaattatttgactcctatagcaacgctctgaagtagataccactattttccccattgtaaagattaggaaactgtgcaacaggtgccttaacttacctaaggtcaggtggctaggaagttgtgcaactaggatatgggtcttgggtttgggggcataggaaatgttccaagaaaaagtgattggaatactgttccaggaaatgtgctgacaatgtgataggcattgtcaagacagacccaggctttgttttcacggagtttatagcctaatgagttgcatacatttgggggtagtaaaatatcatgcaagtgaaaatgagaagataagaaagccaagggtaaaatcttgaagatcactaattgtgcagtaaagagaagaaaaagtcacaggaaaaagatgtagaggaaagtacaattaaagtaaagaagaaagtccagagtgagtgaaggtttggaaactgttagaagagggagttttgaggagagagtgttgtctgaaaggtccagtaagataaggagtgaagatgtctagtggaattgatcactaacacatctttgatgtctttgatggccctagcaagagtagcttcttacaaagctaggtgggaacaaattgcggtggattaacaagcagtttaaaagcaggaccaaaaggaagagagactggagtaagggatataagttaggtgttctgcagcaatctaagctagataaaatactataattaaagtaaagcagtggtccaaacttgtaacactggaatactttcagagtgctagccaatcagagcaacagcagtgagaaggggagcattaaaggcacaaagacatttttagggaataatcaatatgacttggtgacaaaagaataatctaaaatgattcccccccttttttttttaaatagagatgggatctcactatgttgttgaggctagtctcaaattcctgggctcgagtgatcctccagccttggccttccaaattgctaggatttcaggcgtgagctgcagtgcccaggctaaaatgattccaggtttctgggatagtggtagtgccagtatcagagataagaagttaaatatattgagtttggcatgacagtgggacatccagcaggcagtttagtagaatttggaaattcacaatgtaatcgttgaaatgtttaccagcattggccttcggtctgtgcaacaagcattctcctctagtattacttgtctattacactgtataatatatgagcatttgcttaaaagctgaatttcccattactaaaacttgaggataacttttattatactggtaatatcaaaactgtattgttcctgaggaaataatgctattaaaataattacggctttcaagtggatgtttgagtgttcatgcagtgaccataatagttacattttttttacttaatagttacatagcaattattatattccaggtctattaactaatattagaagataattagttaaaattattagttaaattagttaaaagtaactaataacagatattaactaatttaaatgtaatcatcaaaacaatctgctgaggcaaatattttttcattgtcattttacaaaagaaatattgaggccaggtgcagtggctcacacctgtaatcctggcactttgagggggccaaggtgggcagatcacttgagcccaggagtctgaaaccagcctgagcaacatggtgaaaccccatctctacaaaaaatacaacaaattagcccggcgtggggcccccccatctgcagtcccagctacctgggaggctgaggggaaggatcacctcagccctggaggctgaggctacagtgagctgtggttgcaccactgcaccccagcctgggtgacaaagtgagttcctgtctaaaaaaaaaaaaaagaaaagaaaagaaaagaaatattgaggttagaaggcaaaaaaacttggcaaaagtcacacggtttatagatggcagagctaggagtgaaacccaggcagtctgtgatagtgtagatgcagaccttatactttaatatttcatcagttttccatacatttgcaaaatatcaataatgaattaagttaaaatagtagcccaaacttgtaacactggaataccattcattatcatgctggtatgtaatgccattcgtgcatgctggtatgtaatgccattcgtgcttgacaaataaaaaaaatacagtttttctttttttttgagacaaggtctgtctgtgttactcaggctggagtgcagtggtgtgatcacagctcaatgcaacctcaacctccagggttcaaacagtcctcccatctcggcctcccgagtacctgggactacaagtgcataccactgcactggctatttgatttttatttttaattaattaattaattaatttttttgagacagagtcttgccctgtctcccaggctggagtgcagtggcgccatctcgactcactgcaacctccgcctcctaggttcaagtgattctcctgccttagcctcctgagtagctgggattacttgcttcagcctccagaatagctgggattacaggcacaggccaccacgcccggcttttttttttttcctagctctgtcgctcaggctggagtgcagtggcgcgacctcggctcactgcaagctctgcgtcccgggttcacgccattctcctgcctcagcctcccgagtagctgggactacaggcgcccgccatcacgcctggctaatttttgtatttttagcagagacggagtttcaccatgtcggccaggctggtctcaaactcctgacctcaagtgatctgcggaccttggcctcccaaagtgctgggattacagctgtgagccccgtggctggccaaaataaatacattttaaaaattaaaaaaaaaaaatacagtctttataaatgtaattttcagtaatcatcttagtaatgcaaaatatggctttggagttttttccagttgaattttaagggaaagtgccatttgcctctaatcactggaattcattataaaaatactgtgcaacagaaaacatgctataaggtggtttaagagctggaaaataaaaatatcatttgttgacagcactaccacaagagattagtaaaaagcacaggtgatatgagatgtaatgtctgcaggtaactatttcctaagactgaatattttaatgaaggaaaaaaaaaccattcgtgagattctgccatcctttgatgattccatgtatctcattataaatggatacaattatgatggttttgaaacgtccgtttttgagcctattaatgttgcagcaaaactagaatcattcatttctcaaactgagaattaaagaagactcttatggccaggctcggtggctcccacctgtaatcccagcactttgggaggctggcgggcggatcacctgaggttgggagttcgagaccagcctaaccaacatggtgagaccccgtctctattaaaaatacaaaaaatttgctgggcgtggtggtgcatgcctgtaatctcagcaacttgggaggctgaggcaggagaatcgcttgaacctgggaggcagaggttgcggtgagtcgagatcacaccattgcaccccagcctgggcaacgagagcgaaactccgtctcaaaaaaaaaaaaattctcttcacttatgttaatggtaataaatggtataaaatatacaggtaacagtataggaattccagtttattacagtatcaataacattaaggccgagcgcagtggctcacgcctgtaatcccagcacttgtgggaggccgaggcgggaggatcgcttgagttggaggttacagtgagctatgatcacaccactgcacttcagcctggcgagacagcggataccttgtctttagaaagcaaaacaaaacaatttacacacacacacacacacacacactctccctaattcggcttgagttggaggttacagtgagctatgatcacaccactgcacttcagcctggcgagacagcggagaccttgtctttagaaagcaaaacaaaacaatttacacatacacacacacacacacgcacacacacactctccctaattcggcctactcaagcacgataccaaatagatgaagaatatctaattaaatggccataaaaagttctagttcatgacatccaagtttaaagaatcaaaatgagttacgagaaaacaaacacaagctttaagaagttggggagaagatgtgcgtggattcgcttcaaagatgtgacagagagaaaagaggacattttctggactggagattcaagacagtctggttcaggttgcatgcttttgcaaaggctaaagccttagtctgtgacataaatttgtaaagagctcggaaaattacatctcggacatggtgtctttttttcctgctgcttgaaggtctttgcatttatgttcgcatcactggggcagctgccgctataattactgcttgttgggactttttgtttacttggtagctgtggtgcaccaagagaggcagaaaaagaagaaaaaaaacctctgttacttgtgactttaagaagtcgaaagcagccctgcttacatcttccacggaccattttagcccaagggaaggtcctcagcagctctaacacgtagcggagcactatctccgcgtaggagcgctcccgccccggggcgggaccaggacaaaccccgcctcccaagcccaatcccagctctccgccggcggacaggaagcggcggcaggcctagcagcacgggaaccgtcccccgcgcgcatgcgcgcgcccctgaagcgcctgggggacgggtaggggcgggaggtaggggcgcggctccgcgtgccagttgggtgcccgcgcgtcacgtggtgaggaaggaggcggaggtctgagtttcgaaggagggggggagagaagagggaacgagcaagggaaggaaagcggggaaaggaggaaggaaacgaacgagggggagggaggtccctgttttggaggagctaggagcgttgccggcccctgaagtggagcgagagggaggtgcttcgccgtttctcctgccaggggaggtcccggcttcccgtggaggctccggaccaagccccttcagcttctccctccggatcgatgtgctgctgttaacccgtgaggaggcggcggcggcggcagcggcagcggaagatggtgttgctgagagtgttaattctgctcctctcctgggcggcggggatgggaggtgaggcacgactgcgagcgccgggggcgccgcgaccacggcggagcggcggccgggccgagcggagcccagtcgcgcctcgcggcgtgcgcgtcagtcagcccagccggccagcggcgccactctggcgggccgcgctccccgctccctattgtcccccgcgccccgaccgctttcccttcggtggcgggccgaggaggctcccaagcctccggcgaggccttccccgccccccaccgccctggcggccccgggaggcgggggtcgcctcccagagaagcgaagtcggggcatccgcgtcgcctggtgagagcggtggaacccaggctggtggctgcatccctccagtctgctcggcgggcgccggtgcaggcagccgcagcgaggctggcggtctcgccgtcctcgttcagcgctcatcctgctcaccattcctcccccagcccctgcccggtggcggattccgaagtcctctccgccgccgagacccgccgcgcagactcgtgggaagttgtgttgtttgcagctgggctcgtgtattgttctttacccggcgcgccggtcctgaccgaccccattctgcagaggggccgcccgtggagtggcagcagtcatcacccgcttatctgagactagtggcctcggttcttcctgtgtcctgtgtttggagagagatcacaggagggtgtgttggtgttcttgaaaacattctgtcgcccaggggaaagggtttggtcgggagaagggtaaaccatttggggatgttctttgatttgtaggctggattgggtctcttagagtagaagttcggtccctgggtgacccaacttgaagagtttcgttaaactttcaggtggagtagatgtacagtgtagttagtggattgtcaaaacagtgccccctcccccctgcacatgaaagtcaaatttgctaaaagcatgtcatttcttgtttcgggttttgaagacaacgatttttatttccggtgtgttctaggaccagctgcatcattttattcttgcttaaagtgctttattttaggtaagctttttgacttgccccagagtaaacttaaaaacctcaaggtgtgcctaaaagcaacgattgaaaaaatttgaggaatgctttggatgagtgtctgtagcctttgataatttagaaaatatctatttcatgtaatgtattgtttctgtttttttctttgccactttgacttatgactgcaggaccaagtgtatttctgtcctgtattctaccgagtccgagggtggtactgcgtaggcagacttctgttatagtttgtagtgttcatttttttgttacacgttttatttaatttttttcaatccaattcatcaagcaagacacacattatagattaagagctgataatagatgtttagttttaaaaaggattatgtgcgggagactctctgttagaggagcctttttcatctgacatttgttatttctgttctaaacgtggctttcaacaaatcgttttcctatcttttttcactttttgtgattaaattcaggagttaagacactgttctctataaggtaataaaaagtaagacaaacacatgaggcactttactgagtagtagtatactaaatgttcttttaaaaataatgaaaacagtaagaaactgatgtagtcttatatttgaagaaaaaacaattgaataacatgtttgtgggttaaaactcttatacaaaaattttctaaattcatatttccagagtcctttattgcattaagcattggttaaaaggctaatttttggtgtttttgttaagcagaactttttcaaaaaacataagacaagttttattagttttattttaaaattagtatcaagattctagcttttgggtacttggagatacttgtaattttattgtaactatggggtatttttatctactaatctgagctatttttggtcacttgtaagatctttgtatgatgatttgtagacttcagcacattgagattgaatgtatttgttttagcatatgagagaaaggagaaatttgtgtagattagaagttgtggtggaaatttaacttaaaatgtaaatcattttcaggtagttaataaatcctttttgttgcttccacctccccaatttgtcagtcactgttgtgtgtgaaatttttcttgctctgtatattactaggatgggaagctggaaggaataattaaagtgtttagaatcataaaacaaactttcctaatggtgtccatttccagcacagccccatcctatgttgtagttgtaggagcaaaccatgtttttttattttatttttaaaatttaactggtgtgtttgagagcacaaaaggcatttcagctgtagcagtaaattccataatgttttggtttgatgaaatcatgcccgaaatgaacttcagagtatgatatgtctcttacatttaaaaatctgatgtaagtgcttagctttgtacattactgctcaatagaaataagttttctggaaacttgaccagagctttaaaggtagtagagcttaagcagttaaactttctctgactctgagtcggaatctaccagcaaataagaatttaatgaaagagacagactaattttgtctttatccttaaggatctctgactcttcatctttttaaaacttcagtttgagtccagttaactccatcatcttttttaaaaaatgttttattttgtttatttattttaaaaagtagtgatggggtcttaatacgttgcccaggctggtctcaaactcctcgtccctagcgacccacctaccttggcttcccaaagtgctgggattgcaggcatgagccaccctgactggccaattccttgtcttaagacatttttcttaacaagaaaaatttacatattacatattactaggatgggaagccagaaggaagaattaaagtgtttagaatcataaaatgtaaactttcctgatggtgcccatttccggcacagtcccatcctatgttgtagttgtaggaaggtaccattgcctacattaatggtattttctgtgtgtatgtgtacagcctctcccagcaggcatggcaggcacttctctgatgtgcttttagtaacttgtttaagatcttcaaggatgtgtattatctgatctctttaaaatttttctaaggaccttaagggttgtagggcttggggcaaatggaacatttccatgatgccttttgtgtgtctaatactgtgttaggagtttcacttttcaacagttatgagagaggggtgataggcagttgaagaaacagacttggaaatataatttttctagcatcatccaccacttagtggtgaattggacattcgaactcaagctggtttgaccttaaaccctaataagctttttatccattgccccttcatgccttttttgaaagcggctttcatacattagctcaaaggtggcctctggactaaactaccttagagatatgttttattcacagtgtctttaagtttgagctaatgattaacattgaaaaattgggatatttctcagtgaaattcatggatttctggattttcggggaagacttggaaatccagatactagtgggctgtattcctattgtgcagagctgagcagtagggcagtagccaccctctttaaactgggtatgtgcttaccggttactgcagtccccatcattcctaatgatacacctggcctttttcactcatttttgttacctgcttgggtactgtgggtatgttgttcccatctctgccttagctttatcttgtatagatggctccaacttttaaaaaatgtttgactgtgaccccttatccaacttttaatatttttttgcaatgttttctctgtagtcttaaagatttgtttaaaaagaacatggtatacacaatactttttattcagcattaggttattagatgttttttaaaaaaacccgttttcataatagtagcagcttgaaggtctttaatatagaatgatcgttacagtctctccacatttctttatctaaatgggtaagtaagaaaccatttctttttctactgggatgagaaccacagaaaaaattagttgagggtcatattaataaaaaccaatttaagaataggatacaaacataaactctgcttttgaaattaaggtgatgaaatggaggaacaataacttcagcaattagctacattttcctaacattgttggcagatcagtggttcagatatgagatgatgtccatataacaaactctgggaatacacttttatttttttgagatggaatctcgctctgtcacccaggctggagtgcagtggcacgatcttggctcactgcaacctccgtctgccaggttcaagcgattcttctgcctcagcctccagagtagctaggactacaggtgcgcaccaccacgcctggctaatttttgtatttttactagagacggggtttcaccatattggccagactggtctcgaactcctgacttcaggtgatctgcccgccttggcctcccaaagtgctgggattacatgcatgagccactgcgccccgctgggaatacaattgtaaattttttgtgtttttgttgttgttgttgttggtcttggttagagatgaggtctcactaggttgcccaagctggtcttgaactcttggctttaagcaattctccaaccctggcctcccaaagtgctgggattacaggtgtaagccactgtgcctggccagttttgggtgtttttgatggaagtttttctaaaatgtggaaaatttactgtagacacatttactatctccttaaaatggactgaatttaaccttacatgattgaagtttaatatggagaacagttgttattctgggttctattgtagtttctgtttttaatttttccagaaatgactgaaatggcctggtagtttattatttttctaaatttattctagatgattgtggattttattcttggatctagttgtagcaatatttccaactttttggttaggtttctttgctttcttgtaaactttgaagatgttaccttctaattggttgtttctagtatgttttatgtaggaaaactaaataattatatttgagaaacatgcttgcatgtgaaatgaaataaataaattctaaatcttctgtggaatgaagtacatgggctttaggtagttttttctttctccctgccccccacccctacccctcacctttcaatatgtatagcttggctttgtagagtttagcattgaggttgcctggatcgtaactttctaaacagttggaatgatgtggtactaatgtgttttgctagttacagttagacagggaagaatggagagaaaaaactgatgaataaccaggcaggtacagcaaataaaatgtattctcattaggttgcagatagatcgtgtcctagagctaaatcatgagtactctggttttatactaatatactagattattggtattaaacatactctaaaatgtccaactgtaatattttctacaggaatagaaattgtgaattaagaaaaagtgttggccagacacagtggcttacgcctgtaatcccggcactttgggaggctgaggcaggcggatcacctgaaaggtcaggagttcgagacaagcctgcccaacatggcgaaaccccctctctactaaaaatacaaaaaattagcttggtgtggtggcaggcgcctgtaatcccagctactcaggaagctgaggcaggagaatcgcttgaacccgggaggtggaggttgcagtgagctgagatcgcaccactgcactctagcctgggcgacaagagtgaaactccgtctcaaaaaaaaaaaaaagtattttgtttaaaggaaagtcagtgaaaggtagatgacaggggcttatggtactgtgctggtttctagtaagtagctgtgttacagcaactgtgttaccattttggtgatttttacatttgtataaagttaaatttcttgtctgtctttaattgtattacattataatggttagaaaaaaatttgctaaagttggggcattgttttggaagggtctagcttaaaatatggtctatgtggagtaccagaaatgtagtttgtgtggagaaggttgtgggcaagggcagtcattggccactgctgccaacacaaagtttcagtgagaggcctatgtgagataaattgtggataggaaaggctgcagacagaaaaacacatagtgatttcaaatctgaacccccgccccccgccaccgaagcccaaaatcacaggggcaggccttccaaattgtaggaatgatttgcatttcatttggtttttacacgggcagctctatgtgacatgctggggtaaagaggcccaggtttttgttgttgttttgtttgtttttgagacaaggtctctttctgttgcccaggttgaagtacagtggtgtgatgtcagctcactgcagccttgacctctgcagctcaagcaattctccaacctcagcctctccatagctgggaccacaggcacacgccaccatgcctggttaattttttgatttttttgtagagatgaggtctcactatgttgcccaggctgtgttgttgttttctaaaggagtaattgatttaattaatgatcgttaatgctcttccaagcaaccctaaaaactctgcttgttctgaacaaaaatctagcagtggtaattctaagtagtctagctgttgatttttatattaggaaaaaggaagcaatgttaaggacaagtggaaaaactataataaccctaccacttggattcctgtaagggcagtgacgttgctgtccagcaatgtgaagattttgcgttagtattaggatagcctgacccagctagtttgcaggaaatagcggtgctgagaatatttctcagggaatgtagtctccctttgatgctgagtgaattcattttgaagctactacagatgctccttgactcatcataagttgaaaatatcgtaagtcgaaaatgtatgtaatgttggcaacagagatgatggttcagtgtatgatttttcaactttgtgatggtgagaaagtgatacacgtgcagtagaaactgtaaccccatttaagttttaaggagctctcctccacttaatgtggggttatgtcacaacccatcataagattgaaaaatacgaatcatagtaagttggttaacatacatacagtccacttgtactactgcaagtaaacaatgtgagatgtatacagtgagaacattgctgtttagtcaccaggatttattatgtgtctatgactgttaggagtcgtgaagccacagtattaagtgagaagaaaagtaaaaaatactgagtttgttggagtaaatgaaatgccaaaatataaaaatatacttccaattatatattgtagttgcacctgaaatgaggatttgttaagcttgagggacatcagcaagcggggaaggctttctgaggtggaagagaatgacacataagatgcttgtaggtttacttgcctggaatcgatagtctgtgtcaggaaataaggagaattgctaactgggccatgataatcaggactgattattctaggccatgataactatgagatagaatattatggactgttgggtggagtccctgttgaggagttaggttatgattgacaaattgggtgattgagtcttggattagaatgatcgtagaaataagtaaggatagaacaagaaatgacatggaagaaaaactgataaaactgggcaaatgtttaacgtgaaagtaacaaaacttatagagggctcactctgttgaatttaaatattaggctgtttcattggagtgagtgtggttttataaaactttgaagacctcagtcgttgaagttgaaaatgtcttaagattttgagtctggatagaagcttataggttgggatgggtgtcagcgtctgggattttattttatttgcatgctaatacttgggaactggataaaactttgcatagatctttaatctctggctagttatttgggaagcagtgctttaggtagctggattatagaagtttagtgaatttggagtggagatagagattagtttaaagatatactaacacttttttttcttacttaagttggaattaggctattcagttcaaaaatatgattgacactcttgatttcatgtgaactatgaacttctgtttccaagacaaataggggaaaataatgcgatctttgcattttaggcaaatttgcatatgtgatttgtggagcagaatttgcttaccatctgtttttgcttgtattgatgatggcaggacacacgtgtgcatacatttgaactttgaatttagctttcaaaagaacacatagaattctctatgatttgatggggtattaatttactaccccttttcctaggaattaagtgggataatttgtaaaagtgctaaagactttaaagtactatataaatattattaaaattatgtcgtttccagacctgctttcatttggaatctattagttacaaaatacagatggataaaatctatttttagtagttggaatattagaacatcattaccaaacattagaaaatagaattaaagaaaatccgtaattcctccttcaacacaattttatcactttttaatattaatcatgtagtcttttaaaatgcctattacgaatttatagtatttgtgtagttctgtatacctttaaaaaactaatgtatagttaatggctgggtgtggtggctcatgtctgtgatcccagcactttgggaagctaagctcggaggattagtttaggccaggagtctgagaccagcctggttaacatagcaagaccctgtttctatgccaaaaataaataaataaatacaagaaaaatgtaaagtgtagttaaaacgcataagtatgcaaagcagacactgagatatgtataagtagtaaaaaatgaaatcatgtcattcctgtttataccatattttttctattttatagatattgctgttcttttttttttttcttccctagagacagagtctcgcgctgatgcccaggctggaatgcagtggtgcgatcttggctcactgcagcccctgccttctgggtttaagcgatttttgtgcctcagcctccgagtagctgggactacaggcacttgccaccaggcccttctcatttttgtatttttagtagagacggggtttcaccatgttggccaggctggcctcgaactctagacctcaagtgatcctccttcagcctcccaaagttttgggattacaggcatgagccaccatgccgagctttgatattgctgttctttatttcaagctttatagttaagttactgatctgtgtcttcactagaaagacaatgttaagagggaagtaactttattcttagtcttcatgttttaggacctagcacagtgtctcactcacattaggattttataatatgtgttattaagactacagaattgttaaatacattgcttaggaagtggactggacttctggatacatgttatgcacccgttttcattcagcagatattggcattagtgaagcagccttcatggtactggctgtcagctatattatggaaatagtctcattacatgaaactgaatgtcataatgatttttgttaaaattggaatattgctgtagtaaaattagaaagtgacctcctccaattagtacagcatattatcagaaccctcaaatgtgtattataaaggttaggtattctaatctagcataacggagaggacagttttgttgacagctttggagatggattggcactgatgcttataaattggttcggaaatcagaatttaattttggcaagaatttataaaatttaagaatttatttttttaaaatatttatttatttatttatttatttttttgagacggagtctcgctctgtcaccccggctggagtgcagtggtgctatctcggctcactgccagctccgcctcccaggttcatgccgttcttctgcctcagcctcccgagtagctgggactacaagcacctgccaccatgcctggctaatttttttttttttttttgtatttttggtagagacggggtttcaccatgttagccaggatggtctcaatctcctgacctcgtgattcacctgccttggcctcccaaagtgctgggattacaggcgtgagccaccgcgcccggcccaaaatttaagaatttataaattttcttggtagcccataaaattcacttgtatccatccagtagcagaaatctcttagtaactccatgatctctaggagcagtaggccatttagtagggaggagccctttttctttaatgtagagcaagctttggcatagtggttctcagctaggggcagtggcggatgttttgggatatcttatgggaaaagggtgagttaatgacaatgggtttaagatgaaatgcagggagtgggacagatgtatatcaaaagtgaggtggtggctgtgtgagtgtgaaagtgatgtaggcaggttgaaagtcatactctattactgtctgtacttgtgtcttattagaaattgtataaaagattcaatataacccacaggttcagaaaaaaagaataaaaaaagattgtataaaagaatttcaaatcagcatagaaatcttacgtacacatttcaattttttgatttttaaattgtatttcataagttagtggtataaatttaatacattcaatagattttaatcattcgtgttttcagccctttgtatataatttataaaagagctacttagacttctgagccagcttgtgttatttttacttcttagagactagctgatttcaaaaagtgggtatgttgaaataggcttttaattgtagacactccctcctatcttgaactttaacttgtaactgttaggtgtagctgtttgcttctagaagatgatttgactgatttctagtgaaaaaataggtactggcttaagtttgaattcacattgtagaagtagcttttcaaagagtgcattaaaggcacttaaatatattgctggaatatagggcatgatagttcctggaagcctacctttgtcatacaggagaacagttttgttagtggtatttagtgcctgaagatctgagtgaatatgtattatcaaataaaggaagcattggtcaacacagtatgatgcctatgacatgtagttgatgactcagtaggaaggaaatatatttttatgttggggaaaaatgctgttggtacctcattttgaaattatgcaagtgaaaagtctgttgaaaacaagttgattacaagtaattttttttgaggaatgcaaatatgccatgcttagcttactcttatatcctctcatttattgtaattgagtttttctgtaaataggaagatctgtaatatcaaaacattattgcagattttcctctcccattcttaagattgtatagccaactttttgggtatagataggaaaaaacttgcttgttatatgatatttctgtctcacaccaaggtgatgatggtgacccactatcagagagttattctttgttttttctcctgatgttaatgaaattttcattccgtatttttttgcacaattctttaatttagtagattggaacagaagattgtaagttttgggttcaaggattgggaaggaagcttttgcttagaagggtacttgggaagtaagatgctacctacccatggaatatggaaaaaaatcacaatggctggcatttgttggggtacttaatgccaggcactgttgttagatcattttgtgtatcatatattaacttggtcttcacagcatctctatgagatacgtgttgttattttcattttataaatgagagaggaggatcagggagggttacttatccagagtcaggaaagtcaaatagtagttatcagttgagggaagccagatcttgcctttacatgtaggctaattttacccttaaagcgtaatttaggttctttgtacttacagtatttgaagaatttgccttttagtcagtcaggttctttatagaaggtattttattttttggatgtgaaaaaatgtttacatttgaggggagaaaagcagcttacagaaagaacacgcataaaaccatttcagttttgtcatagataaatatatatgtaatcatttttagagaacagataccaattttctgggtagtaagattcataatgcacttctgtgattaggaaaaataattttttaaaaggcggattggtaaataccagtatcctggcgactttgagaaaaattaagggaaataaaaatactgttctcaaattgtaaaaagggagagctctcctaagctctcctgtgacaaggaggccaagttatgttttttctatttcttagaacctgctggtcatttttctgccactcttgcatgtgattttttggtattacttagtcttcccccttaaaaaaaaactagagatggggtgttactgtgttgcccaggctggtcttgaactcccgagctaaagtgatcctcctaaacaatcactttcgacttcccaaagtgctaggattacataaaatttgataaaggatctgttttctctatctcgtagatccaatctagttattcttctggcagttttacatagaggcttttttcgatatactgtgtttctttttttaattcttgaaaatttttatactttctaaaagattgcaggtatgctagtagttaatatttgtatgcctttcacctgaatttatgaatggttacctttaccacatttactctctttttaataatatattatttttttccctctgtttcatttgaaaataagttgtactctaaatacttcagtatgcttgcatttcataaaagtaaggacattctgctacataactaaggagatttttttcttaagtgtggagatgttcaaatttcccatggggcttataagtattaggtgccatgtgactgtagtatatgctttgtagtatatgcttttcagatttcccatggggcttataagtattaagtaccatgtgactgtaatatatgctagctttttggcaactaaaactgagaacaagaaagttaaatgctgttggtgcgcttttctgtgtaggtgaaataaagtaacagaagagaaaggagaagacgttgactttgcagagtaactatcttgtagggtggagctgtttttatgtaggaataatagcacaataacatagccttgaggttactgcatcattatggcctcttctggtgaagatgttaataaggataagcctggcttaacaagaacatgttagagtaggaggaaaattaatcatccatcaaatagaaagatatttagcaagatataattacctagaaactgtccttagtggaagctgtcattttccattgatgtcagattagtaacattttattgtcctctaggttaaatgtattttattttcatcattgtcaggtagcatgtatttctccactgttaaagtctttatgtgaaaatgccttttgtaagtatgtataaaaccatttcagttttttcatagataaatatatatgtaatcattttagagaacagataccaacttgctgggtagtaagattcataacgcacttctgtgattaggaaaaataaatttttaaaaggcagattagtaaataccagttgaccctctgtgtctgtgaattttgtattcatggattaaaccaaccacgaatgaaaaaattcaaaaaatgaaattgagtctgtacttaacatgtacagacttttttcttgttattattccctacacaacacagtacaacaactatttatataggatttacattgtattgtgtattataagtagtctagagattatttaaaatatacatgggtatgtgcataggttgtatgcaaataccgcgtcattttgtcagggatttgagcatcaatggatttggatatctgtgggaagtccttgaaccaaccccccagggataccaagggacaattttattttattctttatcaggagggataaaattaggaattaagattggcattctttgagtccttacttgttgttcgttttgtcctgcgtaggtaatatatctaatagtgatgaaagaacctggactgggagagtctagcaagtagtaaggatcaggatagagtaggtgataaggaatcggagtaaacgattaggcagcttggaactagggaatcaggaagatctataacaaggagagattcccagatacaaaggtgagtgggtcagaggccaagctgtgttcagatagagatgggtgaatagttaacatgtttcagtgagatttgatgataccacatgctctatctatactttctgagctcttgactgattgctaaagtttagaaataaatctcagttgataggtccagtctctgcatgtgggaacaggcaattttgtgatgtctgactgaggtagtaagcagtacaagggttgaagattagtcagggctcctgtggagtaaaccatgcccatttcaatcactagctgtggaaatcaagggtatatgtatatgtatatttttctgtctataagaagtatattcttctttagtattgcattgcttgttttccccatcttagaggtagacgtcagtttagtttttgaaaggtttttgccatgtgctgtattttgataattttttttcttttcagttttttttttttttaattttgagacagggtctcactttgtcacccaggctgcattgcagtggcacgatcttggctcactgcggcctctacttcccaggttcaagcgatcctcccacctcaaccccccaagtagctgggatgacaggtgcatgccaccgtgcccggctgatttttgtatttgttgtagagatggcgttttgccatcttgcccaggctgtcttttcagttttttgtcatatcagaaatatggtgacttaccttgtttatgatgaaggtaattcgactcatcgtagattaacatgaaatcattgaaatcaaagttgagttcttggcactgcctcctgtttgctatgtgacactgggtttgttacatatcactcaaacctcagttttctttaaaatgggctaatagttctcacttgattgggtggtttaaatgaaaaaaatgtagagcagtacagagcctggcagatagcaagtgcttgatacattttaattatcatgacatccaatttataagcattattgtttaatttagttaaacaagaaattgatgtaatcaggatattgttctgtacatggtaagatttcagggtacatttaagaaattaggatacttttaaaaataaaataggatatatagtttgggatttttaatttttcccctttaaatatgtgaaatgtgaaacttaaaaaatcatttaaaaatgtttgttagccagattttaatgtgaatttgaatatattggatttctaaaacaagaatgagaagcaacagccttagtgtaatattatttttatatatatatatataatgtaatgaaaaactaaagatattctattaaagtcagggacaaagtgaacatgcctacacttgttattcagcatggtttggtactcctagttagtgtagtaagttaaaaaacagataaaattataaatagatgaataaaagatttaaatatgcaaagcagaaccaataaaaggccaagaaagaaaataaagaatatttttggaattttgcctgcaaaatttaggggctcatgaatcccctatagaggttatgcagtttctccctcagtatctatggggattggttccatgaatgctcaagtcccttatataaaaaggtatactatttgcatataacctgtgcacatccttccctgtactttatttttgttttaaagggttaaacaataaggcctttatctgcacaaatcagggtagaatgaggcaggcagttccaggattggctgattcggaaactggctagacaaatccatctcagctaccattgtccacaaaaaagggggacctctggaaatccacagcagaccccaacccaggtcttttgggcaggagctgggtcatttccacactgaaaccactctgagggaggggatgaagaaccaccaggttttgttcactcacctagttgtaggtaatctctacattgtggatagatggagcagttcaacttctggctgacagctcacattcagaggtcactgtcagctcttctcttttatgatcatgctattttgaacaatgagacaacatctgccatgcactcttaaggcctctgtccagtgtgaactctaatgcctaatgaggttaggccttgactgtatgcttttttacatccgctacacttctacatttataaggcctttctctgtgtgaactttcatgtgccaagcaaggtggaagtttctgcattcccatatttcctgcatacataaggccttgttccatcacgaattctcttatatgctgtaagataggaattgtggctgaagaattttccacatttacaacacttagaagtctcttttccagtgtgaactttctggtgctcaacaaatgtgtctttatagataaaaagacttgtcacatgatctgcactcataaggcctttctccactatgaattctctgctgctgaacaagataggatcttctaataaaggatttatcacattaagctcactctttttttttttttttttgagatggagtcttgctctgttgcccatgctggagtgcaacagcaagatctcggctcactgcaacctccgccttcctgggttcaagtgattttcctgcctcagccacccaagtagctgggactacaggtgtgtaccaccatgcctggctaatttttgtatttttagtagagacggggtttcaccatgttggtcaggctggtctcgaacccctgacctcaggtgatctgccctcctcaacctcccaaagtgctggaattacaggcatgagccaccatgcctggctttaagctcattctttgtatgacctctttaaagtatgagggttggaggtggagccaaataatttcccgcaatcactgcatttataaggtatttctttgctgtgaattcttctttgtactgtaaagtaggagttgtgactaaaggttttctccacattcaccacactcctaaggctttactccgtcatggattttctgttgctgaacaagtttatctttgcagttgaaggctttcccacatcactgcacttgcagcccctttgtccagtgtgaaaggcctccctactctcagtactttggtgtggcttcttccccattgggaggggcctggtgcttgaaaacttcaaagctattcaagaagtattttccacccttcctgctagtgaaaaccttctttgacatgtaggatctgcagatcttcacaaacaccaggctcttttccttctagaagatttctgtctgctgcctctgaatctggtctaggttacagtgaaccagaagtctccaccccatgactcacatgtgtgtggttgctattcagagaatgttccccttgtccagctagatggaaaaacgtctttcaagaccaggccgcacatgtcatggggtgggctttctgacctgccttaggaattctcacctgtgacactcttaaagaaacaccctgcttggaaggtgcatgttcatcctccactccataccagttaccttgggtggggtcacctcagggtgcttgttgccttctgagcctcactgcaaaatgccctctcatacttgaattttaatttttttatttttttgagacagggtctcactctctcactcaggctggagtgcagtggtgtgaatacggctaaccccagcctcgacttcgtgggctcaggtgattctcccacctcagcctcttgagcagctgggacaacaagtgtgtgccaccacacctggctagttttttgtattttttttgttgttgttgagacggggctttgctatgttgcccaggctggtctctaattcctgggtttaagcgatctgcccgcctcggccccccaaagtgttaggattacaggtgtgagccactgcacctggcccctcccatatactttaaaccatctccagatttcttataatacttaatataatgccagcacttcatttgtgtggattcagcatagtactcagtgtacagcaaattcaggttttgtcttttggaactttgtggattttttttccccttcagtattttgaatccacagttggttgaattccactaatgcagaacccatgaatacagaggactgactctatcagtgagggttttccagagagacagaaccaataggatatacatatgtacagatagatacatgagagaggatttattaggggaattggcttacacgattatacagactgaaaagtcccatgataggcagtctgcaagctggagaccctaggatgctggtagtatggctcattttagtcttaatgtctgggaaccagggaagctgatattttaactctgtctgaggctgaaggccgcagaggctggagtcctgatgtcccgaggggaaagagagggagaattttcttttcctccacctttttgtttttttcctggcctttagccaattggatggtgcctgcccacagtgcaggtggatcttccccagtcagcccaccactccacccgccagtcttcactggaagcaccctcagagacacatccagaaataatgctttaccagctctctaggtcttccttaatctagtcaagttgacacctaaaattaactaacacagaggtttgtggatttcaggttagtattcctcttgtagaggaaaaaaaggtgaattataaccaaaggcagatgaaactaagtgtttaagtgacttaccaaagatttgatacctgttctgtaacattttgtaggatgaaactaagtgtttaagtgacttaccaaagatttaatacctgttctgtaacattttgtaatacttcgcttattcaactctgctgttgtgtgaaagcagagatagaaaatatgtaaatgaatgagcatagcagtgttgtaaaaacaggtggccagctggaactggcctttgggtaacagtttgccaacccttcttctacgttatttggaaactttttctactcagtatattgcctgagacatcagttgaggtattttttgcttaaatggtagcacccatggtgtacctatccctattaatgtattgttaaatgcttacattaaagcaagtgtgtagaaataaggatatacaggttgagtatccttatttgaaatacttggaaccaaaagtgttttggatctttaaattttccgattttgggaatatttgcattatgcttacgatttcctaatgtgaaaatctaaagtgcttcaatgagtttttttttttgtttgtttgtttgttttgtttttgtttttgtttttgtttttttttacagagcctcgttctgttgcttacgctggagtacagtggcacggtcttggctcgccgcagcctccgcctcctgggttcaagcggttcttctgcctcagccttccaagtagctgggattacaggggtgtgccaccactcctggctaattttgtatttttactagagacggtgtttcgccatgttggccaggctgtctcaaactcctgacctcaagtgatccgcctgccttggcctcccaaagtgctgggattacaagcgtgagcccctgcgcctggctgagcttttcttttcagcatcatgttggagctcaaaaaattttagattttggaacattttggatttcagatttttggatactcaacctgtatagctgctggtagaagtcacggaatttctgaatgaagaaaggttacagtgcttctcaaacttgaatgtgcatacagatcactctggggtagtctggggtagagcctgagtcatttgtggggtcagtagatctgctgggagcctaggattctgcattgctaacactttccccggagatacctatgctgttagtcgctgaaaaacagtttgaattaacaagattctgtgttcagaaaattgtaaaatgctagatacggaaaaagatttaattggataaagacttaaacatccataaacacaatttccagtctcagtgatagtagttgaaagaacttgttagttgaacacatagtgagtagtaggcctccatattttcttttctttcttttttttaaaaaatagagacagggtctcgctatgttgcccaggctggtttcaaactcctgggctcaagcagttcttctgccttagcctcccaaagtgctgggattacatgtgtgagccactgcacatggctcatattttcttttattttagattcagtgttgaattggaccttctggtcttctaagaagttcttgaaaatggcttagttgctgttttctcaatggatattttgccttgatgttggtttcccccaatgttcttttaagacctgtggtcactggttgtcatttaatcttttatttccccatctcttactacttatgtcctattagcaaactacagttatgtaggaatattgaatcattacaggctgcttagtattggaagtaggtagaatgttaattcatttattttactgagaagataacttggaatattttgaattctctttttgatttgtctttgtttttgatcctggattttaaaaaattttgtaacttagggaaattttataacttttgtaactttataaattttatatcttagggaaaaagtaggaaggccagaaacccatatacctaccactttgctgcaacatttttcttttttcttttctttttttttaaaaaatagagatggaatctcgctatgttgcccaggctggtctcgaatgcctcaccttaagctgtcttctttggcctcccaaaatgctgggcttataggtgtgagccaccacacctggcctcaatatttttatttaaaaaaaaatctagtcagctttattgaggtatagtttacatacaataaaattcaacaattttttaagtgtacgaattcataaattttgagaagtatatttacttgtataactacctccataatcatagaacatttatatcaatccaaaaagctccctgggctatttgcagtcaactcaaaatactttctaatttccatttgatttcttctttgacccatgaactacttagaaatgtaaattcctaatatttggggattttctgcatatctgttattggcttaattctcctgtagtcagaaaacatactcttagattttagtcttttaaaatttgtggaaacgtgctttgtggcctaggattaaggtctatctttgtgactgttccatgtgcccttaaaaagaaatatattctatctatctagtcaagttctttgtgtttaagtttttaataatcttactgatttttttgtctgcttgttcagaaaggagtggtatgatttccaactctagttacagagtctgcttttttctgttctatcaactttttcttcacatactttgaagctttttttatgtacataaatacttaggcttgttgtgttttcttcttgaattaggaaatgtccctctttatccctcataattttttttgttttgttttgaagtttgttttttcagctattactgtagccactccagctttctttggattagggtttggatgttatatattttcccgtcctttttactttaactcatctttatttttgtgtctgttagcatatatttacattttccttttttaaaaaataacaaggctggcgtgtcatctcatgcctgtaatcccagaacttcgggaggccaagccagtaggattacttaataccaggtgtttgagaccagcctagacaacatagcgagtccccatttctacaaaaaataagaaagattagccaggctgggcgcggtggctcacacctgtaatcccagcactttgggaggccgaggtggttagatcacttgaggtcaggggtctgagaccaacctggccaacatggcaaaaccctgtctctgctaaaaatacaaaaattagctgggtgtggtggtgcatgcctgtaatcccagctactggggaggcttaggcaggagaatcacttgaacctgggaggcagaggttgcagtgagccgagattgcgccgttgcgctacggcctgggcaacgagcgaaacgctgtttttgggaaaaaaaaaaaaaaaaaaaaaaaaaaaaagattagtcaggcatggcatggtggtgcaccagtttccagttactcagaaggctaaggtgactgggttgcttgaagctaggaggttgagggtacaatgagctatgatcacgtcaccacactccagcctgggcaatgagtgagaccctgtctcttaaaaatcaaaaagcgaaatgacagcttttgccttttaattgttatgttagatcatttactttcccttctgcttgctcttccccttccccttcgtcttctccttttccctctcccctcccctcccctcccctcctctcccctccccttcggagatggagatctctctctgttgtccaggttggaatgcagtggccgttcacaaatgtgatcatagtgcattgcagccccaaacttgggctcaagcagtcctcccacctcactctcctgagtagctgggaccacaggtgcacactaatgtactcagctggatcatttacttttaatgtaattattcatatggctgagttttaaactgtcatctttctatttgttttccatctgttcatagttcttgtccccctcttttcttgcatttttcgggagtaatatactttttttttttttttttttttttttgggagactgaggtctcgctctgtcgcccaggctggagtgtagtggcgcgatctcggctcactgcaacctctgcctcctgcgtttaagcgattctcatgccttagcctcctgagtagctgggattacatgcacctgccaccatgccccattaatttttgtatttttagtagagatggggtttcaccatgttggccaggctggtctcgaactcctcgcttcaagtgatccacccgccttggcctctcaatataaacttttaaaaatgattcaattttatctctgctattggctttatgatgatatacctgttgtattttttagaggttgttcagtgtacaatatctataacttatcactgtatactttcaaataatattacttcacttcatatggagtatatgtacactgtgtttctcctctgttttctgttgtgctgttattgttacacattttaattctgtgtgtcataaattccacagtagattgtgtgtttaaaaaatgtattcgcttaactttgaaagagattaaaaatgagaaaataaatcctttttattttcttatatattcattatttctgtcacttttattatttgcatcagtgtaggtttccatctggtattattccttctatctgaaaaactttatcatttctattaatggaggctactagtgatgcattgtaagctttgaagcccagaagggcttcgtttcacctcctcttctcaccttcatttgtgaaagttattttcactggctatagaatcttaggttgatagagttctttttttcttgtagtactttaaatatgtggctgcattttcttctgacttaacatagagtgtgctgtcagttttatctttgttcctctgtttataaaatgtgtcttttttttctggctcctttagtgcttccctacccacagatgattttaagaatttttttttctccctagtttttagtcattagcttatgacatgcctttatgtggtttttgtttatttatttatatttttaattttaatttttatttttgagacagggtctcactttgttgctgaggctgttgtgatcatagctcactgcaaccttggactcctgggctcaagcgaacctcctgcctcagcctcctgaatagctgggattacaggtgtgcaataaaaagtattcctggctaatttttactttttttttttttttttggtagagacaaggtcttgctatattgcccagctgatcttgaacttcttggccttgaacagtcctcctgccttagcctcccaaagtgctgggactgcaggcatgcactaccatgcctaattttcttttattttttatattcatataataaatacgatttatttatttatttattttgtttgagacagggtcttgctctgttgcccaggctggagtgtggtggcacgatcatagcttactgcagctttgacttcctgggcttcaagcaatcctcctacctcagcctctcgagtagctgggactgtaggcatgtgccactgtgcccagctagtttttatatttagtagagacagggtttggtcatgttgcccaggctcgtcttgaactcctgggctcaagcaatccacccgccttggcctcccaaagtgttgggattataggtatgaaccaccgtgcccaggctctgtggctaatttcactccactagtaaggtgttatttttctgaggactgtagcaatgctccatacattacaaggtctttcttctctagatggtagaaatatgaacattttccagccctgtgtgagctttgaggattgttttgcttccttctactggtggttcattttttctgaggcgggagtttattttctcacatgcttagatcagtagtcagccaaacccttagggaacccccacttgaggtggctggagctctctctctgttcagcttcctcctttctgacactctggcacatagattctaaatacctgatctccctgaactcagaggttgtctcaattaagtggaaacttcaggctcttggtttcttctccctgtcatttggcctggagactgcttacaggcagtaagctgggccagttgtagtagatctcacttcatttgtttctcttgtcacatcttttatctagttttctaattgtttatggtggtaggctaaattcagtctctattactcctgaagtagctagtgatttaataatttgcatatttttttcttttttaccctgcctcccaccctagaatctgtctagtgtgagttatggacatcgtgtcattttacccttaaatatttaaaatgaacctcccaaaatttagaaccttctccttataataacaatgttgttgtactaaggaaaattaatatgaatttctttctttttttttttttgagacggagtcttgctctgttgcctaggctggagtgcaatggcacgatttcggctcactgtaacttctgcctcccgggttcaagcaattctcctgcctcagcctcccgagtggagacagggtttcaccatgttggccaggctggtcttgaactcctgaccttgggtgatccacctgcctcggcctcccatagtgctgggattacaggtgtgagccatcacgtctggccaatatgaatttcttaatataatctaagactgattctgctttgtctaggattgtttccaaatgtcgtttgttttcttctcaattggattctttttctattttccttttattgtttctttcatggtttttttctccagtgtgtttttacaatgttatgttcatggttgtgtgtctcttctctacccagttattctttttgctatgatataaagtgggtgagtttattttttattttttattttttgaggtggaggctcactgttgttgcccaggctggagagcagtggcgtgaccttggctcactgcaacctccgtctcccgggttcaagagattctcctgccttagtctcccaagtagctgggattacaggcgtcagtcaccacggcaggctaatttttttttgtatttttagtagagactatgggtttcactatggtttcaccactctgttggccaggctggtctcaaactcctgacctcaggtgatctacccacctcagcttcccaaattgttgggattacaggcatgagccaccacacccggcttgtgatttcttttttcttttctttctgcctctgagaccagtgtattttttttccgccttccaatcttagtttgaggggctgattattttgtgttttattcacgtttctgcagtcacggggctgtgatcatatataatttttttgagaattccaggactcccattctcttgagatttttaaataagtgaattgtgtggcatctgagggctaggggcaacatcagaagtccagtgtgccatgctttcctacattttcattaaaatattatttcattccttggctgcctgtttgaaagattatattattaggttatgaccagtgttgtatttagcacactgtcttgaaaaaagaaaaaaaaaatcctctgatttggctgggtatggtggctcacacctgtaatcccagcactttgggaggctgaggcaggaggatcgcttgagcccaggagtttgagaccagcctggtcaacacagtgagaccctgtctctacaagaaatacaaaagttagccaggcatagtggtgcgtgcctgtagcctgagctactgggaaggctgatgtaggagaatcacctgagccctggaggtcaaggctacagtgagccttgatagtgctactgcactccagcctgggcaacaaagtcagaccttgtctcaaaaaaaaaaaaaaaaaaaaaaagttctcaaatttgtagccttttcaatgtcagtttccatggtggtgtaaatactcccttcatggctgatttcaagctacaaacataatgttacagagcatgaagttgggaagggaactgacactcatgagcatgtatcagccaaattgcttatctttttttatttgatttcagttcttttcttttttttttttttgagatagggtctctgtcatctaggctggagtgcactggccgttatcatagctcactgtggccttgaactcttgggattaagtgatactccctcagcctcttgggtagcttggattacaggtgcatgccatcattcctggctagtttttttgtattatttatttatttatttttacttattattattttttgtgacagagttttgctcttcttgcccaggctgaagtgcagtggtgcgatcttggctcactgcaccctccaccttccgggttcaagtgattctcctgcctcagcctcttgagtagctggtgttatagatgcatgccatcacgccaggctaagttttgttatttttagtggagacgggggtttcaccatgttggccaggctggccttgaactcttgacctcaggtgatccactcgcctcggccttccaaagtgctgggattacaggcatgagccaccgtgcccggcctattatttacatatatatatttattatttcagacagagttttgctcttgtcacccaggctggattgcaatggtgcggttttggctcaccgtaaccttcgcctcccgggttcaaacgattctcctgcctcagcctcccgagtagctgggattacaggcacctgccaccatgcccagctattttttgtatttttagcagaggtggggtttcaccatgttggccaggctagtcttgaactcctgacctcaagcgattcacccccctcagcctcccaaagtgctgggactacaggtgtgaactaccacacccggccacctggctaatttttaattttttgtagagacaggggcctttctatgttgcctaggctggtcttgaactcctggactcaagtgatcctcccactctggcctctcaaagtattgggattacaggtgtgagctactgcatctgacctgatttcagttcttgaagtttgttctatgtgtgtgtggggtgggggcagaggggcaggtaggctgctttatcctctacccatggcccccttatttccctcttcattaagtattagggaatagaaattatgtaattcaatttcatacattatcttaatataagtttttttcccacagtactgagattacacaaatactgatatttaggcataattaagataaacattcataggtcttatatagaagatgataatgagatggacttggtaactgtgtgtcccggggaagtgtttttagctttcccaattaaaccctatgaatcatgttctatctcaattacaaagattcagaaaatcattactcaggtcttttgccagtgaaagtgaatagtatgttgcttttataaaatttgtgtgtgggacagagaaaagatgactttgtttaataactctcccagtagaatttcagctgtgtaaatcgttgagcttttgtcatgagtgcttcagaacagcaatagttattgttttaagttatcaaaagtgacagaatactttatctgaactgcgacttaaaaacttgactttttcctgatttaagcagcagagacagaaataaaaaccagcttgacgcctttggtgccgaaaaaggagtggaatccacagttctgcaaagccaagcttgtgctatggcaactcagaccacttaaatccaattcagtaatccagtggaaattttcaaaatgaaagaaattattcaaaagttctcattcttccccattattgatttcttcttttttgctaaactcaattatactacatttataagtatgtttaaaggatacagaagatgcattggtatatttgattccattatttagtcttgatttttaaaagttccatgctaggccgggcgtggtggctcatgcctgtaatcccagcactttgggaggctgaggtgggcggatcacgaggtcaggagatcgagactatcctgactaacatggtgaaaccccgtctctactaaaaatacaaaaaattagccgggcgtggtggcaggtgcctgtagtctccagttactcgggaggctgaggcgggagaatggcgtgaactcaggaagtggagcttgcggtgagccgagattgtgccattgaactgcagtctgggtgacagagcgagactctgtctcaaaaaaaaaaaaaataaaataaaataaaataaaataaaataaaataaaagtttcatgctagtgggttttattatctcttagacattggcttcactgaaatttctttgctacttgtgaagatagttttggactcattcttctcacctctcttgggaggagtgtgttcaagaggagaaggaagtaactcaatagtagtttaagttgaattgtccttttatgccgctctttgtgctcgtaagcattttgcatgcatttaaggtaggcattgttgtctccattttacagattaaaaaaccacctcctgagatttaaaaaagttaaataattacttagctcatgtggttatggctaggaagtgtcagaattcaacccagttttgttttttcttcctgaattcttggcttcagtgtgtgtatattggtctgaaaggcaaagtgtgggagaaggaagaaaaggaggaagggggaagagatgatgatgatggataatttattgaaccttgcctctttggtaggctctctaatattaattgtcacacatggtttaaatcatttaatctgtgagtcttaagagagagctactctagtttcttcattttatggacaggagactgaacctgagtagttttctattcgatctgggaaacaactaatgattgaaggtagtggtattcaaacccagatcatttttttttattctagtaaaaaatgcttaaggtaaaatgtactgtcttaaccacttctaagtatacacttcagtagtgttaagtatattcacattgttgtctaacaaatcttagaacttgaacccagataatctgacatcagagtttatgcccttaaccacatagtgcataaacagaaaatttagtgttggatcacagaatttagtgttggataatagatgaaccatttttagacaacttgttttataaaagaggacaatttagttaaaaattttacttgatttgtcaaagaatcacttttttttttcttctcttgaagatggagaaataaggattaaatttactttcctgcatgaaaggaaacaaggaaaccaggaaaaatacagaaagacaatttttttttttctttgagacggaatttcactttcgttgcccaggctggagtgcaatggcatgatctcggctcactacaacctctgcctcctgggttcaagtgattctcctgcctcagcctcctgagtagctaggtttatatgcagccaccaccacacccagctagtttttgtatttttagtagagatagggtttcaccatgttggtcaggctggtctcgaactcctgaccttaggcgatccacctgcctcggcctcccaaagtgctcggattacaggcgtgagccaccacgcccagcgaaacaatggtttttaaggcattggtcatcaggtagtgaaggaccctgagaggggaaacagtaaggttggcccttcgattgtgccagctttctgccttgagagatttatgggttgtggtactatgagagggaacctaggtagagtccagggaacttcctcagttgaagagatgaagctgagggtcaggggagaccaaagtggctggagttcacagacagaatatcagggtgaagagagagctgcacagaggatccctgagatctgcagaggcttccactgtagtgttcagcagagctctaatcagcccatatgtggaaactacctgaggctaaagaatcatcccaaaagattagattgaacggtacctggtgctcagatagggctataagtagtgccttttcttaccaggtagactggaaaaactcagttcatggagcattgggtagactactgagataggtcttgcctcagtagtgggaaataattagccccagactgagcactcattctacataaatttgtccagagaattgaagaagaggtaatacttctcaacacattttttttttaccccaataccaaaacttgacaaagatagtacaagaaaagaaaactgtaagccggtatataccctgaacacagaaaacaaaattctaaacaaaattacagtaaattgaatctgacaacatgaccaagtagggtttatctcagtaatgcaaggttggcttaacgttcaaaaatcagtaaaatttaattcaccatattaatacattaaaaagaaaaaatatgatcatcttaatagctgcagaaagagcaggtacagaaataagcatttgttcccgatagttttttaactttttatttatttttatactttttatttatttttattttattttttatttttattagggatgaagtcttgctatgttgaccaggctggtctggaattcctggcctcaagcagtccttccatctcagcctcctaaaatgctgggattacaggagtgagcccctgcacctggtcctgatagtttttatcagcaaaatgtgaatagaagagaacttgctcagcttgataaaggacatctaaaacaaacctatggctaacatccaaacttgtgtgtgcggttggaattaccctcacaataagttttaataatatatgtgttaatattaatgcagaattcataatagtgctgggattagggagaagttgtttcatacatattcatagatacttgaataatcgtgttagaactagaaggggtcttcaagatgatactaattcagaatgttgttttttttttataggtcagtatgggaatcctttaaataaatatatcagacattatgaaggattatcttacaatgtggattcattacaccaaaaacaccagcgtgccaaaagagcagtctcacatgaagaccaatttttacgtctagatttccatgcccatggaaggtaagtaaatttattgctgactgtgtctgaagttcctctatattcaatctaagttaaagaggagatttatatccttaattttccttctctaatgcaaggtcttcatttggaaattccatttccactggaatttggtatatgcattaaaaaatgacttattttaaaatggattgcccttttatattgttgaggaaacagtcaaatttaaatgtttttgaatttatgaatcagatcttacattagtaaaagatatgtctttaaagaagattctgtgtacatagtttctgactactttttatatgttttatggtcaatatatctatctactggtgccagcagtgaaggtaactacttatatgccattgaatacatcatttactcagttttaccagttctaaaatgacagctggtagacagattacctgctgttttgttcagttctcaaacagaattgttaagtgataaaggggagtcaagggagagaggttaaaaaaaatcacttattgagtacctgttgtgttctagatgctttatatgcattttcttgtttaatcttctcaacatccagacagaggtaaatagctttttatatccgaggaaactaaggctcagagaagttaaataacttacacagcactgattttaccgagacctggctgaacaccccttattttttctctatctgttagggacacttacagaatcttggggatctttgtgaagccctctctgtcttatgtgtaattattaaatctattccttttgtactttttgtactgatgtaaccctgattgattactgtagtgttcacttcctaataagtttccccgcttctgctctgtttatcaataaagctattctactgctatgagatgacttttctctaaatacttcttttttcatgtcagcttattgatctaaagtcttcaattaatgattgttagccagattttcttaatttgacttttaagtttctctgtaaattaatcctagtctattattctaaacttactttgttttacttgccagcatcaagtgtgtatttcacccagaatgatcttctagtctgtgaatataccatgtaaactttgttctgtgtcatttgtcctaaatcctgatcatcttttaatgtacaattcaacttctgcctcttagacactttactttttaattccgtctaaactttaaagttacttatctgaatcattggcatcatttgtgccctcttcctttttgtgggtacttcttattaatttttccataaccgtgttttctgttcctcacagcaggcatcctggctactatttggtattatccattatattgcacatatggtacacgtgcttaaacattttaatggatgaaaaatcagataattaggaatgctgtgaaacttaaagtattttgtacatgaaaataaatgtgtcacttaaattaatgtattttccgtattacaaaagtaatgattattgttgaaaaaattacttttaagttataaaatcttctttatctgaaggagggaaaaagatttatttcagggtcttttcttctagataaacattttagtgtatttatgtactatgaaattacaagcaatcattagtcttactgtttttaatgagcatctcaaaatatacttagtattattaattatattaatctataccaaatatggtttgactgccaaaaggaaaagattttagctgcttttggcttaaatatctattcctattatataattagatttttgttagctgtgtcatgtaattcatattgaataaatggcaaaactaaatccctagctcctttgtgtgtgtgtcagtgagtgagagagagcagggaaagcgagagagtttgcatgagtgagtgggctgccatgtagttgtccaaaaaatgtttactgactgctagtgaaaagttacttagtatagactgtgggtgatagaaacataaatcaaacatagatctcataggagcagttagatgtgcctgttattgtataaggcacatgtgatgtgttacattacagataaaatgctatagatattcaaaggagggagaacttcttgctgaggcactaaaaaaggacctgaaaccaggaaatctcatgtaatgtggtctcatttatacaggtcattttagggtactttttttttttttttgagacagagtcttgctctgttgcctgggctggagtgtaatgatcctctcttggcttattgcaacctctgggttcaagtgattctcctgcctcagtctcccaagtagctgggactacaggtgtgcgccaccatgcccggctaatttttgtatttttagtagagacggggtttcaccatgttggccaggctggtctcgaactcctgatttcaagtgatccgctcacctcggtctcccaaagtgctgggattacaggcatgagccaccatacctggcccattttagggtgcttttaacacaaatctgcttaattaactatacaaacttactgtattttctgtaattcatccaatttcagatattttagtttattttcccaatttttatatattcactctgtctcagaatttctgccctaaaccgtggtcattttaattaccttttaaaatactttacttaaaaatgtaaagggctgatgatcttgttcctccctttccttgaaaataggcctacaaaatgactggagtagtataattacagatttcctgctaggtctttcttcctcttctatcgtctaacaaatattagtcttggtacactgtaactcctcctaacaggatttctatctgtatataaattatttattatttgttaataacattttgtattttatttttataaatttttattttttgtatttaatacgaatatgttttatttttatttttaggtagattggctcaacacataataaatataactttgaaatgactttgagttagagttacttgtagcccagcctataagatgtgtactatcttgtagcccagcctataaaattgtactgtcttatacattgtggctagaattgttttctgtatttcaccctttaaaaaatatcaagtagagtttattttttttattcacataataggctttagtcccctagaatctgatcagtatactttaacacataatagaatatattaaatactgtgcagttaacttagacataccaagaagaatatacttggaaggggttttgcttatacagttgtgacttacatttctgggtagtagcacagcttctgtgtgtgtgtgtgtgtgtgtgtgtgtgtgtgtgtatgtgtatgtataagtattaaagtaattttttgtggtttttatgtctaagcacatgaacacactttcagcatggcttccaagttttctgattaacagagtatattatatgccatgtttacagatgttactgttaaatgaagaaacgtttatatttttccaaaccaaaagtccattcttaagaattctatggccaggtgcggtggctcatgcctggaatcccagcactttgggaggctgaggcgggtggatcacgaggtcaagagatcgaggccatcatggccaacatggtgtaaccccgtctctactaaaaatacaaacaattagctgggcatgcgcctgtagtcccagctactcaagaggctgaggcatgacaatcgcttgaaccagggacacagaggttgcagtgagccgagatcacgccactgcagtccagcctggcgacagagcaagacttcatctcagaaaaaaaaaaaaaagaaaagaattctatgaaaagctgttgctcttgaaataaagcttaaagttgtttgaaaataaaagtaccatttgagtcagtgccatagtcgttaaggaaacaactccagtaatacttactagaagattaaactgttttgataatagatattagggtaaaatacatctcttagcttggctgagaaattaagaatcagttttctgagtttcagaaatcactgaataagttctgatgaattggattgctcacttagcaatgctgtatatatgtcagttatggcatttattttattataactttatttacatgcatatgtcctctactccttgtgaacttgaagtgcagagtgtgaatcttactcatctttttgatgtcgatgatggtcattttagttatattgagtgagtgaattgctggacatggtggctcatgtctgtaatcccagcactttgggaggctgaggtgaaaggatcacttgagcccagcagtttgagaccagtctgggcaacatggcaagatcctgactctacagaaagattagaagaaacttagcaaagtgtggtggtgcatgcctatagtcccagctacttgggaggctgaggtgggaggatcacttgagtctaggaaggttgaggctgccgtgagccatgattgtgccactgcgctccagcttgggcgacaagagtgagaccctgtctcaacaaacaaaacaccaccaacaaaacatttaagtacatagatactaggaaacagattttcttcttaaatattttatactctatgtcatcctcatcggtaattgttcttaatgactaagtagtaagcagatttgtcatattgtgggatgcaggatttttgttcgaaatttgttttctctcagtcctcgtgttcatgtgaaagtgcgtgatgtatcagggactgtcttgtaatttcccttctcttgttcttagataccatgttgtcctgccgttcctgtcttgttcttttttttgaggcggagtctcgctgtgtcacccaggctggagtgcagtggggggaacttggcttactgcaagctccctctcctgggttcatgccattgtcctgcctcagcctcctgagtagctgggactagaggcgcccaccaccgctcccggctaatttttttttttggtattttttagtagagacggggcttcaccatgtgagccaggatggtcttgatctcctgacctcatgatccgcccaccttggcctcccaaagtgctgggattacaggtgtgagccaccacgtctggccttttttttttttttgaaacagggccgggctctgttgcccaggctagggtagagtggtgagatcttatttcactgaaactcttgcctcctggactcaagccatcctctcacctcagcctcctgagtagctgggactacaggcacacaccaccatgcctagctaattttcatatttttttttggtagaaatggggttttgccatgttgcccaggttcccttggcctcccaaagctgggattacaggtgtgagccaccgtgcctggccattcctatcttaaccatcatgtactttagcatactataatttccagaaatttttcttacgtggtttttgtaaaatgcaggttaatattgtttatgttttgattctatataacatgttggaatatctctgtatcacctatattgatataggtgaaaataagaataaatatctgtcttagatttaacaaaggttattaatatagcatgagaaaaacttcattgcaagattgatcgcttttatagcttttagtatgattcttacgttgtatgtatatatatattttaacttatgccttttgtttgcacctgtcattgaagagaagcataagggatcactccactctttcttcttcctaatagagcttgtaggaattttctgaaacaccgtttcaaagtgataattaaaaaaataagtaaaatgaagtatctgagactcttacttaaaacgattgtctgttatgatatagtttatctttttggtaggaagtatatatacactattatattgaattatttttgtggttgtatgtatatgtacgtttaaaccttttcattcttcatatcttgttttccaaattatgtactttggggtaggcatcttgtctttattttctggtcttctcgccactttgctaacttgactgtctttgatagagttggtagcttacagccaccaactttgcatttgagtaggaagccacttagtaaagaattttgtgattttatatatgtattggagtagtcataaactggatggagaaaggagtagtgtggttaattcagactaattgactttccttctgacttgacatgaaatctagagatttcttctgagcctcagtttcctcattagtaaaaccttgaagtttagacaagataatatttaagctcctttatgctttaaaattctacaaaatatattagtatactaagtttaaaacattaaaacactagtcagtaataaaccatatttttctgcctgtgtatttatttgggtacctcagtccatacatcagaaatgatttttatgtaatatgtgatttgtatataatatagaagaaaccaaaaactttccttaagtgcaatataattgtttggagaatatacaactttatttttttctgaattgacaaggtaattcttcctgtagccttaagagtaaatttccaaactgtttaaaacaaatgattagacatttggttggaagttttctttgtggtttgggatttgagttctccctactcctgaaatatgaaggtttcaagaatatggcccaggtaacctgtaaaaggcataaatattcccttcactggttcttgcctggagttgggttagtctggagatgtctgtgacttaatctctgttatatcatgagtcaggtagcagaaatctagggcacttttaaatctgtagacaaaccagcagactttgagaagcagaggtaagaatctagggaacacaaatgaatgcctgatcatagagaagagctagggaataaatttgaatggtgtaaaaatactattgttatagatgtttaaaaacaaaaatttaaaaaatactgatggtagttaaatctcttccaacaaaatttgagcaaaaattcccaaaggaaaataatatttatttagtacctacttcgtgtcaggtatagtgcaacatacgttagttaaagtacattttacattgctttttatctcagtattggattttctaggatatggtattctttattcttgcctgattccgctttatacggaaattaaaatcccaagaaagctgtttgtaaagaaatctgaagggataatggctacttgaattacttactgaagcataaggaaaaggaaaagctgatctgtgttcatgttatttttgtatgactaaaagtaactaatattgctgacaaaagggtatgtgaattttatatgactaaaggttattaggagctgatcattgctttgagtttagtgtcttagatataattttaatatgaaatatcaattttattttccacatttttttccaggctggggtgtagtggtgtgatcttggctcacgcaacctctgcctcctgggtttaagtgattctccagcctcagcctcccgagtagctgggactataggcgtgcaccaccacacccagctaaatttttgtatttttagtagagatggggtttcaccatgttggccgggatggtctcgatctcctaacatgatccgcctgccttggcctcctagagtgctgggattacaggcgtgagccactgcacctggcctattttacatgtttttaagcactaaccaggccttacctggaagagagggaatgagggtttttgttgttgttgttgttttaaaatataaactcaactttctccctcctcctttgaaaagggtatggaagtaagagcgtgaaagtatttttctggctgtttttaattctttggagaaattgtttcctctaaaaggtaatctaaaacaggcttatatctgatggcttatttagtggtgtattttttattttttatttattttttgaggtggagtcttgctctgtcacccaggctggagtgcagtggtgcaatcttgtctcactgcaacctctgccacctgggttcacgcaattctcctgcctcagcctacctagtagctggcattacaggtgtgcaccacgacacctggctaatttttgtatttttagtagagatgggggtttcactatgttggccaggctggtctcgaactcctgacctcagatgatctgcccaccttggcctcccaaagttctgggattacaggcgtgagtcaccgtgcctggccagtggtgtagtttttaatgccagagtttctagagttggtgacctagacagtgaatgtcagaaattacgtatatgcctagtagaaaagcctatatattgtttttcttaattatgttatatttcatgctaaaatgtttcatgttcagttggatcttttgtgagataagtaccctagctcagattttatctagattcatagtcaaccttggatttttctgttgttcaagtggttaagctccttataaggttgttgtggcgttttcttaaaggtgcagcaaggattttatgtgactaaaggttcttttaatgtttatcctatttcattatacctgaaaatcttttatagtaactgtgttgaatatgtttagtttattggtttgaatatgcttgtttggtgtgttttattaagcatcagggaaaccttgtattatagtgtaatagctttaaactgattaaaaattctttggtcatcatatatacagttccttttagatatagcttctgaatacttattcttcagttaattgtattataacctgtttaatttcttaaagtcattctgtacctctgcaggttgacatacatttttgatacttgtatgcaggaataaagttgttaatttgtgtgcatctctgaaatctgaaattataatcactttgcactagtaagtttccaaaatagtctatattgaaccaacaagtcaaatataaacacaaggtctagcaaatcaagaatcttagttatcatggtgtgggacagatagttgtgttatatgccagtatcaattgccaggttggtattttattatttatttaggatggaatgaatgacagggtcttgctttgttgctcaggctggcctcaaacttctgagctcaagcagtcctcccacttcagcctcctgagtagctgggaccatagatgtgtgccattatgctcggctaatttttaattttttttgtagatagggcttcttgctgtgttgcccgggccggtctcgaactcttgggctcaagctatcctcctacctcagcctcccagaatgctgggattactggtgtgagccaccgggtgtggcctcaattattttttttttatctgtcaccaggaagatgttcagcattttgccatcctgggggctcccttatatatcctaagcaaggaattatagtttgatgtgacggaaagactgtttcagatttaaactctgattttgtgtgctcttggtcaagtccacttcatcagtttgttaaattagtaaatttaggtgattgttattttatacagttggtttacattagatacctgaacagtggaagtctccctctattcttaaatcctgtcattgttttattgttttgtttttgtttttgtttttttttgagaccgagtctcgctctgttgcccaggctggagtacagtggcgcgatcttcactcattgcaacctccacctcctgggttccagtgatccttgtgcctcagcctcctgagtagctgggatcataggtgctcaccaccacgcctggctaatttccatatttttagtagagatggcatttcaccatattggccaggctggtcttgaattcctgacctcaagtgatccacctgcctcgggctcccaaagtgctaggattacaggtgtgagccactgcaccaggcccttaatgttttatacatagtagtttacttgccaattatttaattacatagttgtgcgaggttggaaagtgtttatagaaaacttttttcttttcagtagataaatcaacttattctgtaatcatgtataataggtgtaaccatgtgttctgtaattatgccatcatgacaggttctttccattggccctcctttacgtgagactcacgttgttgttctgtttgtcttcttacataggatgaagttactcattttaagttttagttttacttttatcttccttaggaactcttgtagatttgtgtttatgtatttttgcttattttgaggtaattcatttacttcagggccatcggttaagcctggaactgtgttttccttttcctttttcttgttcttgtttttttttttttagatggagtctcgctctgctgaccaagctggagtgcagtagcgtgatctcagctcactgcagcctccacctcccaggttcaagtgattctcctgcctcagcctcctgagcagctgggattacaggggcacgccaccacgcccggctaatttttgcatttttagtagagatgggggtttccccttgttccccaggctggtctcgaactcctgacctcaggtgatctactggccttagcctctcagagtgctgggattacaggcgtgagctactgtgcctggctgagctttttttcccccccccaaagtttatagccctagaatttcttttcttttctttttctttttatcttttcttttcttttttttttttttttgagatggagtctcactctgtcacccaggctggagtgcaatggcgcgatctcagctcactgcaacctctgtgtcctgggttcaagcgattctcctgcctcagcctcctgagtagctgggattacatatgcacgccaccatgcctggctaatttatgtatttttagtagaggtggggtttccccatgttggccaggctggtctcaaactcttgacctcgtgatccacctgccttggcctcccaaagttctggaattacaggcatgagccaccgtacctggccgagccctagaatttctgtggaagatgcctggtggggtgtacattggctgactctctaccctttcccccttcctcctctgcagacctgttcctttcccttccagttcctctcctcttcccctcctcctctccttttcctttcccttccctatgataacttgaaaaaatgacttttctattttaaaaagtatactagtggaagataattggctcaaaataatatttgttgttaatattggcaacttatcttaaaaaataatttgaatggagactctctcaagcatcttaattaggaaggtgaaagttaagaggaaatgagtatctggaaacatcagaaatgccttagttaagtacagttactcctagtaaccactaacccaggcctgtcataggcctgcttcattttagatatgatagaactctattcatgaacacactgcttgtctctgggactcctggattactctgatagtacctcgaagcaaggattttgccctcaaatttcctctctgtattggcaacgtacttcattagttggggctttatgtcccattatgacttcagttaaaaggatgcaccctgtattttgttttcttctgagtattagaaccatactgtctttagctaaaatagcaaccccttgggaaaaggcaacttctttttagtctacagtagtccatccttgtttgcagaggataggttctagattccccaatgaatgcctgaaactgtggatggtactaaaccctaaatatattaaattttcctttacataaatacctatgataaaggtcagtttacaaattaggtacagtaagggattaacaacaataacaaataacaaaagagaacaattatgataactactgtaagttatgtgaatgtggtctctctcaaaatatgttactgtcctgtactcacctattttcagaccacagttgactgtggataactgaaacaatgtgggtaagaggggactactctatattctaactattctaacctatagaaagtatttctgtatattaagatgtaggaggtacataaccttcctgaaaacttatggaatgacatcctaacataatttattttgttgctctgcaccaaaggtggttctggtatgtctattatttgtctggtttggatgtaaaatgcttttctaaagcttgagaaagaaaaaccagctattactacgacgtggtaaaactgcatattcagagcactaagactagggactcagtatctgtttggtgcattttaaaaatttgctatcatttgttaaactgattttgtcctcctataacttcactccattctttacaattttactacttagccaatgccaaaaaaagaatcataatagaaccgctataatcaagatgagaaacataatacttactgattcataaaatcaatacagtggttaaatctgagggtaggaaaacattcccagtggaaataatgttctttatacaggacatcttacctcctcaaggaaatctacagtttatttttgatgacggtgtagtatattataaaataataaaaactaaacttgctgaaagaaacatagtagtggacagagtttagccatagtcttgaaagtggctcaagcattaaaaatcaaagagagttttttgtggtaatattgtaaagcacaattttcagtgaaagccaaattaggttataatttttatttctatatcttacttgcatttgttcagttttcaaagacttgctggagactaatgatgttactttaagactactacaacactccgcatgtgttagcttgactttttccatcatatgcttgagaggcattcttgatacagtagaaagagcaatatgcggcaaccaaatactagagttctactcctaattttagtcttacgaccttgagtcataccctttgattaaaatattcatcgtgtctcctttgtactgttactctgagggtaagatgcagtaatatatgtaaaagtgctctgaaaactgcaagcctctatgctgtatacatttaagaagaatgttgtaatctcatcattatcttcacataccatcttcccaaccaaatcccttgagactttaaccattatgaaacatggccacacaatttgattttataccccagctttttggaatgcagtgatttttaaaaatttatttttattgtagtaaaatgaaaagctaccattttaaccatttttaagtggtaaagagcaagatttttgccctgtggtttcctctctgtattgccaaagttcattggttggggctttatgtcccattatggcatcagttaaaagaatgcattaaatggcattaagtacatgcacaacgttgtgcaaccgtcaccatatccatcatcacaaacagaaagtatgtactcattaaacagtgactccccatttttctctccctccagtccctggcaaccaactattctactatctgtcccagtgagtttgctattctaggtacctcatatatgtggaatcatggattatttatgactgacttatttcacttactgtattagtccattctcacattgctagaaagaactacctgaggatgtgagggcaatctggctgcaacatttgtcaccccattaatctccagcgttcattcgactgatctggctggctagatgggtgtccccttcctccctcactgctccatgtgcatccctcctgaagctgcatgcttggtcgaagaggacgaccatcctcgatagaggaggactggtctttggtcaagggtatatgggtagctgtgctcccctgctagaacctccaaacaagctatcaagaactacctgagactgggtaatttataaagaaaagaagtttagttgcctcatggttctgcaggctgtacaggaggcttggctggggaggcctcaggaaatgtacagtcatagcagaaggagaaggggaagcagggacaatctcgtgagaactcactcgctatcagaagaacagcaagggggaaatctgcccccatgatccaatcacttcccaccaactcttcccccaatactgggaattgcagttcaacatgagatttgggtggggacacagagccaaaccatgtcactcaccataatgtctgagttatttcactgacttatgtctgacttatttaacttatcatgatgttttcagggttcatccatgttgtagcaaaaatcagagtttggttgctttttagggctgaacaatattctattgtatgtatacatacatactttaaaaaaacctattcatctgtttgtgaacatttgggttgttttcattttttgtctgctgtgttgctatgaacattgatgtgcaactatctgagttcctgctttcagtttctttgggtatatacctacaagtggaattgttggatcatatggtatttctgtgtgttttttttttttttttttttgagggaataccaaattgttttcctggaatacagtgatcattataaggcaatatatactgcagtttttctgactgttgagtcgaagtctaaacaattaaagaatctggttgttttcagatagctttttattgagggcttgttaaaaaactaaaaaggtagtatgtggttgggttgttcctgtcagctactttttattattatttcatgacatgttatccaacaggaatattgcaaagatttacattttataaaatgctaaaatagcataaagatgtggactgtcaaacagattgtagtagaattaaaattagaaagctataatccagtcgcttggttaacggaataaattatgtcaaattcctgattattcatttgtggttttactattttatggattgtgacaatctttaatttgttctggcttctttctactatttacctgccttctgggctctccctcattccttcttctgttcatgtatgttttagatacaagttaattttgatgttaatagaagcagtgaattttgatatgtgatttaaatttgatttttaaattatctgcactgctacttgactgcatatatacttgagaactgattttatatgtggttttaatccaatttaaatcaatactgggaatgttttgtatcttagacattattttgttttaaaaattattttaaaaaatttaaatacataatacttgtacatgtttctggggtacttgtgatattttgttacatgcatacaatgtgaaatgatcaattcatagcatttagggtgtccatcacctcaagtattcgttatttctatgtgttgggaacatttcaagtcctctttttttaaactattgtgaaatatacaatgtattgttgttaactgtagtcaccctactctgctatcaaacatttgcactttttacttcgatctaattgtatgtttgtacccattaacaacctctcttcatctcccctcaagccccacccactcacccttgctagccactggtatctatcattctgctgtctaccttcatgagatcaactttctaatctcacccataagagtgagaacatgggatgtttgtctttttgtgcttggcttagttcactcaacataatgacctctagttccattcatattgctgcaaatgataagatttccttttctttttcttttttttgagacagaatctcgctctgttgcccagtctggagtgcaatggtgcgatctcggctcactgcaacctccgcctccctggatcaagcgattcttctgcctcagcctcctgagtagctgggattagaggtgtgcgccgccacgcctggctaatttttgtatttttggtagagatggggttttgctgtgttggccaggctggtttcaaactcctgaccttgagagatccgcccacctcgtcctcccaaagtgctgggattataggcgtgagtcactgctccgggccttattattattatttttaatagtcaaattgtactccattgtgtatatatgctacattttctttaaacatttatccgttgattcacacttagttgattacatatcttggctattgtaaatagtcctgcactaaacatgggagtgcaggtatcctgttgacatactgatttcttttcctttggataaacacccagtagcaggattgccggatcatgtggtaattctatttttgttttcttgagaaatctctatgctgttttgcatagtggctgtactaatttacattcctatcaacagtatagaagagttactgttgcttcacattctcgccagcatttgttatttattatctttttaataacagccattctaactgcggtaagatgatatattgtggttttgatttgcatttccctgatggtaagtaatgttgagcattgttttttataccttttggccatttctatgtctttttcttctttattttttcatctcaaaggacacaaaccaacatttctgtgtcttcttttgagaaatgtctgttcatgtcctttgcccactttttaatgggatttttttttaaactattgagttccttgtatattctgggtatttgtcccttgtcagatgaatagtttgcaaatattttcttctattcaacaggctatttctgtttttttttcttgattagcaagtggtcattgattttatttatcttttcaaaaaaacttggttttgtttatccttcctattgttttttgagtgtctgttttgttgaattctgccctgtttttttttttttgtttttttgtttttttttaagttggaattttgttctgtctcccaggttggagtgcagtggcatgatcatagctcattgcaagcttgaactccagggctcaagcagtccttccacctcagcctcccaagtaactagaactacagggctctgggctgttttttttacatttttttagggatggggtcttgctatgttgctcatgctggtctcgaactcctagcctcaagtgatactcccatttccacctctcagggtgctgggctttcaggcactgagtcactgagtcaccttgattattataatttattttcttctactaattttgggttttgtttgttcttgctttactagttccttgaggtgcttcattatattgtttatttgaaatctttccatattttttgaggtaggcatttattgctgtaaatttccctgtaagcagtgcttttgttgtatcccatggattttggtatgtcgtgtttcaaattttcattcgtttcatttgttttttgatttcttccttaatttctttcttgatcagttgtctttcaggaggatgtttgtttaattttcatgtatttgtacagtttccaaagttcttgttcgtggtttctagttttattcttttgtagtctgacttgatatgatttctatttaaaaaaatttgttgaaacgttttgtttcctaacatatggtctatcctcgagagtatttcatgtgctgatgagaagaatgttgtgtactctaactgttgtatgaaatctgtaaatgtcttttaggcctatttggtccaatgtgcagtttaaatccaatgattctttgttaattttatgtctagatctgtttaatgctgagagtggggtgttgaagtctaccaactattatggtattgcagttgatatctccctttagatctaataatatttgcattacgtaatgggtgctctgtagttgggtgcatatatatttagctactcctgcttgcttttggtttccatttgcatggaatatttttttccatctctttactttcagtctgtgtgtgtctttacaggtaagatgagtttcctgtaggcaacatatagctgagtcatgtttcttttatccatttagccaatctttatcttttaagtggaaagtttcatccttttacagttaaggttattactggtatgtgagcgcttattcctgccattttattaatttcttgttgttttgtatattttttggttttctttggcttttttgagatgggctctcactgtgttgctcaggctggagtgcagtggtgcaatcacacatggcttactgcagccttgacctcctgggctcaggtgatcctcccacctcagcccttcatagttgggactaaaggtgtacgccaccatgcttggctaatttttaaaattttttgtagagatagggttttgccacattgctcaggctggtctcaaactcctggtctcaaactcctggcctcaagtgacctgcctgtttcggcctcccaaagtgctaggattacagatgtgagccactgtgcccagcctgtatattctttgttcctttctttttctcttattgtttatcattgtggtttggtggttttctttagtggtaacatttgacttctttttctcatttgtgtatctgctctaccagttagctttatatttctgtgtgttttcatgatggtgatcatcatctttttgcttccagatgcagaattcctttgagcatttcttgtacagttggtctagttgtgtcaaattacctgtttttgcttgtgtagtaaggactttatttctccctcatttctgaaagaaagttttcctgggtgtaatcttggctgccaggtatttttttcttttagcactttgaatatatcatcccattttctcctggcctgtaaggattctgctgagaaatctgctgttagtctgataggagttcccttgtaaatgatgagatgcttttctgttattgtttttagaattctctctttgtctttgacttttcacagtttgactataatgtgccttggcagagaccttttcgagttgtatctatttgaaggtctctgaggttcctatatctgggtgtcaaaattgctttctagatttgggaagttttcagctcttattttgttaaataggttttttatcccttttgttttttctttgccttctggggcactgaaaatttgaatatttggtcactttatagtgtctacatgtcatgtatgctgtgtttattcttctttatttttatgttattggattatttcaaaatacctgtcttaaagttgtgaaattctttcttttgcttgatctagtgtattgatgaagcttttgaaataatttttgtatttcattcaatgaattctttacttccagtagttgcatttcgttcttttttatgatatctgtctatcttttttttttttttttgagacaaggtctcactctgttgcccaggctagagtacattgatgcgatcttggctcactgcaacctctgccttctgggctgaagcgatcctcccacctcaaccacctgagtagttgggactacaggttcacgccaatatgctgggctaattttttttttttttttttttagagatggggttttgccgtgttgcccaggctggtctcaaactcctgggttgaaacgatccacctgcctcagcctcccacagtgctgggattacagatgtgagcctagccctatgatatctgtctttggtaaatttctcattcgtattctaaattttatgatttcttagtattgtgtctgtatattgtacctcacttagctttttaaatattattttgaattctttttctgggatctcataaatttctttttcattggaatctattgctgcagaattatttaggtcatatttccttgctttatcatgtttcttgggtccttattgcgcatatggtataacagtcacttcttcccagttttttgaattcgctttctgaggcgagggctttttcctgaagatgtgtttatgatgttgattgggtagggcattttggcatgaatctgggtgcatgcagtggtgtagtctccgtataaattattcggctgtttacagcgttaatagtgtctgattttctcagtgatgtagggtttggtttgttagtggagtctgtggtgaggcttagctggggacaggttcaccaagtgggcctgtccttgggccttagggcaacatatgctggcactggtgttagcaggtccaggtgggctgattcttgggcctccaggtggcttacttgggtgttggtaggggcagtggttggccagttgggtgggcagattctcaggctcctgggcagcgtatgtggcatggttgatagtgggaaaaccctctgtttcccaggtggtctgtgctgataatggcagtggctgcaatgggctgggcaggccagtctccaggcctgcaggtggtgcatgtggttggggaccagctgtggtatgtaatggcagattgagtgggctaaatctcaggcccctaggagaagtgttcacatgttaacggtggtggagggggctgggtagacctgtcctcaggcccactagtaatgtgtgtgggtgttggctgtggtaggcaggggtggggtgatccccatggccccagtggagtgctcgagtggggccctgccactggggagggaagggttgctttcagtggcaccagacataaacattcagctgatgagtgggtctttgggccccaggtggcagctgtgggcagggtagtctgtcctcaggacacttgtaaaggtgtagtagctccactgcttggggcagcagggtcactgccaatagtttgtggtttagcaccagtggcagcagccagcaggagtggtggctttgggtggtgggagtcttacagtctaacttaggcctccttggggcacatgaaaatgcatagcagctctgctgctgggggcagtggggttgctgccagtggtttacactttggcttgggggcagcatgggatcacaacagtggctgtaggtggggatgtaagtggactccagggatatggagatgccggggctgtttggccccagggcagggtacagccttgttggggctgggctctcaaaacgtgctgtgctctagctgcttaggactaaggagtggaggggaccgttcatgagcagtatcatcgtgtggtccccaggcagctccctttgtcagtatgagatgattttcttattatgaaatcgatattggccaggtgcggtggctcacacatgtaatcccagcactttcccaggctgaagtgggtggatcacctgaggtcaggagttcgagactagcctggctaacatggtgaaaccgcatctgtacaaaagtacaaaaattagctggtcatgatggcagatgcctgtaatcccagctgctcaggaggctgaggcggaagaatcacttgaacctgggaggcggaggttgcggtgagccgagatcgctgcattgcactctagtctgggcgagagagagtgagactcatcttgggaaaaaaaaaaaaagaaagaaagaaaaaaagaaatcagtatcaaggctgtaaggggcctacttcaagtgttcttaacttctgttttccttctaagttgtttatctagcttgtacttagacaccttaatagatacataaatatttctttgggtagggtgtatagcatacaatgtttttttttgttgttgtttttgagacagggtctcactctgtcacccagacttggagtgcagtggcgtgatcttggcccactgcaacctctgcctcccgggctcaggattctcccattttagcctctcgaagtgctgggagtagcgtgtgccactaccgcccggctaatttttgtatttttattttaatttttgaggtggagtctcactcttgttgcccaggctggagtgcagtggtgcaatcttggctcaccttaacctctgcctcctgggttcaagcgattctcctgccgcagcttcccaagtagctgggattacaggcatgtatcatcacaaccggctcattttgtaatttcagtagagatggggtttcaccatgttggtcaggctggtcttgaactcctgacctccggtgatccacccgcctcggcctcccaaagtgctgggataacaattgtgagccaccgcaccctgcttaatttttatatttgtaatagagacagggtttcaccacgttggccaggctgatcttgaactcctgacctcaaatatctatccgcctcagcctcccaaaatgttgggattaccaccaataccgtgccaggccagaatgttcgttcttttttttttagacaagtcttgctctgttggccaggtcttatattaaaacttaaatatctttttgtagcttttgccctcaatttttttttaccatatagaatactagtgctttcatttaacaggggtttcagggtgcaattttgctgaataataaattttaatgacgatgctgttttgagatagtgtttttatagtaactgtaaatgtgtaaatatgataatgatttttcaaaatagtgtgtacctttataaacataatttatgtatttacagtcacatatatggcctagaatttcctatcagtttgcaaaagtaattttatgaaaatacatgataggcagcaaaagttgaggcaggatacttgtttgttcaggagagtctatttttaagtttgtggagttctcatttagaagatgtgttgggctttgttgattacttaacagcagtagcttgggtccttaaggctttaagtagaaagcctggagttcttgtacctgggaagccctgggagttatttggcaagaggaatgtgagtacagcctcaaactaaaagggtgccaagactgacgtgaaatgaaggaaaagagaaaatagacaatgtttaaaaatgtacacagttttcaagctagtaaatgtatgctactgacccctacttacataaaatatattcatgttaggtatatagttagaggtgcattttggcaaatgtatatacttaggcaactgccattgaaatcaagataaagaatgtttctgtcgtatcacaaaattccctcattactttttactcttagtctccaccctaggcaactactgatttgcttcctgtcactactagatagattttgactgttccagaattacatatcaatggaattagactctgcattcttttgtgtcttaacaaaagtgcgtgttttcaatagttggcttttttttttttttaatttctgagtagtttgccattatatgaatacatctttctctttacttgttgatagacatttaggttatgttcagtttttggctattataaataaagctgctgctaacatttgtgttcagttatttgtgtggatatatgctttatgttttcttttttcttgagtagaattgctgggtcataagctttttttgtttgtttgtttgttttagatggggtttccctcagcctcccaaagtactgggattacaggcactagccaactcgcctggccttgtttgtttttgtttttgttttgaaagggagtgttgttctgtttcccaggctggagtgcagtgtcgtgatctcggctcactgcaacctcctcctcctgggttcaagcaattctcttgcctcagcctcccaaatcactgagattacaggcacctgccaccacacctggctaattgttgtatgtttagtacagacggggtttcaaacatgctggccaggctggtcttgaactcctcaccttcagtgatctgcctgtctcggcctcccagagtgctgggattataggcatgagccactgtgcctggcctggtttttatatgtttgactttgtaagaaagtgctaaacagttttccaaagtgatgttgtcattttccattcccatcagcagtgtgtgagttccaggtactcaacaccctactaatatttggagatgttattctagcaaagggtatgtgataatatattattctagttctgatttacatttctttgttgactaatgatgttatgtaggtttccatatgcttgtttgccacctgtgtatcttctttgtgaagtattttttcacattgttgtttgtctttcaatggttgtcttattattgatttgtaagaggtttttaaaaagatattccgaatataagttctttgtcagaccatatgtattgcaaatgttttctcccagactgtggcttgcctttttttttttttttaaagctatttctcagcggaagttttgaatttttaagaagcccttttaatgaaaaaatttttttcttttatgatttttgcttttgtttcttaaggtagcattgactaccaaggccatgacagttttcttctagatgtttccagttacagttttacatgtaagtctgtattgcaattcaatttaatttttctttatgatagaggtaagggtcaagggtaatatttttcacatggatataaattttttagcatcactttttgaaaaacctatcaattctttgaattgccatgatctatatatgttgagacctatttatatattcttaggtctttcatttcattgatctgtctatatttttatgccactgtttggttactgtagctttatggtacatgtgctaagcaaggtccatttacgaggcagaatccatacagtaaattgaagaatgaaattttagtataaagaattagctcttgagtcacccctgtgcagccttggtgccgtgtgcattttggacactcagcccaccttgctctctagtacttgtaagccttttcctttcaagatgcctgcagaggtgtaccatggagaaggggaggtggcgacttttgccttttaggcagaaattgcccaactcatgtctctcataatcaataccttctattccaacaaggagattttccttcaggagttgatctctaatgcttctgatgccttagacaagattcgctatgagagcctgacagacccttccaagttggacggtggtaaagaactgaaaattgacatcatccccacccctcgggaatgcatcctgactttggtcaacacaggcattggcatgaccaaggctgatctcataaataatttgggagccattgccaagtctggtactgaagcatttatggaggcttttcagtcttgtgcagaaatctccatgattgggcaatttggtgttggcttttattctgcctacctggtggcagagaaagtagccatcacaaagcacaatgacgaagaacagtattcctgggtatcttctgctgggagttccttcactttacatgttgaccatggtgagcccattgacagggataccaaagtgatccttcaccttaaagaagatcagacagagtacttagaagagaggtgggtcaaagaagtagtgaagaagcaccctcagttcataggctgtcttatcgccgtttatttggagaaggaaccagagaaggaaatcagtgatgatgaggaagagaaaggtgagaaagaagaggaagataaagatgataaagaaaagcccaagactgaagatgtgggttccgatgaggaggatgacactgataagaataataagaagaaaacaaagaagatcaaggagaaatacactgatcgggaagaactaaaccagaccaagccgatttggaccagaaaccctgatgacatcacccaggaagagtgtggagaattctacaagagcctcaccagtgcctgggaagaccacttggcagtcaagcaattccctgtagaaggtcatttggaattcagggcattgctgttcatccctcatcaggctccctttgaccttttttagaacaagaggaaaatgaacaactctgtgtccatcatgtgtggatcatggacagctttgatgatttgatgccagagtatgtcggctttgtccgtggtatggttgactcttaaggatctttccccaaacatctcccgggaaatgctccagcagagcaaaatcttggaagtcatttgcaaaaacattgttaagaaatgccggctgggcatggtggctcacgcctgtaatcctagcactttgggaggctgaggcgggcagatcacctgaggtcaggagttcaagaccagcctggtcaacatggtgaaagcccgtctctactaaaaatacaaaaattagctgggcacaacgcctgtaatcccagctacttgggaggctgaggcaggagaattgcttgaacctgggaggcggaagttgcagtgagccaagatcatgccactgcactaagcctgggcgacagaagaaggctctgtctcaaaaaaaaaaaaaaaaaaaaaaaaagaagaagaagtggcttgagcttagcttctctgggctggcagaagacaaggagaataacaagaaattagatgaggtattctctaaaatctcgtggcttggaatccatgaggactctattaactggcgacacctgtctgaactgctgtggtctcacaccttccagtctggagatgagatgacatctctgtcagagtatgtgtcttgcatgaaggaggcacagaagtccatctgtgacatcattggtgagtgcaaagagcaggtagccaactctgcttttgtggagcaagagtggaagaagggcttcgaggtaatatatatgagtgagcccattgatgagtactgtgtgcagcagctcaaggaatttgatgggaagagcctgctgtcagttaccaaggagggtctggagctacctgaggatgaggaggagaagaagataatggaggagagcaacgtaaagtttgagaacctctgcaggctcatgaaagaaatcttagataagaaggttgagcgggtgacaatctccagtaggcttgtgtcttcaccctgccgcattgtgaccagcacctacagctagatagccaatatgaagtggatcatgaaagcgcaggcattttgggacaactctatgatgggttatatgatggctaaaaagcacctggagatcaaccccaaccaccccattgtggagacactacagcagaaggctgaggcagacaagaacaacgaggctgtcagtgacccggtggtgctgctgtttgaaaccacactgctctcttctggcttctcccttgaggatcctcagacctatccagctgcatctaccacatgatcaagctaggttagctattgatgaagatgaagtggcaacagaggaactcagtgctgctgttcctgatgtgatgtgttcctgaggatgtgtttcacatggaagaagtagattaagagtttatacctgcaaaccttgtgcccttgcatagtgtccccatggctcccactgcagctttgagtggtcctgtcccacctggctctctctgctgatatctagtattttttctcttctgtccttgtgtctaaggcaggaaacaagggcatcaagccccattccctctctactttgacagcagaattggatgttgtatatcctgtttttttgttgttgtttattttgttctgaaagtatgtaaaataaagaatatgctgtttttatacagtaaaacaacacaaaagattaccatttctggggattagcaactaaaagaggattatttttcttggcttgttgtggtatctgtaacatcatacttaatgttacagagttgcataaaagtggcaagtgtgaatatctttaccttcttcccaatcttaggagagaagcattcagtctttcatctttaagtatgatgttaactggagtttgtagttgcattttatcgggttaaggaagttcctgtctcttcctagtttgctgagaattttatcatgagtaggtgctgaaatttgttagatgctttttctgtacctaatgagatgattttgtggcttttctcccctttgaatgcggtgaattacattgatgattttagaatgttaagccagcctcttattacttcatttgcttatgatgtattgtcctttttatttattgctttgttcagttttctagtttttggttggatttttttgtttatgttcataaggaatatcagtcttttttttttttttttggggggggtctgtctttggttttggaatcagagtgagccacataaaatgagttgagtactcttccctcctgttttcttaaaatagttttataggacatcaggggaaccatctggccctggtatttttcttgtggaaaggccttaaatcatgaattcattttcttcagtagataggggcttattcagattttctatattttgtgatagttttcataatttgtaccttttaaggagtttattttatctaagtaattgaatttattttcattatgctcataatattactttatcactcaatgtctgcagtactggaatgatgttttcttttttattcttcattgacaatgtattttttaatgatcttttttattggctgtagaatttggattgacattgtttttctttcagcattaaaaaagttactccaataatttctagcttgcattattattattattatttttgtggagacagagtcttgctctgtggcccacgttggagtgcagtggcatgatctcagctcactgcaacctctgcctcctgggttcaagcaattctcctgcctcatcctactgagtagctgggactacagatgcacaccaccatgcccggctaattttttgtattttagtagagacaggctttcaccatgttgcccaggctggtctcgaactcctaagctaaggcaatctgcccaccttggcctcccaaagtgctaggattacaggcgtgagccaccacgcccggcctgcttgcattatttctaatgttaaatcagcagtcactctgcatataatcagtctctttgatggattttaagattttctctttaacgctgattttcagcagtgactgtggtgtgttttgtgggtttttctttgtgtgtatctttcttggtgtttgttgagttacttagacttgtgtttatagttttatcagtttggaagttttttatcattttatcaaatttttttttctgtctcctctcgcttctttatttatttactgtttgataggttactgaggctctgggttttttttttttaaactctttatctctctgtacatcaagttagatagtttttgttaccctgtcttcaagttcgctgatattctttcttgcagtatctcatctgctcttaagtcagtccagtgagagagagagatatatatatatatatatataattttttttttcattttagaaattatattttccaattctggaagtttcctcccctctcattcctttccctctctcctctcttccctgtccctccccttccctcccctctttcgacagtttttggtttctccttattgtgcttatattttccccataattctttaacatatttacaatatatagacactaaatcactaaatccttgtctgctaattccgttatcattcattctcactttttttgggggggactaattttcttcttctttgtcacatttctttatagttagtggtttggtttttttaccccttgttttttttaatagtttgtggtttttaattggatatttcacattttgattaatatttagtgtctttttgtcgttgtttgttttttttaaaattagagatggagtcttgctacattgcccaggctgattgaaaactcctgggctcaagcaatcttcccaccttgccctcccaaaatactgggactacaggtgtgagccactgtgcccacctgtgtctggatttttaaaaaacttttaatttaaaaataattgtagagtcacaggagcttctactgggaagtcctggacatctttcccccagtctccctcagtgttcacaatttatataactatattacaacatcaaaaccaagattgatattggtacaatgcatagagtttatttgggtttcatcagttttacatgtacgtgcatgtgtgtgtgcctgtgcataattctgtgcaattttgtcacatgggtagtcttgtgtaattatccctacaatcaaagatactcaatggtagcatcaccagactcccttgtgctatccctttatggccacattcatcccctcccccatctataatcctaaacaaccattaattggttctccatctccataattagattatttcatgattgtcgcatgaatcgtattatgcaagtagtatctttgagattgacttttccactcagcataatttttttgaagtttgtacaaattgttgtgtttatcaatagtttgttcctttttattactaaattctatcctattgtatggatataccacagtttaactgttcgtattttttttttaaaaagtatggagttttgtttgttagatagttgagtaacttgtggatcagcttgacccttttgagccttttttttttttatgattaattaagcagaaattttatttccaagctcttcaaagactgttacaaacacaaataatgtatccttctaaaaaagtgtcccaaattaaatcagattcacatcatcaaagtaaaacccttgtgaagttaagaattcttttaggttgtaatgtttttatgttagtttttaatcatttacaatgttctgtgggtcacattttaaacatttttaaatatatgaaattctgtatttctttaagtacagccacagctacaaagtagaggaacgtaagaatacaaagaccaaatctgcttcatttatatacacgatggggcagcctaatgcacatcataacattaacttttccaaacaagtttgctaagaatctgctcccataattagtgttaaaaataaaacaatcttcccatttagaaaaatcaagacatcagttgattagtaaagcctattcttcctcccagcaatttgtactttctggtcttcatttaggaattgtaaattcatgagaaaagaacaaattttttatggtataaatatcttccaggaacaacagtttacaagtattcgattgtttaaataaacaaaactattttccttcctaaaatgtaaacatccagtaaatgaaacatacatgatattccaggtatagaaatcttagtaactcacttatgaaagaggtgcattttggtatgtttggtggtaaggtttttgtttatcttatgtataaaagtacttgcacaaaaaaacaagctattactatttaaaactctattccttcacccagtttcctcactcaagtagaaactcatgaatttctgtgattttggctataggacggggccacaggaaagggctgaaatatctctaaaagttagggaaaagtgttttcttgagacttgaaggcagtcattcatcactttgtgcttgaaggcattcctcagcaaacttctctcttagagtcttcagagtaaagcacaggatctgggttcccagaaggggttacttccagctagaacacccaccagcagggcatccttgcaggcattctgcatacagtactgttgaagctctgcggctgcctgagagacattgatcctctccacgccagcctccaacttgagctgctccaccaggcactgcagggcgctcgcgctagccccagaggacatggtggcggcgctgggctccgagggcccagccttgtttttaagctttattaggataggtttgaagtagcctttattctaggaatagtttgttcctatttccaaggagtggcttttctgggttctctattaaatgacaacaaagtctgtcttctgtgcttgatcacaacttcgatgtatccctgtctcttgtaagatccagtaattggtcaactaacagctccttaatagttgtttttgggcccacctttgtggagtctctctttatgcatccacgatagtattgagccacagactacaggtgaacgcctgtgcagatttctggagttctttctcattgttgcaccttccttttttcttaaatcatagtccttcactgcttgttgtctattgtctgaaagcagttgtttcatttatgtaactgaaaaactgtatttttgaggtgggtaggcaagtccagtaatggtttctccaccattgtggcaacaaaactttttgtttatttctaagttagtaatttgaaagtcaaaattgattcatctgtccaaagagcagtagtttttgttttgtgtcttaagatgttattttaacttacattttattttttgaataagaaatatgctcgtatgttttaaaatttaaatgccacaaaagatatacaatgaggtatccttccctcccttatttcccagtcacccactttccattcttggggacaaccattgttactagtttattgtgtatctgtcaagaaatttgatgcacattcttataatgtgtatcttactcagaaattctctacacagaaatgtggagatatgtatatatacatatatatatatatatatatatatatatatatatatattctccttcatattcttgtttttaaaaaaaggtaacgtactatattcttttttgtatcttatttatttatttatttatttattggagatggagtgttgttctgtcacctaggctgcagtgcagtggcgtgatctcggctcactgcaagctctgcctcccccgggttcacgccattctcctgccttagcctcccaagtagctgggactacaggcacccgtcaccacgcccggctaattttttgtatttttagtagagatggggtttcactgtgttagccaggatggtctcgatctcctgacctcatgatctgcctgcgtcggcctccccaaatgctgggattacaggcgtgagccactgcacttggtctttttttttttttttttttacttaatataacttagaggtctatgatttgattacatgtaaatattttatatatttttttcagctttgtagtatacagttatatgggtatacccataaatacgattatgtaccataagcaaattaactagttctgttgttactaatcatgtactatttcaaatagtgctaaggtgaataatctttctgggctattttccaacaccagcaaccaattctcttgattctccagacaccaagtgggtgttcaacaattcagcgtaattcagttctcacagtaaatatctggagctagtgcagaccccacagcttaagggcccattcctacaacactgctttccacttcagacaccatttgtaagtcctgcgccacctgtacttcggaccacctgctataaattgggggttccctcaacctcctcctaaggttagataatttgttaacctggctgacagaactcaggaaaacagtttacttactcttgctggtttattataaaggatacaactcatgatcacctaagtggaagagatgcgtaggaatgtgggaggcagcacagagtttctgtgcgctctctgggttcactaccctccaatcaactcagtgtgttcaaccctggaagctgatcagatctcattgttcaagagtttctatagagcttaatctcctgtctctcccacctcactttctggggtggagtcagtggctagggctgaaattccattgctcttattatttgatctttctggtgaccagctctattccaaggtcatctaggggccccactctaagtcacctcattagcataaactcagatgtgagtgaaacagactcattatgaatgagtgaagagacacctatcactgaggatattccaagggttttaggagcactgtgccaggaactggggacaaaggtcaaatagatttggccctctatatctgtggattcagtcagccttggattgaaaataattcgcatggttgcatctgtactgaacatgtacactttcttccttgtcattattccctaaacaatacagtataagaactatttacatagaatttatactgtgtgaggtattataagtaattttgagatgatttaaagtgtacaggaggatgtatatatacaaatactctacaaatacatttgttatatacaaatactgtaccattttgtataagggacttgagcatttttagattttggtatccttgggggtcctgtaaccaatcccccgtggatactgagggatgactttatatttccttctcttttttttttttttttttttttttgagatggagcctcactttgtcacccaggctggagtgcagtggcatgatcttggctcactgtagcctccacctcccagattcaagcagttctcttacctcagcctccccagtagctgggactagaggtgcaagccaccatgcctggctagtttttgtatttttagtagagacggttttgctgtgttggccaggctggtcttgaactcctgacctcagatgatccacctgcctcagcctcccaaagttctgggattacaggcatgagccactgcacctggcttaactttatatttcttattatgccacattctttgtagtatggaagtaatttcacttacatgcaagtatatgtaagatacatttctagaaatggaattcttgtatcaaaggctatgtacatttgtaatttggattttttaaaccagttttcccaccatagagattgtaccaacttattcatgtcacaaatgtgtgaagtgactgtatgtttccccatacaactttatgttacaaatttttattaagtaatttaaaaaacaaggttcttatagtactctgcaaaacatgtatatgtaaaaaaaaagacgtaatactttgttgtaattgtcaaaaaaattaagtagaaattctattatgttcacaattataaaagacttgatatacttttaacagagttgagtaatgttagctaatttgttgccattttatcatatatctccaatgtgccaggtactgttatgactttatatacgttataaaatctctaatatttaaagtaattttacaaggtgtatagaatttatattacctttatttcacagacaggaacctgagctagtaaattctaggcttaagatttgattccaattcgattctaaactctagatttttgtcatatctttaattaattttactttagtattttgatctttcccttttttgtgtagaggactaaaattcctctgatttcagccattatcctggtctttcggcattcccaaattgaattaaggaagatttctataatttgcaagaattagaagccccagggtaaaacaaagagcatacacacttgtctttctgagaagagatgttaaataccccatatagatgctgctttcttctgtattttcttatttaacttgtagaaagtaagggagaatagcaaaatagcagaattactagagagagaagacaggcagtggtagataatagtaattgggtcaggaagcctgttttaatctccaagtaacttatttgctgtttgaatatcttgttttaccatgtaagaatcagtctataggcatttatttttaacatcctagacagttactgtttaattttatctcatttagagtcctaccacagctactaagttgacttttagagcagaatatgtctttaaaaatcttggtcagcgtatttcacaaatagacaaatttcataacagtccacattttgtagactttttaaaataaaaaataattgtttaaaatttggatctttttaatttcagttgttcccccttcccatcccattttacagacatttcaacctacgaatgaagagggacacttcccttttcagtgatgaatttaaagtagaaacatcaaataaagtacttgattatgatacctctcatatttacactggacatatttatggtaagttggaccttaacagaacccttttcttccatttttttttttctacacaaagatactcattttgaagtgtaagcaaatatttcagaaaaggttataaatccagaggaggttgaattcatatgaagggtaatggtctttgagaaatgaagtaatgtttggacctatctttacatgtatgtttaatagtgaattatgaaatatctggcttctgaaaggggtgaaattttgactcagtacctctaaactgttagagttttcaaaagttttaacgacttctgtaattttctgattttccaagtaagaaattaatagtaactttgctgtgttttataagaaaacaggaaaagtctaaaaggaaacagtaaagatgatcttagccaaaaataatgtgacagagtcatctgtaggaaaatcctcccaaggcccttcttcctcagaatctatttgctttattcacaattctaacaaatttctcttgctgcatcaaattgaaaatgcatgttggggggcatcagtggcacacttaacccaatagaaagttacatctactagtagtgttgaaagaacagaacaactatagaagtcataaaaaagcttaaaaaatgaaaatcttctgggggtgttggagagaggcaaaatgtcattgttttataactgtacattagtaagtactcaagatgattctcacttaagacagtgttaaactgtttgagattatttctacacgagtgatttctactgaaaatagtaacatgaaaaattaaatgcttaaagaattttttctcatttttcgattgtgccagataaatgaggcatttctatacttaaactttctcatttgtagaataaacctaatcattaaattctttagcttttttgtactcttacaattctgtaaccaaaatgaagcgtttttcatcagtagattttcaatgtcagactttagtgttatattgtcttcttgattatttatctttctgggcaaataacttagtagttcctgccctttttcgctaggtgatgagatcaagaaaagtccgaggccgtaaatgagattgcagataaaaatcatgttatttaggccaggcatggtagcagttacacctgtaatcccagtgctttgggaggctgaggcaggaggattgcttgagacctggagtttgagaccagcctgggcagtatagtgagaccttgtctctaaaaaacataaaaatttagttgtggtggcacacctgtagtttcagttagatgggaggctgacgtgggaggattgctgagcccaggaggttgaggctacagtgagttatgattgtgccactgcactatagcctgggggacagagaggggccctgtctatttaagaaaacaaaacaaaacaaaaaactccaaatatcagcgtcttgggctcttacctccagtctatgattaattcagaggcaactaattaatgttattctacaacttagaaattgtggaagtcctgatttttattttaatcagagaatcgtaatgggtaaattcaaggtttaaagccctctccctctactttcaccctttatgtcatttgattttggtgctcaccttttcgttgtgattatattaagaaccaaaagtaccttttttcctattatttcctttcactggagaagtgtaattgatgggatagtattacaaatctttgtccaatatctttaaaagtactgttggtatacttttgttcaaagtgcccatgaaatatttgacactgttctatttaaaaatgtgtttataggctgggcgtggtgactcacgcctgtaatcccagcactttaggaggccgaggcaggtggattgtttgagcccaggagttccagaccagcctaggaaacatagcaagtccctgtctctaccaaaaatacaaaaattagctggaggtggcggtgcacgcttgtagtcccagctactagggaggcggaggtgggaggagtgcctgagcccaggaggttgaggctgcacagagccatgagctcgtcactgcactccagcccgggtgacagagcaagaccttgtctcaaaagcaaaacaaaacaaaacacaaaacaaacccctaagcatagcgcagaagccaaaaggcctggcccatgcacaatatatcggatggaaaaggagcttttttcttgtggtacctgtagcaaaattttcaaaagatgctttggatgtctttattctgaaagtgtgtattttatcagtgggtttgcttgcttcttttaagttaatttaacaattaattgttttgttttgttttgagacaaggtcttgctcttgtcacccaggctggagttcagtggtgccatgtcagctcacagcaacctccgcctccagggttcaagtgattcttctgcctcagcctcctgagtagctggacttacagacatgtgccaccaggcccagctaatgttttctgtgtttttagtagagacagggtttcgctatgttagctaggctggtctcgaactcctggcctcgagtgatctgcccacctcggccccccaaagtgctgggattataggtgtgaaccacactgtgctgggccaatttacaattattgatgactactgcatacatgctaggcactcagctaggtgcaaggaatgtggttggtaacaaggcagatactctatttttcattgctgttattagtaattgtatatattttaactaaatactagttgctgttcacatctcacattctgcttgatatattttatgtgaaaatttccatagtaaatttatattcaagatttaaccatatatatgtgtatatatgtatgcatgtgtgtatatatatacacacatatatacatatatatgaatgaatttaacattcatgtgcaaattaaattgtcaagaatttgttgctttcattaataggtgaagaaggaagttttagccatgggtctgttattgatggaagatttgaaggattcatccagactcgtggtggcacattttatgttgagccagcagagagatatattaaagaccgaactctgccatttcactctgtcatttatcatgaagatgatattagtaagtacttaagttttatcaagtagcctttttcaaaaggcatatgatagttaaaactgtgtggagacaaatgaagcattagctgttttctttcctgagttactaatcaggctagaacatagtttttactagcaattgctatttaaggaatagtagatatatgtaatgaggcaatttccttgtcagtccattgccagtactactttgctgatatgacataactaattctgtttgaactgtgtgagtcaaccaaatctgacggaactggaaatcgtatattttgacatcagccagtctgtgtaatgctaatacctttgtgtgtatgacctattgaaggtagaagagcatcattactacttacataaatttcagtgtggatatttgtgtagtgtttaaggaatattttaggtatttttgtaatttttaagtccattgagtatttctttttagaatcttaaggtaatgacttgacttcaagagtccacgtttatcatggattttgttctctaccatctttatatgatgatatttttctaagaatagaaaatgtatttagactttaccttttaattctattgtccgtatatccacagttatccagttattgggaatgcttctttgaagtaccacagaaataaatttctctaatttatatagctcttgaatacccatttattattttttgactgtaattagactagtctctcaatttttgcctgctttcctaacttggcagcttcttcctacatacgttttcctttgtatagacagaaatttattgtcaatgattttattcttacccctagtaatacactgacaagcattaaccattttgactttttgctccatcagctctgacagtttttgtacttcatctgtccaactgcttgttatctctgctgctagattgctatagaaaataacatatgtatactaggtaggatgcatttatgatttttagctacttgttaaatcataagctcattaatgctacttccctgtattttcattcaccactatttgattccttttccagttttaactcctggtatttcaaactctacctttcttttcaagctctaagctatcatcctccttcataagtaggaatatgaattcctttgctttcgtttctttctgctgacaaaattattatttacctggtttgtgtcttgctttgtagctttcttagtaatttaacctttttttgcagggttacctcccctatcagggtatgtaagttcttcaggtatagtttctgtttcttttgctcctgtaatattgcaagtatcatttgtctgtgcagcaggcttttcataaatacttaatgaaatactggaatatttttctagaatgttttatcaaaatcaaagaaaaccttttgaggaatgaaggagaggaaaagcgtaatctgccagattattttttcctttctatcatattgtaattatactttctccattgctttctacttgctatcagtgccctctactgtatttgttctgcctgttttgacttctgttattgtgcctctctcatgttttccttcttctgttatctacttgtgtgtagtttaagaatattcttttttcccacttttctttctttcttgtaatataattgtattttttgcatattgcatccaacagtaatttccaaatatcttaataggtgtcaatctttttttttccccaaagatgatgagttagcttggaggatgaatgacactggatgttacttgattttttgttctttttggcatttaaatgctttatcattgatatcagcttttattttatacttgtttaagtaaatatatgtttgtggtaaggagaactttttaacattctttttattattacatatcagtagtggggttagaatttaaaagcagcaatctttaaggtgattttatttgtagcttctcaggtaattgaaattgtaggatatgaggatgggagtacggaaggagttcccttaaacagagtttttaatgtttgcaaatttagacaattacttgtgaaaaactacctaaaaatctgtcaagtgaaccatggtttaagacaagaaaacattcatgtattagtcttttattctaaatagttgctatatttatattctagaccgtggttcgcaaattctctgcagagggacagagagtaaatatttttggctttgagagctgtatgttttattgcagctactcagctctgccattgtagcacgagaacagccaaagaaacacataaataaataagcatgggtgctttttttaaagaaattattatttatttatctatttttttggagacagagccttgccctgttgcccagtctggagttcagtggtgtgatcatacctcactacagcctcaacctcctgggctcaagtgaacctcctacctcagctctgtgagtagctgggactccaggtataagccactgctcccagctagcatggctgtttttaataaaacttcatagacacttaaatattaatttcatatatatttcatatgacataaaatatcattcttttgattttttctttaaccatttaaaaatgtggaagctacccttagttttcatgtcaaacaaaaacagatgggagggctcactaaatttaataattactttaattggttctttaaattctctgtgtagaatatgacaggttctagaagtagtagtagtagcagcagtagtaagaataattattatggcttaatatatacctgacagtgtataaaaatctttacttgcattattgaattgaattctcaaaataacgttatgagatactggcacacctattattcccactttataggtgaaggcttaaactgaggcttagaaaacttatgtcacttgattgtggacctcctgttctttaccctgtgctcttctgcttcactcatggaagaaagctgtaaattctcactgcctttacttcaaggatttctggggcttttctgaaatctgtaagcctctctaaaatcatacatttgcatctattgctgttttaagccaaactctctccttaatatatttagcagtgtttattttataactaaatggcaaaggatgccctttaatgtgtattattatttttatataattggtttaagtactaataatttattttcagaagtaaagtactgcattattgtatcactgtgaatgttcttaattggatttggtatcgttgtatatgttatccttaccaaaaagaagcaaatggtaggggaggcatactaaccttggatataccttttgatgagaatttggctaccctcttcttaatactgtttttgcaactgaaggcataaatgtatagaaccatcatgaaaaatgatactgctattctccagaaccttggggaatggcttctgagactgtaccagaacacagggatagttttcactgaaaatacttaataatttctctagatgtgatagtgataaatatatattgttatcagcttaaaatgcatacttatttaattctgtacttagtaaaaaacactctctcctaggacatggtagtgtgaacagttaatgacaaggtaagaataccacttagtcctctgccccttagcacagtttattttaaagaaactgagaaaaacattgttccataaactagaatagtattgttattaacatgaacaggttttaggaatatctgactatatgactgcttgcaataattcccttacaccttttttgtgtactacctatccaagagctaaaggtctgagtaatttttttattctatacttatagagaaatacttaatctccaaattaaaaaatatattttaattgtatatgaagagctgcagaataatttatttgggtttattgctttcatttcaaatttattatttattttcctttgtggggtatagaaaagcccagagaggttgaatttgcctatacctccgtcgcccaggctggagtgcagtggtgccatctcagctcactgcaacctccgccttctgggttcaggtgattctcctgcctcagcctcctgtgaatagctgggactacaggcatgtgccatcacgcccagctaatttttgtatttttagtagagacggggtttcaccatgttggccaggatggtctcgatctcttgatctcttgacctcgtgatccgcccgcctcggcctcccaaagtgttgggattacaggcgtgagccactgtgcccggcctgaatttgtctataccttatagtagtagggcacccctactttagaatgtgtgttagccatacctatacttatttcttctttctcttgtgcttcaatgggaagacctcctatttcttgttctgaaaaattaagattgttaaactttattttaccatttcaagatggaggcctcttcattcatgtagaagcttcctcatttgtggaaatgtcaggatgttgcatctaaaacttttaaaatgtcaattagttccatattgtgtttttgaagttgttttctgtcactgttagtgacagggagagacaaaaggaaggaatacaagagggaagaataattgaattggtaagtattgataatagctagcattgtttgtatcattcacatataacaggaaaactgttttagaaagcattctggctatacttaggtccagtctggagattggaaatctgcataagcatattgagttgtgacaaactatgtagccaactggaaaagttgagatgtggagtgctctgattgtttgacttctgaactcccacagtgcatacaagtgtattggttaatctctctactatatgttttgaatttgtatgctttactaagcattgatgttagatactgaacttatttaagcacagtgatagtatttgaaagaaatataaaaatttagtggtattgttgactctgtcttttccttttttctgagttaatctcttgggaagtataaattaatttttctaaacaactcacaggcacagaagccgaaaagttgagaaggccacagatatgggagttattttaagaataatatttaattagaaatgtaggatactaaattggaaagttaaaaaaaaatcacaaaaaaagaggcagtggctgggtatggtggctcacgcctgtaatcccagcactttgggaggctgaggcaggcggatcacgaggtcaggagatcaagaccatcctggctaaacagtgaaaccccgtctctactaaaaatacaaaaagttagccgggcgtggtggcaggcgcctgtagtcccagctactcgagaggctgaggcaggagaatggcgtgaacccgggagtcggagcttgcagtgagccgagatcatgccactgcactccagcctgggcgacagagtgagactctgtctcagaaaaaaaaaaagagagagaaagagacagtgaggggcttaattctttttagcagaatctggaaaaaatatgcttagacttttcatattatgcatattatgcatttcatattacgtaacgttatataaataggataacagttgaaaattttagatcaagttcttttctgattagttatatatatgtatgtatatgtatacatgtatattcatatatatttatcttaaaacatcaatataaaatattttagctataatgaaatacaatgaattatttcagaaatataagatttttaaaataaaaaattgttattagaagcatttacagtgtcaaaaaaacagctgcagcttttttttttttttttggcaattacagagtggtattcagttaagagtaatacttattttgtataagctgcatcagagagaaatgaaggtgaaaaactaccatctccatatataactcatttgtgctgtgcaccaataagaacctgctttagattttcatgctggcttacagctctcatactgtttcaggcaaagttagtggttattgaaaataccaccaggatgggctgtctgtccgtctgtctgtccttccatccatctgtatttttttttctttatgctctctcatcaactgactgtcaaggatgggctatctagagacacatttgatagtgtggttaactgttagtgtgttaactgtacagtttaaaaacaaagccttacctttaaaggtttttctttaaaaggagtgagttgtgtacaggggtgctaaataatttataaacaaggacaaacactgcactagaaccaacttattcattatgatcatcttcatctttcttctcttcctcatcctcttcatcttcctccttttccttcttattttcaacttcctcaccttcctcttctttttttttcagcattgacatctcccttttttttttttttttttttttttgctgcatgaggccttcctttagctcagtatgcagcaatatccatttcttagtttttcttcagcttcacagccttttcataaggctgcttgtcatatgcaccatatccacatctttcccagtttctttgaaacatcacgaatggataggtttggatattctccttagatttttgggcagtactcagggcaaaatgaaaagactgaaggagccctcttgggtacattgggatccctaaacttttttgtttcttctttaggagggatgtaagtttctctttaatagccatccttgtccccctttgccatgtcttcagattttcctttctctttagcagatacggctttccacctctctgagcattttttagaaaattccgagaagttaactgaagcatgagtgctgcttcttgttctcctcctggaagtttgcacaaagaatgcatatgatgaccttttgcctcttggcttcttaggatcttcttttaccaagtttagttatttttcctcagagaagcacagagtcacctagtgcacatctggctgccatttgccccagcactgtctccatggaggtcaatgtactgtaatggctatcagaaatacatgattatatgaaaataaaaaaagctttcatgttgtaaagcaactttgaaagtcaccctaacaagtaaaattatatttgaaatttttgttttttcttttgagaactatcttttattttgttttacaaataaattgagtaaggaattttataattttagtattgtaaaaggcactagattcaacactctaaagatgacggaaactgaagtctagagttataaaacttgtgcagtatgacatggatccatgtcttttggctgccactccagtgctttatttctgttacattctgagttaggagagtttaaaggctgctaaaaggccaagaacttaatgacaatagagacaatgacagtaaggattaaaaaaaaaaagttatttttggtatcattgattttgaaggtgagccatatttactactgaaaaagcaaatttatattttaggctcactttaaaaaatatatatatttattaatagagacgaggtctcactgtgttgccaggctggtctcgagctcttgagctcaagtcatcctcctgccgcggactcctaaagtgctaagatgacaggtgtgagccaccatgcctggccaaggctcaactcttataagtgatgagttacagaaaaactagaagaaatagcatttaggagtatgtgtgcgtgtatgtcctagagatactcggagctaaacctcagcctttcacatctctgatagcataattcatagatttatgtttgtaccagtgaccttataagagtgcctgaggacattggtccaggactctggccctctaaaaagctgcttctaaagaggcattgtgagatctggtttattaaagacatgttatattctgttcatgatttataaattgggggattagataatctccataagcagtcttgctatcttgtatttatatttgaacataaaagtctagaatttatagatgtggattttactggttttagcttctagagacttcttagaatcattttttataggcaagcttgtagatctactagttaaaactgttttttggtttaatttgtttgctcaagatcatacaagttagtggtcttggtacatggtagggagaaggcacaagaggtaatatgtcaaagaactgaggcatggcatatatatgaaaagagttagaaatgaaatcaaggtgatatgttagaatagctttataaccttatacaggtaatgtactttttcttggtctcattttcttcaggtataaaatgagggtgttagatcatggtgctaatatctcttatctcttctaaaagttaatggttctaaactacttttcctttaaagttggaaatatcttgattgatcatggctgacaaataaaaagtaaaaataaaaatatttttgtgctgattgggaaatgactatataaaatggctattcttgtatgtaaattaagtatttttcttaagtaaattaagtattcttgtatgtaaattaagtatattaagatgaaatgtgtccaccaccattaacatttttatgaatagcccttcagatctcatataccattttaaatttcatgtacagttatatcttagatctctttctgtgtcaataaacatagctctacatttttcctttaaatggctacataaaattctgctgtttccttgataaatgtattatttaccagcctgccaactaatggatgtatagattgtttcctcttttttactgttaaaaattgcaacaggtaacattcttgcacatattttctcccctcaatatttttatggttatttccttaagattaatttcctagaagtagcattgtcagacatttgcattttgatacatattgccagatatctctttaaaaaggttacacagatttatactcttacacctataaattaaatattgacttaataataccttcatgtatagtctgtggacacacttccccaattacttcacaaaaatgtctcctatttttttttttttaatacaggatttaatcagggtctacacattgcctttgagtgtcacatctctgtagtcagtattactcttttaacagcttaattgaggaaaaattgatagcaataaactgcttatatataaagtttataatattgataacttttgacatatgtttatgtctgtgaaactatcatagcatttaagataataaacatgcccatcacccccaaaagctttcagtgtaattcttctctcctctactccccgctaccctcttgcactaatctctaggttagtttgcactttctgaaatgttatataagcacaattatacattatgtactctttaagaaagtctggctttaactcagcataaatagtttgggattcgtccatgttgtatgtattaaaagttaataactttttgttgataaatagtagtctgttgtgtggataccatgatttgttaatacatttgcctgttaatggacattttggttgggttattacagacaaaattaaggtttttaatattaactcatcaagtattggtcgattaaagagaagataaattttgaagaggcaaggggatgaaataactactaaggaccaaaaaatcttgctctgttgcctgagctctagagagggggcatttggaaacaagacaagcaaaatacccaaagaattttaatttaagctagtagcatatacagcatgtacattctctctcctccaagctgataatacaacttaggtgtaatctcctagaattttttcctgacctcacagttctgggtatcctctctttactgctgtttatgtgttgataagtcttccctatcttttgaatccagtggtttactggtcattgatcatatgactgacctttgagaggcatggaaggaaaccagctgttgactggatgagtaaattaaattcaaccagtgtttaataaactgtggatgattgccgggagaccttaacacttgggaagttggtacttaaatgccatgcttgtttacatgtcagacacctcagctagactgacagctcttgagagtgcatgttctatgtcatttatttttgtatccctttgtttggtatataataatttttcttaattgtttgcttaataaattaatgcagttaaaaataacattgacatatgattaggagatttatgtgtacacagctgttaattttgaatgttctgtatgttatagtcaatctgtaaagcagttaggaatttagaacacactttgccgtagaaacaatttaaagtgttagacaattcctctttattgtaggtggaatgaaggctaaaaggaggttatgggagccagcagtttataggtctttggttaatggatgacctttgaaaagaggcatagaaaccacatactggctgaaaaattaaattcaacaagtatttattggtttgtgaatatacaggaaagagaattttaaaatttcccctgaagattaaaaaccttcaggggaattttcagtaatagagagtcaaaatgtggtaaatgctataacaaaaatgttatcaaagccctggggtagtgcatactacctcagtgagggagctttagggagatttaggaagacttccctggggaggtggaatttgacttgaaccttgaagataaggggtagacttttgattgctagaggagagaatctgtgatcacaggagaagcctcagccctattactctggctgcaacaatatttcttttcagttgtcacagcttgggaactaaagaaaggaaaagagattcgcatgttctttggcctagtcacccattcacccctgtgtatagctgtatagtcccaagtcaaatacacgtaaataatggtcacttaaagttagtatgttacaagttttcattccaagtgtcagttgtaagttttacaggtttaacaactgattaatttgttaataaacattttttgagtgcctaatctgtacaagacacttttagaaactatccatacaataatgaatagggcaaaggttctgccttaaacactttagagtctagtaattctgtttgtcattgatcagaataataaagcaacatttctctggttgacctgactcccattatcctttggctgccaatagtaaccctttctttctaaaacccatggggtgagaagggacatgtctggccctcttcctcatctctgtttccagagagatcagtgttgtgagtgcttgtggaaagtggggtcattttcaacttcctcctctttctagggacaatcactctgtgcttttcttatgcccacttaccctcccaaaacagaaattagacatggggattgggaagacatgagaattggtacccgggagaaacggcctcccatccactggaattaggaggaagaacatttggagttctttcctgtctccaaacttttcatttcttctcaaaagaaaaaaaaaaaagcctatcctttcttctactctccatcagtgaatccttgttgatgtaggcaactttgggaataaatgacgattttcatggacaaggcccccacctcatgatactctggatactaacaaaaataatttttatgcataataatattattctatagaagtcattctattttaaattcaattaatgcagatttttaaaaattggctttggtgattcatggcatattattggagggattaccatccagttttgactattagagggtcatctcatagccaaggccttggatgtttgcagttaagtttctgagctgctagtcacataaggctgaggggtaccctgttggaggtagtgagggtgcaaaaagtgagtattttatgcctagttctgttgacagagaatctgaactgtaaatattcctccttgaaagagtggatgattgagagttaactagagctatttcctgcttgagttagagtcacaatatatgtactatttatatttgtgtcttgaacaacaaaacaaaagcaagaggctggcagaggaactggaagaaaggcaatagatctaaagctgatctttgttttaaataggccgaatattctacacccatgactcattgtttgtgaaagaatatgctgtttggccttttcaggggaactacagtgcatcctatgatttagcatctcaatgagggcttattcattagttgaacaaaggctttttctagaaatgaggattatattgttagtaattttagagggaaaatgtcattgtccatttttatagttaatgtggtgtccaaggaaaacagcatcttttagaaattttgaaagtatatgggaaaaattgcatgcttgaccctttctattgggagagttttgtgctgacagaatttgaagcatatataaatactgttttgttgctttggaaatatttggaaattttttttaccctaagtttcaagctttcaaaaggaatttatatttttaattcgtgatatataaaattcagtttgcgaagaaataaaacactaattcttttaaaatcccaatgttttaagtaacaatgtactaaataaatgtttttttttgttcccctatacattaataaccaatggtaagtgagttttagggttttgacgaaagattttaaaggtcacagaacagttgtaattttttccccattgattattaagatcattttgcatagtttcagcttgcatggtcagttttatgactggcacttactggtgtggcaaagcaaggactgcctggtgttaactaggtgaatgaaattgagaatagactctggaaattcagttgctagctggcattaaggaactgcttgaggttatagatcatgacttttgaatgagactggaattactagtttttctttagcctcattcagcttcaggaggagcttctctctttcatagttacacttctgaagtaagtaagacaccactgcattcaccatcaactcccttcaggggcgttggggtggagcacaagggagttgatggtgaatgcagtggtgtaattataataataattgactgtgggatttaaactgaataaggaagagaaagaatatctggtgatagacaataaggtggtagcattggtggattaaagggtctcactgatgttaaagggttgatggaacctagagggaatgtgctgaaaagataagtggtggaaagaaagtagaatactagaagttgagattatgaagtgctttcagttatcaatagtgacaagttcagaagagtaactatggaaatgagaaactgaggtaggaaaaaatcattggagaaaagaactgagtgtagtggaaggatcatcgtcatgaatgatgaatgatgatgaatgaatgatgaatgatgtcatcagtcatgatgatgaggtggtgtcagagagactgacagtaagtcaggatctaaaaataaggaaataagggcagtaatgacttgggtgacaacaaatgcctgtaataagttggggtagtcagtgatacagtcacgtaactgtaaaactgagctactatgagaatagtcttaatggtcctaagggagaaagtggtagatagttgtgttttgtgaaatgaggggtggggagtatcttcccaagagtaggaagagttttggggttctcttttatatttgctagagtcctcctgatggagctcaggaatactgcagaaggattctcttgacccctgccagatgatggtccagaaacatagatattctcttggtgacagccgaatgcaatatattggtgatagggtcagaataatgagtggttattgcccttttttagaattcacaaatcatctatatgacaaaaagctaaagaccagtggtttttattgagggagagcttaggaacctgctaggttttagcattaaaatgcctagcataatgccttttccataggtgcttaataagcatttatggttttcattagttaagacagttaaatttttacttgtaattctcatttataattggttatacctaaatgtgtgatagtaatgacgtttcttctttgtattttagactatccccataaatacggtcctcaggggggctgtgcagatcattcagtatttgaaagaatgaggaaataccagatgactggtgtagaggaagtaacacaggtaaggattttaacactagcttgcatttaggaaatggaaatgaatttgaggatgtatatctacatttaaaatatatgttctaggatttctgaaagacttaacaccactgtggggaatgttttttaatgctcaaagaggccaggtaacgtgccaataataaagagataggactgaggtttgaatacaaatatatgtgacccaaaagacattacaagtctaaaatatactatcctttacatgttttgttataaaagaaaacaaatgttttatataaatgtaaatatttttattagcattaaaattagagtgaccacttgccttggtttgccaaggtattcctcatttttaacactgaacgttgtgtgtcagcagacaatctggttggtcatgttaataaaaatctcaggacttttcgtattttaattatttttttcccttcctttttctttagtcataggtgacaggttatagttattcaaaacataagttcaaaatgagaaaacattttttcttttatgataaaacatttatcatatattttggacatcctttctaaaagtagtatggtagagttatgtttcttgagccatgaatatttgtattcagatctattctttgatctgtaaaatggcataaacaattctgtttcaggtgggtctttctagtgttaagtgagattttattcttatatgtattgaagaagtacatattgatcttctgccatatgtcagagactgtggaaagttctgggaatatgtggagattaagatgaaggctattctcaaaaggttatcgtttaattggagacacagagaaacaatttagagtagtaggagagggttaagtataggatgatattctacacacaagaggaatagctaatctagccttataagtatttgaaggcaataatcagaccttaagaataagtaggagttaggttagccatgaggatatggaaagactattccaagcaggaggaacagtacatacaaaggccaaggagacagaaagatcagtaaagaatttttaacatgagggtagagtttaagagtagattttaggagactaatgagaagttgttgtagttattcagttgagaagtgatagtggcctgtactaatgtattggcaatttggatagaggggttgagattatagactgttagatatgatagaatttagcatggtgcttgataaaatattaatatacaaaagtaggttgcatttatttataccacgagtagactaccagaaatataatgaaagggtggacattgttaataatgtcagagaatattatatattatagaataaatgtaacaaagaattataagacctatgtaaggaaaatcaaaactttataaaaatattaaggaagattgattttaaatgaatggagagatataccatattaatgggaaataataatattataaaattatcagttctccctttattgatttgtagattcaatggtagtccaatacacattacaacaggcttattcacaacactcaatgggtcaaaaatgttatatggaaaagtaaggactaagaagaagtagggcccatttaaagacgatgaacaggaaagagggaaagagggatttaccctaggaggtattaagacttgctataataattgagagtgtgatagcacaaggatggacaaattaactagcggaataaaaatgagtgcttagaaaaagacccatgcgtatatgaaactttgttatgtggtagagatgcaatctcaaattagtaaggaaaagtgaggaccattgaataaatggatccagaaaaaaatgtttatctatttgaaaaaagatgaagttggatcaccatcctacaacaataaagtccaggctgtaaatgaagtccatatttacaacaaaaaagtctagatggattgaagttttaaatgtctaaaatgaaaactttgaaacttgtagatttccctttcaagctgtgatagagtaactgatatctaactaggctttctacaacaaacaactagaaaaccaaacaaaatatttcaaacaattattttcaaacattagaaaacaagcattgcaggattgatatctgagtgaggaaataaatatctctgtgatttccctgccttcttggctggagtcgaaatttcagatatgacacacagaaggagatctcaagaaggataaaaacacagcagtgttgctgagttgaagagttagaattaagagttcaggaagactgaggtgtctggacttacgggcgcaatacctgagaggagagagctgtgttgagaaaaagctccagatatctgcacaggtgttgctttccttgagtcttagctgaatactaagctgtgcctgcctgcacgggatgaaattctttgagaaaaccatgagacaaagaaaaactacctggactctgtgaaatgaacaactgtcaaaaacaatacttgggccaggtgtggtggttcatgcctgtgaatcccagcactttagaaggctgaggcagcaggaccacttgaggccaggagtgcgagaccagcctgggcaaactagccagatctcatctccataatagtaataattattattatttttaattagctgggtgtggtgatgagcatctgtagtctcagctactctggaggctgagacgagaggatttcttgagcccaggtggttgaggctgctgtgatccatgattgtgccatggcaccccagcccgggcagcagcgcgagaccctgtctctaaaaaaattacacttattagatatcccaagccgtggtagtagcagggctaacctagccctagagtagaagctacttcagacctgcccttcctaagcagaaaaacaaacctcaaaaatgtcaaactgcttttcaaataaattagctgtctgtcagagaaaagctcaataatatttgttaaaggaggacactaagtccagttactcagcagtataacattcagtgttcagcattcaaagaacattactagatgacaagaaactgaaaaacgtgattcataataaggagaaaagccacctaaatagaaacacaacgtctgttaattacagatgttaacaggcaaggactttaaaacaactattattagtatgttcaaagaattaaagacatgaacacaaaaaggagagaatggaaattctaataaagaaccaaatggaacttctagggtgaaaaatatattatctgaggtaaaaaatttagtggataggcttaaaagaaaattaattactgcagaactcaatatgaatatacttgagtaaaggaaaataaaatagacagtatccatatctaagcacagagggaaaataattgacgtccagcaggaagagatgcagaaaaaaatatttaaaaattaatgcctccgaatttttagatactaggaaaaatttcaattcatggtccaagaaactcaatgaaacacgtgcaggataaacacaaagaaaaccataccagggtatgttacaattaaattattggaaacacctgaaaatcataaaaaaccataaaagcaggcagagaaaaggagatacatttacatacaggggaacaaagataagtataactggtgacttctcattacacagtacaaactggaagacatagaataacatcttcaaagtgttgacagaaaacctgccaaactaggattctatattcagtgaaaataattttcaaaaacaaggcaaattaaagatctttttaaataaaaattgagagaatttgtgtctaggtgacctacactgtaagaaacattaaaggaagttcttcaggcagaaaaagataccagatggaaactcggatacacacagaagagtgaagaacataaaatagtaactatatagataaatattaagcagttttttctcatttaaaaaaaccttcaagagattattacctaagtccaaataataaggtataatggattttgtaatatacagagaatcaaaatttatgacagtagtgcaaaggacaagagaaagaagaatagaagtatgtttcttaaacaatttgtgaagtgatgtaattttgacaggtaaactgtgccgtgataaagatggatattgtaaaccgtagagccggggtcagcaaactacggcctgtgggccagatgtttgcttttgtaagtaaagttttattagaacacagccacacctattcattgataggttgtctatggctgcttttacattatagtggcagaattgaagagttgtgatagagaacaactacatgttgttcaaaagtctaaatgtttactattaggccttttcagaaaaagtttgcaggaatttcctctgcccttggagcaaccattgaaaaaagaagaggaaataatttaacatgttaataaaataaatcaaatgtatttaaaaacagttaagagaagttaggaagaagagaaaaaggaacaaaaaactgatgggataaatagaaaataaatagcaaggtggtaagtttaaatctaaccatattgatgactgcattaaatataaatggactgctgaggtgtgaagattgcttgaggccaagagttcaagaccaacctggccaacacagcgagaccctgtctcaattttttttaattaaaaaaatataaatggactaagcacgttaattaagaaactgagatggttagagtgattaaaaaaaaaagaccaaatgagcgtaaaagaaatgcaatttaaatgaaaagacacagttttaacatttaaagagctaggtgagatggttcactcttgtaggcccagcttgtcaggatgctgaagtaggaggattacttgaatgtagaaggttgagactgcagtgagccatgattgattgcaccagtgtactccagcccaggctgcagagtgagaccctatttaaaaaaaaataaaaagaaaaaaaagaaaagaaaatagctaattgttttggatttgggtcataaaatgatggaacagaaattgggtttagttaattatgctatgaattaatttatggatccatattctcagagtttatccttaaagacagtcttaaagtccttaagaaaataaagagagaacggccaggcgtattggctcacacctgtaatcccagcactttgggaggccgaggcaggcggatcacaagatcaggagatcgagaccttcctaacacagtgaaaccctgtctctactaaaaatccacaaccaaagttagctgggtgtggtggcggacgcctgtagtcccagctactggggaggctgaggcgggagaatggcatgaatccaggaggcggagcttgcagtgagccgagattgcaccactgcactccagcctgggcgacagagtgagactctgtctcaaaaaaagaaagagaaaacttcataacacattttatgagggcagtgttactttgatagtcataccagagacattacaagaaaactaagctacagggcaatattcctcagaaatataaaagtaaaatttcttaaaatattagcaagtgaaatccagcaatatatataaaaaaacacattatgctcaaatgaagtttataccagaaatgcaaaattgattaacattagaaaatttgtgtaatccaccacataaacataataaaggatgaaacccctctgattatctcagtagactagtaaaaaagcattgccaaatttcagcactcaacacatggcaaactaaaaatagaaggaagctttcttaggctagtaagagctttttataaaaaacctacagctgataccatgcttaaaagtgagagactaagtccttttcctttgagaccaggaataaaagctttttttttttcttttttgagacggattctcgctctgtctcccaggctggagtgcagtggtgtgatctcggcccactgcaacctccacctcccgggttcaagtgattctcctgcctcagcttcctgagtagctgggattacaggtgcgcaccaccacgcccacctaatttttgtatttttagtaaagatggggtttcaccatgttggtcaggctggtcttgaacttttgaactcatgatctgcctgcttcggcttcccaaagtgccgagattacaggtgtgagcccactgcgcccagccaaggaataaaaacttctactcagcattatacacaaagtcctagccaccataataaggcaagaaaaataaatgaaaggcatacagattataaaggaagtagttaaaggtaatacaagagtatacctagaaaaagttactagaatcaataagcagacttatcaaggacataggctaaaagttggtataatcagtcgtattctatatactggcaatgaatatttagaaaatgaaaaaaattaaaatagcatcaaaatataaaatatgtagaataaatttaacaaaatatgtgcaagatgtgtacatgaagaactagaaaacattgccaagaaaaattaaagattaaataaattgagaaataaactttgtttgtggttggaatcctcaatgttaatatgtcagttctccccaaattgttctgcagattcagtgcagtcagtatcaagacttccagtggacatttatctagtagttgacaaactgattctaaaagttatactgaaaggtaaaagatctagaatagacaaaacaattttcaaaaaagaacaaggatggaagatttaatagtatttggtttttaagacttagtataaagttacagtaatcaagatagtgtcatcttgacctaagggtaaacatgtaggtaaatgtagcaacatagagagtccacatggtcagttgatttttgcaaaagtcccaaggtaatttaaaagaggaaagaacagtcttttcaacaaatggtactggaacaattggatatccatatgaaaaaaaaattgagattcacctgtacttcacaccttatacaaaaattaactcaaaatggaaaatggacctatatgccaaagctaaaactaaaactaggaaaaaacataggagaaatttttgtgacttgtgataacaatttctcaaggcacaaaaattccctatgaaaaacatgtataaactgacttcatcaaattgaaaaaccttgcctcaaaaaacatagttaagaaaaataggaaaacaagccacagactgagaaaatgtccacaatgtctctgataaaaggcttttttccagaatagtaaagaactgttataactcagttaagaaaaaaaaaaaaacacaaaccccaattaaaaaatggacagtgcacctggaaagcctttccaagaaggacaggcacaaataagcccagactgtgaggactacagtgaatacgtaactcttcaatgcccagacgtgaaccaacatccacaagcgtccagaccatccaggaaaacatgacttcaccaaagaaactaaataaggcactggggacaaatcctggagaatggatccagagataggtgacctttcagatagagaattaaaaatagctgttttgaggaaactcaaagaaattcatgataacacagagaaggaattcggaatactatcagataaatttaaaaaacattgaaataattaaaaagaatcaagcagaaattctagagttgaaaaatgcacttgacatactgaagagtgcatcagagtctcttagtaacagaattgataaaacagaagaattagtgagcttgaagacaggctatttgaaaatgtaaagtcagaggagacagaaaaggaatactctaaaagaatgaagaacacctataatatctaggaaatagcctcaaaagggcaaacataagaattatgtccttaaagaggaggtagagaaagagataggggtaaaaagtttattcaaagtgataataccagagaacttctcaaacctagaaaaagatatcaacattcaagtgtaagaaggttatgaagcaccaagcgtatttaacccaatgaagactaactcaaggcatttaataatcaaaccagcaaaggccataaagaaaagatcctaaaagcagcaagaaaaaagaaacaaataacctacaatggagctctgataaatttggcagaagacttttcaatagaaattttacaggccaggagagagtggcatgacatgtttaaagtgctgaaggaaaaaattttttatcctatagcagtatattcagggaaatagccttcaaacacgaaggagaaataaaaactttcccagagaaacaaaaacagatggatttcatcaacaccagacttgtcctacaagaagtgctaaatagagttcttcagtcagaaagaaaaggatgtgaatgagcaataagaaattatatgatggtacaaaactcattggtaataataagtacacagaatattgtgtatctgtgattatggtatataaattactcatatcttgagtagaaagactaaatgatgaactgataaaaaataactcttcaggatatagacactacaataaggcatgaatagaaacaaagttaaaaagcagggggacaaagttaaagtgtaaagtttttattagtcttctttttgcttctataattatgcaatcactgttgtcatcagtttaaaataaggattgtaaggtagtatttgcaagcctcatggtaacttcaaatcaaaaaacatatgatagatacacaaaaaataaaaagcaagaaattaaatcataccaccggagaaaatcagcttcactagagggaagtcaggaaggaaagaaggaagagaaggccgcaaaacaaccagaaaacaaaaaaacaaagtggcaggagtaagtccttacttatcagtaataacattgaatgtcagtggaccaaagtctctaatcaaaagacatagagtagctaaatggattaaaaaaccccgaagatccaatgatctattgcatacaagaaacacattttacctgtaaagatacacatagactgaaaataaaatggtggaaaaagatattccatcccagcggaaaccagaagagcaggagtagctatacttgtatcagtcaaaatagatttcaggacaaaaactgtaagagacaaagatagtcactatataattataaagggggctgggcctggcagctcacgcctgtaatctcagcagtttgggaggctgaggtgggtggatcacctgaggccaggagtttaagaccagcctggccaacatggcgaaatcctgtctctattaaaaatagaaaaattagctgggtgtggtggtgggcatctgtaatcccagctactcaggaggctgaggcaggagaatcacttgaacccaggaggtggaggttgcagtgagctgagatccggccactgcactccagtctgggtgaccaaaccaagactctgttttcaaaaaaaaaaaaaaaaaaaaaggaatatatatatatatatatatatatatatactatatatatatatactatatataatatatatatgtatgtatggtatgtatgtaggtatgcaaagggttctgttcagcaaggaggattaaacagctgtaaatatatattaaaaatggttggatatttgtctcaggcccaaactttttggtgaattgtaatcctcagtgctggaggtggaactgggggggagttgtttggatcatgggggcagatccccccatggctgggtgctgtttttgtgatagtgagttctcatgagattgggtggtttagaagtgtgtggcatcttcccccacagacattcttgcttggctcctgcttccaggcatgtcatgtgcctgctcccccttcactttctgcccatgcttataagcttcctgagacctctctagaagccaagcggatgccagcaccatgcttcctgtaaagcctgcagaaccatgagccaattaaaactcttttcttgataaattactcagtctcagttatttctttataacaacgcaaaaatggcctaatacgtatatgcacccaacactggaacacccagatatataaagcaaatattattagagctaaagagagagagatagacttcaatacagtaatagctggagacttcaataccccactttcagcaatggatagaccttccagacagaaaatcaacaaagaaacatcagacttaatctgcagtatagaacaaatggacctaacaggtatttatagaccatttcttccaatggctgcagaatacacatttttttctcctcagcacctggatcattctcaagaatagaccatatgtttggttgtaaaacaagtcttcaaacattcaaaaaattgaaataatatcaggtatcttctctgactacacttgaataaaactagaaatcaataacaaaaggagtctttgaaactatacaatcacatggaaagtaaacaatatgctcctgaatgaccgataggtgagtgaaaaaattaaaaagaaaattggaaaatttcttgaaacaaacgataatggaaacacaacttactggctaggagtggtggctcatgtctgtaattccagcactttaggaagctgatgtggaatgatcatttgagcccaggagtttgagaccagcctggggtctatagtaagaccttttctttgcaaacagtttaaaaattagccaggtgtggtggtgcatgcctgtagtcccaggtccttgggaggctgaggcaggaggattgcttgaacccaggaggaggaggttgtggtgagaaagattgtgccactttactgcagcctgggcaacagaaggagacgctgtctcaaaaacaaagaaaacacaacataacacaacgcgtaggatacagtaaaagcagtactaagaggaaagtttatatagctataaatgcctgcatccagaaagaaaacttcaaataaatgcactaacaatgcattttgcaagagcaaaccaaacccgaaattagtagaagaaaagaaataataataaagataagagcagaagtaaatgaaatagaaatgaagacagtataaaagatcaaagaaacaaaaagttgttttttgaaatcgtaaacaaaattgacaaacctttagccagactaagaaaaaaaaaagacctaaataaataaaatcagagatgaaaaaggagacatcacaagtggtatagatgaaattcaaaggatcattagtgggtactttgagcaactatatgccaataaattgcaaaatgtagagaaaatggatacattcttagacacatacaacctaccaagattgaaccatgatgttcaaaacctgaacagaccaataacaagtaatgaaattgaagctgtaataaaaagtcttccagtaaagaaaagtctgggacccagtggcttcactgttgaattctaccaaatatttacaatataactaataccaattgtactgaaactattccaaaaaatagaggaggagggaaaacttcaaactcattctaggaggccagtattactctgataccaaaagcagataaaggcagcaaaaaaagaaaatgacaggccattatgtctcatgcatattggtagaaaaattatcaacaaaatactagcaaactgaatttagcaattcattaaaaagatcattcatcatgactaagtggtatttatcccagggatgcaagaatggttcaacgtatgcaaatcagtcagtgtgatacatcataatggaatgaaggacaaaacttatacgataatttcaattgatgctgaaaaagcagttgataaaattcaaaatcctttcctgataaaaatgctcaaaaaattgcgtatagaaggtacgtatctcaacataataaaagtaatgtacagtgaatccatagctagtatcatactgaatgggcaaaacctgaaagccttttttctaagattgggaacacaagaaggatgccttctttcagcactgttactcaacatagtactggaggtcctagctagagcaatcagagaagtgagagaaataaagtgcacccaaattggaaacaaagaagtcaaaatatccttgtttgcagatgatataatcttatatttggaaaaacccatagactccaccaaaaaactattagaactgataaacaaatacagtaaagttgcaggatacaaaatcaacgtacaaaaatcagtagcatttctactgttgtttccagcaacaaacagtctgaaaaagagaagcaatcccatttgcagtagccacaaataaaattacatacctaggaattaaccaaagaagtaaaagatctctacaatgaaaagtataaaacactgtgaaagaaatcgaagaagacagaaaaaaatggaaagatattctatgttcgtatatcggaagaatcagtgttgttaaaatgtccataattacaaaaggcaatgcaattgctaccaaaatgccattgtcattcttcacagaaatagaaaaagccatttgaaatgttttatggaaccagaagaaactcagaataaccaatgctatcctgaggaaaaagaacaaaattggaggaatcatattacctgacttcagattatactgtagcgctatagtaaccaaacaacatggtactggcatgaaaacagacacgtagacccatggaacagaatagagacctcagaaacaaattgatacacctacagtgcattttttacaatggtgccaaaaacatccattggggtaaagacaatctcttcaataaatggtgctgggaaaactggatatccgtatgcagaggaatgaaactagacctctatttctcaccgtatacaaaaatcaaatcaaaatgaattaagacttaaatttaagtgctccactgtgagactgctgcaagaaaacgttgaagaaactccccactttcatgtggacaaaaatttcttgagtaaaaccccataagcacaggcaaccaaagcaaaaatggacaaatgggatcacatcaagttaaaagctgcggctcagcaaaggatacgattaacaaagtggggagacaacccatagaatgggagaaaatatttgcacactacttgtctgacaagggattaataaccagaatatataaggagctgaaataactctatagaaaaaaatctaatctgattaaaaaatgggcaaaagatctgaatagacatttcctaaaagaagacatacaaatggcaaacaggcatatgaaaaggtgctcaacatcattgatccttggagaaatgcaaataaaaattacagtgagataccgtctcacctcagtaaaaatggcttttatccaaaagacaggcaataacaaacgctggtgaggatgtggggaaaaggaaaccgccacacactgttggtgggaatgcaaattagtacaattgctatggagaatagttcggaggttcctcaaaaaactacaaatagaactaccataatccagcagtcccactgctgcacatctacccgaagagatacatcatagagatagctgcactcccatgtttgttgctgcactgttcacaatagccaagatttggaagcagcctaagtgtctgttaatagatgaatggataaagaaaatgtggtacatattcacaatggaatactatttagccataaaacagaattagattctgtaatttgcgacaacatggatggaactggaggtcattatgttaagtgcaataagctaggcacagaaagacaaacttcacatattctcacttatttgtaggagctaaaaattaaaacaatttaactcatggagatagagagtagaaggatggttaccagagggtgcaatgagtattagagcagtggtgggggaagtggggatggttaacgggcacaaaaacatgttagaaagaatgaataagacctagtatttgaaagcacagcagggcaactatagtcaataataattaaattgtacattttaaaataactaaaagagtgtaattgtattttttgtaacaaaaaggataaatgcttgaggggatggatgccccatttaacatgatgtgatttacacattgcattcctatcaaagtattatatatcttatgtaccccataaatatatatacctatgtattcacaaaatttaaaaacaaaaaataaaaaaatttaatagataatgggcaaaacatttgaaaagacacttcacaaaagatattataaaatattttggattttgatctggagaaatggtttgaatatgtaagacttttcagtataaaaaagatgaatatatttcactatatgaatattaaaaataaaagacaccttaaagtgaagacaagttataaactttgtataaaattttatgctttcacaatgtataaaattaataaagaattgtttttaagaagtagagaacaactgattagtacaactaatatatagcaacctggcctgaaaataaaaatattttaaaaatatatgtgtatgtatatttccatatacgtgttttgtatatttgtgtgtatttatttgaaggcattggaaagataacatgactgtgaagtagtacgcggccaagatttcagaaaaaagtatacagctagaatggtgatactggtatttggttctaccttttctccaggtgtgtctttgagtttctgaggaggtggctgagagactgagagggagagtagaactgtgcagacacatgaggctgaggatgaaaatattgtttaggatctgcccagaagagcttttggttgggaccttgaaggactactccctaagaataagggtataaattataaaatgttcagtctctcttcacagggattaaagtttcacaccacatctcagtccctaactggattaaggtgatccaggattactagtgcaccaagcctaactctgcttaccagaagtgaaagtaaatcttttgagaaaggtgtcaatcacaacttcacatcaaatctgtggttatccatatacatagcctggcactcagttcaatgtaaccagtatatgaacaaacaaaacaacatgatggaagaacaagagagtcaactgacaaaggaaatggtacctggataagaaaattatctgacacagactttaatatattcaagtcataaagactaaatttaaaattttagcagaaaattgaaaattaacaaaagaacttgatgggaaatttagaattgacaaatgttaacaacaaaaattaggaatttgatggatttagatttggatagtataagaaaatagagcaaactgctaagaaaaggatggaaaatacagaaaagagcataagagaaatagatgataccttcagaaggtctgatatatgtattatgtaattgatgtcctagaaggaggaaaatggagagtcaaggacaggtaatggctgagaatttttccaatgtaacagagagatatcaaacaacacattcattaagccctgtaattagggcaggataaatgctttacactgaaaacaataccatagcacattatttgagaagtccgaaagccaaagatataatcttaaaagcagccggtgagaaaaagtttaatcactcttaagcaacagtaaacatggcagctcatttctcattggaagcagttaaaaagacagaagacagtaggatatgctgaaacagagaaactgccatcctctaggatgctctactcagaagaatagatcaaagtaaaattaacacatttcaaatggaatatataaccatctgacacgctaaaagtagtttttttcctgttgaaaagattgcgggctcaaatgctaacttgtagatgaagtattgaataaagaacacattagataattttgagtattgactgtatactacaaagcactaatagtaaagacttgtagggtggtatatatttgtatgttgtgtatgtggatatagagggagttaaaattggagtgagaaaaatgtaatttaagtgttctgaggttcttttctaggaacaagtaaatgttataatttatatttgattttggtaagtcaagtattagtaaaatatataactaacaagctaatgggggaagggatagaataaaaattcaaaatccaaaacaaggcaagaaagaagttaaagaagactattgaacaggcaggacaaatagaagataataaaattggagatttaaaccccaaaatatctgtaattatattaaaggtaaatggattaaatgcaccgattaaaagataaatattatcagattggatttaacagcaacaaaaccccacaaactgttttacaaaaactgctcctaaaatataaggatgcagaaaagatggaaagtaaaacagcacaagatgtaaactttgatgactctaacaaaaatatgtctattatcagccaaagtagattttaaggcaaaaaaaaagcattactaaaatagatatgtcataatgataaaaagtttagttctccattatgttatagcagcctttaatttgtatgtccgtaatattataacttcagaatatgtaaggcaaaagttgacaaaaccggaaggaataatagaaaaatcatatgataaataagagaacagttgtacaaaaaataaaacccagtgaagatatgggagagctgaactacttgatataataaacttgaacacctttatgttatttttttctgcttggaacactttttcatatttcagactgttttcttatttaaaacctttctttaaatagaattttcacattaaagcatccagttttttttcctttggtctggagtagaaaatctttcacacataaaacttcaccattagctaagataaattcctttttgtgtggaataacatgattgtaaatataaactgcatttcacaaataacatggatttgaaatacttctcaatgtttgagtcatttacaaactgtgtaaactgagacctggagaccatctaaatcaaaatcctgagtggaacagtattcaaggtaggctttggggacagttcccccaaatgttacactgtttcagtagtgttggtacccatctataatacaaattgttttaaaaataagttttattgtgtatatatcaggtatattacatgatgttatgggacacatatagatagtcaaaatggttactatagtgaagcaaataaacatttccatcatttcacatagttacccttttttgtgtgtttggcatataatacaaatttttcattttgtgtatgttcacatggaattattaagggagaaggaaatgtcaaggaagaagaaattgtgacttaaaattcaatttgggttctatattactgtgccatcaaaaatacttaagatgatccttttaggtgttcacaaatgtttgactggattcaatagcagtggtaattctttgaagaaatacttaattgaggccaggcacagtggctcctgcctgtaatcccagtacttcgggaagctgagacaggaggattacttgagaccaggagctcatgaccagcctgggcaacataggaagacctccgtctctacaaaaaaattaaaaaattagccaggcatggtgatacatgcttgtagtcccccagctacttgggaagcttaggcgggaggattgtttgagcccaggagtttaaggctgcattgagctgtgatcatgccactgcactccagcctgggtaacagagtgagactctcaaaagaaatacttggcgggggtggtggctctgtaatcctagcactttgggaggccgaggcgggcggatcacgaggtcaggagatcgagaccatcttggctaacatggtgaaaacctgtctctactaaaaattcagaaacaaaattagccaggtgtggtggcaggcgccggtagtcccagctatgccggaggctgaggcaggagaatggcgtgaacccgggaggcggagcttgctgggagccaagatcgtgccactgcactccatcctgggcaacagagtgagactctgtctcaaaaaaaaaaaaaaaaaaaaaaaaaaaaaatacttagtgtctactctttgctgccaagcctgtgttaggtgatagcattacagtgaggatcaaacagagataatttcttctttccagaacttacattctagtgggtgaagtgggatgtggacagaaattaaataatcccacaaataaatgtaaggttgcactatgtaagagacattggtgtatgattctatggagtggtataatggatgaattgaccttctcgaagtctaaggaaagaaggaagccattaacaagatcagaagaggtagtgtcagcatgtgcaaagactggcaggagatagactgtgtgtggaggattggaaagaaagcttatatagctgtaccacagacagctagagttggctaatgtagggtctctttgtgaagtaatgtggaatgagaaaagctggatagttaagtagaggctgtgtaatgttgatatttaggggagcatataaagaatattgggcttaatcttttagagcaataggaagtcattgaaatacattattgaggtggatgacatattcaaatttgcgttttgaaaacattgcaatatggagaagagatgtaaggccattagtggctattggttgattaaactgatcttactgcagtactctaggtaacaagtaatggtagcttgggctagagtggtggagccagagataatgggtagataccttaggtatttaggagataaatttgacagaactggatggtagatgggtattagatgtgaggtagagaagatatcaaagtagtataagctattatacaacttgctttagatttaaatgaatacatattaaaatacatgttttgaaaatgtttaaaagtgaaggagttccttgaatagatagtaaataatctatatggagaagattatgagacaaagtgattttatgaacttttaatggcagcagaaatacctatggtgttatataaagcagaatatgaaattgtttatagtatgtattcttaattagataaaatgatagtattgaagcatactaattgtcagaaatgactttttgatgtatagatacctcaagaagaacatgctgctaatggtccagaacttctgaggaaaaaacgtacaacttcagctgaaaaaaatacttgtcagctttatattcagactgatcatttgttctttaaatattacggaacacgagaagctgtgattgcccaggtatttatgattatgcgctattttagtagttcccatattgttttataatgcctattctttcctttaaaaatttaagttagtgtattctctttttgggaaaaagtatgtgttttcagttgtgatgtgataaaatgtgtaagataagtacatggataactgaaagaccagttgggatattttagtgtcaaaagagaggggtaagacaatgatttcctgaaggagatgatgacactgaagtttagctttggaaagagagttgaattttcatttgtggtcttaaaggagggaaagttggaggaatccttccaactggaagtatttaattttttttctgtatttttattgtatgtagcactttctaagttacattattatttgtacttgtgtcttctcaaccctcattaaagtataaatattttgagggtgcccttcaaaatgtccttcgtgtggaaggtacccagtgagaatttgatgaatgaacttttgactcaaaggatttgaaatggagaagatggaggtacgactagtataaatgaatcattttggtggtgaggatgaacttccttttaaacatgtataaaagctaggtagttcttcccttaggattttgaaaatgtgaaactagagcttgagggaagggtagccttgagagattgaatgtggaaagaatgaaaccaaaggagaagaaattggagctatctgtatatggtgaataggttgaggaagagaagctagtgaggaaaacataatagtaataaggtaggagattttgtaggatttaccaaggaacaaataaatttcaagacaaaatagcgtgaattttataatgagccctatgagcagttaggaatttcattagcagtgtttggcagcgtgggctacctttgaaatgattattgttaatgcttttacttgaccatcttgttttatgttttatgtttatgtttttacaatttctttgaaaataactttgagactatacatacatgttttcacataaatggtagcaagagtactttttgtaaatgaagttgggaaggttgtttacagagtggtttagaagtcagaaagtttagttgggggtcagctaggtaaacggatacttttgggtttatcatcgtttatctccttgtagaatttagcaaaatctgaatgtatgtttattatatttgtattatctccctcctttcttccgctactaaagtaagcctctgtaaatttatagggaccttctgtattttgttcaccactatatccccagtgcctaaaacagtgccaagaatatagaaaggggtcaacaaagtttacagaatgtgcagcaatagaaggattaaagtcagggaatgactgtgtgtcctgagccatcagggaagttcttataaaaatgtttgagctgagtctgaaggataaatagagaaggatactctacgcataggaaatatgtgaaaaggaatggacgtgtgacgttgtaggattggattgaggaaacaaaatttttatgtgactgaaacaagagtatatgtttaggccagttgtggtggctcatgcctgtaatgccagcactttgggaggcccaggtgggtgggtcacttgaggtcaggagttcgagacgagcctggccaagatagtgaaacctgtctttactaaaaatacaaaaattagctgggcatggtggtaggcgcctgtaatcccagttgtttgggaggctgaggcaggagaatcacttgaatctgggaggcagaggttgcagtgagccgagattgcaacactgcactccagcgtgggcaacagagcaagactcttgtctccaaaaaaaaaaacaaaaaaagaaaaaaaaaaaccgcaaagaagtatgcatgtttattgttggccagaggagtctggaaaagaaagtagaatctcccttcccagcgcagctcactaatcttttttatatttatgtccagtatataatgttgacattttaaaatttgaatgtggcaggacatgaataattactgattttggaaatggaaatttataatctttttcatatttcaacattgcctctaaaatgttcttttttttaaatcatagatatccagtcatgttaaagcgattgatacaatttaccagaccacagacttctccggaatccgtaacatcagtttcatggtgaaacgcataagagtaaggaacttaaatagttaaaaacacttaaaaagtgaaacagtccagactatgtttacacacacacacaaaagcttgcttttaattttatctttatgaattaagtagtttagtttaattgtatctgttgatgcagttttttactcctggcatttacacacccacacacacacagatacttgggtttatgatttaagaattaaatgtataaggtcttaatccagtctacagtagaggtaaagtgtgtattcagtctgtctgattaacatattattaagaaagctctgacccttcaataactatggctatagtgcttgacttttccccaattatccctcagtttcctaaaatttgctttgtgcagtgtttttcactgtatgttccatttggtgttccaggggagaaaaaggataaatacagtgtttaaataaaattggaagttggaaaaacccttagtactataatcttcttgaaaattcacaactcacagtaacatatatcaagttttgagaagtctttcaggaaagaaacccatatttttctaaatttttgaccatgaaactttttttttagaaaaaatatattaacatcaacagattccaaaatactttaggcattttgagaaaagctgatccggagccatagggtcacgtagtatgagttctaatgttataaattacaggtaaataaataaatattaaattactgacaaatttaggctattttttcaaaagatttctgaatattctaaatatatatgtatagcttttaaagaaacagtatttatatgctaaataaacaaccgaacttaaaaaaaaatcatcctttcacaaaagtatttgccacagggttccttaatatttatgctttcctatttttcttcaaatgtggttggataaaatgtctatactagagaagtttagtatatacattcagccacatagctgtaggtagtccttaaatttagaagcagtgtgattaaatcttaaattggattttcttaaggtgaaatatgatttattgatttacagtataagaattgttcataattaattgctttcatgtattctgtgaacaatataaatccttaaatgagcaagtaacagtgataagaggtataagtgttgctgtttagtaggcagagcaataaaatgcaagtaatgaaaagtagagagcacctgaacacattttagtgacgcacctttgaggaaaatgatatgtattatgaagaaatgcatgtatataagtaaatgatgtggtagttggttgtttttagaccttacctcttattaaaactttagtaaagttttatctgttgaagattgttcataacctattaatttaaaatttctgtcagctatattaataatccatttaaatataggtaattaaaatttaaatgcaatttgttttttttttttgagaaggagtctcactctgtcgcccaggctggagttcagtggcgcaatctcggctcactgcagcctctgccttccagtttcaagcgattctcccacctcagcctcccgagtagctgggattacaggcgtccactgtcatgcccggctaatttttgtatttttgtagatacagggtttcaccatgttggccaggctggtcttgaactcctgacctcaggtgatcacccgcctcggcctcccaaagtgctgggattacaggcgtgagccactgtgacgggccttacatgcaatttttatttatagccagtattagagaattactaggaaatttcatttttatatttagtgggagaaagccatctacagcatgtcttcaagcatggactatctgtaacatacagtgtgcttgcttttgaattgttttagtgttaaatggccgtaactgattgtttttcgttaattgttaatagataaaccagatgttctgaaatctgttcttaagcagttgccctcaatggtgtttttgcctccctgcttctgagcctcttggttttactggagagtacaggtcataaagagacctgtagctcttgttgtatcaaccattatgtcatcctcttactgccaacattttcaaacagactgaggtttgcctttcggtaaaaacatttactttcatattgtaattccttggcttacctggggaaagccaaatcgttctaggacttcagaggagacacacaggtctctgaaaggatgcaggggctaataaataaaagcttttgtttaatagaagtctggtattagaacagattattcagattctgaaggaggaacctgtggtaggagtatagtagctaagtatcaaaagaaacattctggaagaactcagcttcaaagagtaaaagaagtgagtttaaattagcaaaattcttgcccacattcaggaaaaaaaaataaatttgcagttagtttggcttggctcatgtgactctctaggcaaggaaaaccaggaaaatgatttgtctgctgaactgacagtcttgggtttgatacctattttatattctagtaattagttaaaatacagggttttatatccttgtaagtgtcaccatatgtaggagattaggactaaaggagacttgttcagagaattaaatttgaaaaactatacttcctttactaaaggttttgaaagcaaaacttgttttttcttcccaagtgttcagtgttcaggaatctggtgaatacttgctcagaaatttaacatcttcaattttaatttccctacctagcctttcttttttatttgttgttattgttttgccttctgtgatcagctcagggatgtgggcagtgggaacaaccttagaagccttaattcaggcctgatttccatgggagcatattgtccaggtgtacgcagaagaaggtgagcagacattcacactaaagctctgctaacattaattacttactaaattattgttttggattttagatcaatacaactgctgatgagaaggaccctacaaatcctttccgtttcccaaatattggtgtggagaagtttctggaattgaattctgagcagaatcatgatgactactgtttggcctatgtcttcacagaccgagattttgatgatggcgtacttggtctggcttgggttggagcaccttcaggtagtttatcatattaaatatgtcttaacttactacttgaaacaaaggggagttttcagagaatgttgaattttcaaagtataggagaaagtgatgcctgtataatatcctaatttatgctacttgagttaggcaagactcataagcataatgtaaaagccacaatagatgaaggagctttttattttgaaacgcatacagggaaatatcctgattcctgacatttgaatggaccaaatgaaataaataattttatgagaaaaagtggtaattctgaaacccaaagggaaatttaatttttccacaaaagttaataaatgttatatatttattaacttttttcccctccaaaatagggtacttagaatcaaaagaggaaaactgtgtcttgctctctcttctgtagtgagataaagaggagagaaatcctcatcaagagtggcaggtaaaaggaaaagaaagcctgcctttattattttatttctagcctttattttaataaaagggaagcactgcatgaaagagatgtaggcaggaagcccctggtacccacaactccattgacatcatcacctgggttcatactctgccgagtctctgccttagccatgaaagctattgtcattgataatgttgggatgggacaatacccttcccattacagtgggggtggagtgttgtggaggagctgtgatttactgtataagttcagttgcctagtttagaaatccaaatttattaattgaaagatgagtggaaaggaccccaggctctttgaatataaattgtgccaagtagagtttaatcaatagtatattatcttctgagctatatacaacagattctccttctgatacttcatttctatgtttttttttttaaaaaaaacttctgctttatccagagtaagagaagcttttgtattcctattcttattagtttattctttgatttgttttgtatattttaagatcttaagtagtgctgtattttcctttgtatttctttctccttttttaaaagtcagtatcttaagtcaatacttttacaatttccatagcttcttttgtttttcttctatgttttaaaatgtactcaatttcatgatgtcattttaaagtataagtttatgtcatgggctgcatattaatagtgcagtacttttggatatttgtcttttatgataatctgtacttttttgttacttggattagtcagcagattgtacagctcactctttcctatgatttttcatgttcgaaactttcatactctgaaacctctttgccccttcaatggttggatgattttatcacaaagtctgtgatttcttctccctattcattagtaagtactactaaaaactcagggtctcatatgattttatttgtatattatccattaatacagtagctgtgaagtctcaaacaagtggttctccaagtgtgatccatggactagcaccatcagcatcacctaggaacttgttagaaatataagttcataggcactaccccggtctcttgaatcagaaactatagatgtggagcccaacagtcttagtttgaacaagttctcaaagtgattctgatgcacagtgaagtttgagaagcaccacattaatatttttgtctctaaagcttgctcacaaaatgcctcctgggtaagtgagtatgtgatcttaaactaaaaactttctgccattttgcattttcagttacagactattgtacttaaggatgtaatgattctgtaggaatttggtaaaattcttcctaaatcttcagatattctcatgtctttagattcagctactcattttgttgtaaaaagtaagctttattttttagagcagttttagatttacaaaaaattgaacagattaggtattctcaaatctccttcctccctcccctgacagttttgaggagtactgatgaggtatattttagaatgctcccctatttggaatctgtctgatgttttccttatgattaaactgtagttatgggtttttgggacactcagtgtttatgtctcattgtttgtgatatttggatcaccatttgtgatgctgctcattttcctgaggtggggagagttctggattgaaaatggtggggcatgttacttgtattttctttttttttttttttttttttgagacagagtgttgctctgtcacccaggctggagtgcagtggcgcgatctccgctcactgcaacctccacctcccgggttcacgccattctcctgcctcagcctcccgagtagctgggtctacaggcgcccgccaccatgcgtggctaattttttatatttttagtggagatggggtttcaccgtgttagccaggatggtctcaatctcctgacctcgtgatccgcccgcctctattttcattattagggtcttcttaaaggtgaaacaagatacttcctgtgtacttcatgagcaaaaatatggtgattggcaaccagaatagaaaacgaagactcccgttgtcaactttgtatccccattttccccccctctgctttttttccttttatattattatctctctttctttcagacattagatgtccgcttccattactctatgttaaacccccaacttcagctcttggaagccatcttctaagagctgctggggaggggctaggcaggcacagaagaatagaggccatagtgggaaagaaaagggatctttgttcctttggtccaactttttcgagtgtaggttacctgccttgaaataacactgccagcttcttcacttgtctttgcacttactactagctgaactgagtttcatatttgacatttttttttttaaaacaaggaatgttatatatttattcttgattatttcaatacccttatgaggtgtaggtattattgtctcccttctacagatgaggaaacttgtgttcagaaactttgtgaccaacctaataccacacagctagaggtggaacaggatctggaatctggaccttttgactccagattcagttcatttggtaattatattactaggtattttatatatatataaatacaatctacacacacacacacagtaacatcttagccttttctttgatgtttcaaataagaagctgaaatgttttctgcttcttagtagaggttatacattggtggaatctgttttcttctttcttgagagagaagagttataaaatcatactaagctataatattttgatataattttgggtaattgtcatggcataatgggaagagcaatggactgagagctgggagacaggattcttgtgtgttttctgtctgtaaattcaggaaaatcattttgcttctggctgttttttcattgtagttctgtctttgcccttcttttgagtcttcatgtttctacctataggtcttatcagttaactgaatgaacatagtctcagttcggcttggtcgttgaatgaggctggctttggaattcatctctacagttagtcctgaaaccttcagtactcctctatttgtgaagaacatcttttgaggcatttcatttggtagaaatagtctcttctgttttctttagattagatgttttagtttgatattacatattaaaatttgagagcgtacagaacttaacacagggttctcgggataacccacagcttattgaattcttaacccatagtttaaaagtataacttcaaatgctgggaaaattacatcattgaaatattgcaataggacacttgctattggcatttaatgcttgtctggatcccttggatatttaacatctttgatccctacccattgcatgtgagtagtgctctccagacttgaaagccaaatgcctgtgctctcacatttcctggtatcacttgtgggagtattactatggtctggtccagaattattgcttacattaatattgtatgatcagcatgctactattaatttttggcctcctcacatcaaaactgtatttatggaatatgtcaaggtatcatattactcttgtatttttttctaagacttttttttggggggtggggtggagtgggtctgttttgaagtttaggacagatactctaactttagctctcaaactatcctgtagatagaaaattgtcattatacttctttgttgcttattgaatccttcatcaataattacttttgacccgaattgaaaacgtttcacccttctcattgttattcacaacttatgtatttgtcagtgataaatatatgtatagtaaaatcttaaatttaaaatatatagcaattgagtttgagttaatggtttagctgtgggtatatatgatacctcattactgagttttctggcatatcaaaactagttgcagtatttaaaaaaattaaaccataactttcagagttacaaatagtattttatttcttcctgtataatcaagttactccaacatatgctattagcctgcaacaaatattaaacttcctttttttttttttttgaaacgaagtctcgctctgttgctcaggctggagtgcagtggcatgatctctgctcatggcaacccccgcctcctgggttcaaatgattcccctgcctcagcctcctgagtagctgggattacatgcatgcaccacctcgcctggctaatttttgtaattttagtaaagatgaggtttcaacatgttggttatgctggtctccaactcctgatctcaggtgatccgcctgccgccgccacccaaagtgttgggattacagacgtgagccactgcgcccggccattttaaactttcatataagcgataatcataaagaccaaaagcagttgtttaagaagttaggcaatatataaattactatatttcagaatagtatattctaatttatgtatactcttctcttaaattagccagaccctaaaagtgcagaaaaatgtatattatcagagatttaaaaatatgcctatttactttttttttttttaactgataaagatttgaagtgtggagtcttctatgcttaattcaagtttgacagtactgcattggaccaatttgcacatgacaaatcttcactaaggcaggatattaatttactatttgtttaaaactatgctgtgtgtacaataattattatatacagaatacttatttatatattttctggtttccagaaataatgatgtgcttctcaggactgagctccaaaagtagaactagcttgaagaaaatatattaaattctcacaaattatttggtattttctctctactcagttgtcagtgtagaaaaggtattaaattttgaatatcataaaagttctcaaccccttgctgggttaaatttgcatgtgactccagctatttgtccggcctatagtctcaggtcactcattttaatgtgcatatacatcacctgaggtgggcagagttctggattgaaaatggtggggcatgttatttgtattttctttctttctttttttttttttttttttttttgagacagagtcttgctctgtcacccaggctggagtgcagtggcatgatctctgctcactgcaagctccacttcctgggttcacgccattctcctgcctcagcctcccgagtagctggggctacaggcacctgccaccatgccctgctaattttttgtatttttagcagagatggggtttcaccgagatgttctcaatctcctgaccttgtgtttctttgaaacacatttttcttttcagctttctgaattttaacagtaattcaaatttgtattttgttgccatatatttattatatttaatgggagcaaggcaacagtcgtagtataatgctgttcttgcagacctattttgaattgccttctgttacatgctttattagggattctaaatactagacttgtttttgaagtggggagaatgggaaggggaggagaagcaatattagactttttttaaatggtttagtaactttgttgtaacttgtctatagaaagctaattagagcagttatcgtaatacgcttatccatttgattgtatttcttttaaaaatcaaatagggaaaactttaagtataaatataaactaaataacttctcactgaaaatcttataataaagttaattaaaagaaaatatgatcttaccagtgtaatgtctatataaaggcatgaattgaccagatggtttctgattttcctattattatttttctgatttctcttaattgattttagctgtgaaagcactgtcatttgctgttaaattctaaagtccctgttaatgaatagatgaagtacaaaatgataaaaatatttaagtggaaatatggtttttcttttaaaatttgatagtgtcctaaagacatactggaacaatcataattcagtttttaatttttttttgaagatttcaaacctgcggaaaggttgcaagaatagtatggtgaaattcttcttcttttttttttttttagacagagtgtcactgtgtcgcccaggctggagtgcagtggcacaatctcaactcattgcaacttccacctcctgggttcaggcaattctcctgcccgagtagctgggattacaggtgtgcaccaccacacccagctaatttttgtatttttagtagagatggggtttcaccatgttggccaggctggtctcaaactcctgacctcaagtgatctgcctgcctcggcctcccaaagtgctgggattacaggcgtgagccactgcgctcagcagtggtgaattcttgatggattaatcaattattaaccttttgtcgcatttgctttctatctctcccttccttcccacccatcttctctttttccttctttcctctaccccctctttttttttttttttaaccttcttgacatgattattttctatttttacaaatacattgtatgtcatatctcaggacagggaatcatgtgctcatgtgcctcactgcttcttgtagaagtgactttctcagaatcttcttgaggatattttgttcaactttcatttaacttaaatcataagatttctttttaaaagatgaaaggatgtacactttgacttagtgtaaatactgatatattcaaattgaaaggaaatgtaaatatttgttttcctaaattaatgggaataacatttgggggacattttgattgtgaagaacattttgtaaaggctgtgtactcagtcctgggagtttctttctgaatgtcattaaaacttttatatgaagtgacttcttagtcttggaccaaagaaacttttgcatatgtgatacgtttgagtaccagttctattttagattaaaatataaaatgttttcatttaatatagcatgtattacctttttgggggtaaggggaaacagatactaatttagccatttttttgttctggattaggaagctctggaggaatatgtgaaaaaagtaaactctattcagatggtaagaagaagtccttaaacactggaattattactgttcagaactatgggtctcatgtacctcccaaagtctctcacattacttttgctcacgaagttggacataactttggatccccagtaagtattgtctaattattagcttaaaaaatacttattagtctaatttttatgttgagtgatttatttaaaattcaccgtgaaaacaaatgtacttacgagtgtttagtttttatgtcagagcacagtaatgtatttgaccatactgaaagggaggaagatagaatgtttgtggttaaagtaagaaaagtaagcataacagtgctagaattctgtgaaggcaagggatttcatctggcttattcagacaaaatatctatatctcctggccctagaacaatgcctagtacataatgtactcaaatatcttttgaatgagaatcattattcattgtttaaaagtacattttgaatgttcagcaaattgtgagaaattctttttttgttttgtttctgttaaagcatttttagggaatgagattgatattttaaaatcttttctctactgtggaatgagattgataatttaaagtattttctctaccgtggaatgagattgatattttaaaatcttttattaggaaaaaattctaacatacacaaaagtagaacaaatagtgcaacaaagcgttatacgcccatgattcagaacagggatcagcaaacattttctgtaaagggcctactagtaaacattttaggcttcaggggcagtgtttggtttctgttgtacagtctttgttgcttttacaatttgttaaatatggaaaagccattcttagttaagccatataaaaacaggctgctggctactttgtcaacccctaattcagagccaataattgtgaagattttgacatatcttctatctgtatttctttttctttgctaaggtatttaaaggaactctatctatccttacgtatttcagtacacattcctgaaaaaatagacattttctaatacaactacaatgtggttattacacctaacaaaattaacagcgatctttgatattatctaatatccagtccattatattgatcttttaagtgaccttaaagatcagtacaacacagaaatatgaaatactgaatgatactctgtctttgtgattttggtagagcttattaaagataacattttgaaaatgtacacttgaaaactgtatgtaaattcattttactttcaccttatcacttgcaaaagtgcaaatttttatgattttaaaaataagttgtctacttgtagcttaaaatccccaaatgcacttctctaatttttcccatgtttgtaaaataggtgccatctcactaagttgcaagtctttcttcttctacatcccaatcagaaattgatagattattattaatgttcttggataaggtatttaaaatgtgcttaatctctgtaactcttgactgcttttgtgatcttctcttaaaagagtacttggaattttagagatgagcagagaattattgttcatagttgatttgcattttcaagagcagataagtgtcctctcttctccccaagtcatcttggttccaggccttaccaggggaattttagtactcctccagctacttgtctggcctttagtcccaggtcactcatttttatgtgcatatacatcacctgagaatcttaaaacacagattcttttttagtaggtctttgatggggcctgagtttctgtatttctaacatactcccacataatgctgctgctgctgctgctggtgctcatctgtgaaccacactgcagtagggaatctagaccattctcttttcacttcttgtgtaatctctttcctacctagctgccagtgagatgtttttattcaattaatgttatattattgtttaatggagaaattggttcacactctttgcctaccacgctcaatcgtaccccattcttttgcacatgttgttaattctgccatctgtatccgtagtagatggttgtcttcatctgttttgtgttgttataagggaatatctgagggtgggtaatttataaagaaaagaggtttatttggctcatgattctgtaggctgtacaaaaagcatggtgctggcatctactcagcttctggtaagggcctcaggctgcttccacttatgatggagggcaacaggtgctggcatgtgcagagatcacatggtgggagtggaggtggtgggagcgtggggtcaaggagagaggaggtactaggctcttaacagccagctcttgcagaaactaagagagtgagaatgcactcacccacccacctccaacccttcaggaagagcattaatctattgatgagggatctgcccccatgacccagacctctcttgttaggcccactaacaactttgggatcaaatttggggggacagacatccaaattatacaatgcttaataaatatttgttgagtaatttaatagtaagatcagccagaatcataaacacctgaacctgtctcccttaacatctttatctgaaatctctttctctcttatacgtttgtagtaatgtcaatgttactttttctgagtggttcacattatttcttaaatgtatttatcctatctgaaatatttattgtgcacctattataaactgctttataaactttgttgtaggaagttgtaatcataaatgagacaaagttcctgtctctcagggtgaaaattctaatatgtacctactctcaccagattcaccttcatgtaaatacagttctaataatgccacttctgcttactaactcacttctactactttctaatattgctgatacaatttccttatcttaatgtttggggtgtttgataatttggggtttaagtatatttctagtgttatctctcctcatctgtcaaattaattcacagacctttaaaactttcctccgctaggaagtcagttccttcccatgtctgcctgttgaaatcttgatccgtgttgttatatgatgtaaatgaatatggcccttaataaaaattaagaaaatatgaccatcatagttttatttataataccaaaaagttttaagcagcgtagatggccctacagtatgaaaataccacggaatgctctgcagtcatttaaataccaagttttgcagtgctcattttatactgttaagctgaaagaaaggtgtgtataactgtacacatggagggtagctgtggtgactcacacctgtaatcccagcactttgggaggccgaggtgggcagattgcttgagcccaggagttcgagaccagcctgggcaacatggcgaaaccccgtctctaccaaaaatacacacaaaaacaattagctgggtgtgctggactgcacctgtagtcccagctactcgagaagctaaggtcggggaggatgacttgagtccaaggttgcagtgagccaggatcacgccactacactccagcctgggggacagagtgagactctgtctcaaaaaaaaaagttataactgtacacatggtatagtccaaattttaaattaaaatgtgatacagctagatataagtcagataggaaatagatcaaaattttaatagttatagtgcatggtagattatgattgaatttttatttatgcatttttgttttcttaattttctttcttatagttagacaaatttttctgttttcttgtcacaaagattatagtttcttagtgaaacgcttctcttgatttgaactctgaatacttgtgcgagtccagtcaagatggcctttatgttctgttttgtgttttgcttattcatgtgcttgttttattcgttatctgaggatggcaaatagctggcatgcttgcttacaacctgtttccccttctattcctgttaatggtgatctattgtaatatctcctggcctagtaaaataataattgactagcaatatctgtaatggatttatgcagcagcaagtcagactaagcagttatgtcaagatttgctatcatttaaaaatagaaggtaagtgccttgaaggctagggataatacttttctcatctttatatttttatattttagtgcctccttttatagcactggacattcattaatatttactgaattgaaaagtggcaagatattctgtgatgacatcaagagttatacagaattgggatttttttctttcctttctaaaactctaatgctgagaataattctagtgctacacctttttcagaaactgagttgaattttataggttgaaaacataaagcaagataatattggtgaatagtatagagttgctaaatgctgcatctagattcagaagaaaggcaagaggtatcaggaagaataaaggtgatagtagaggacacattttttaatttaacagttgcctcagaagagggaatagaaaatgaaagtaacttagttgggctctaggaaaaaacagaacgtccttgggcagtctttttctttcttgagagtggggttgttgggtatttaaaacaagattttaattaaatagcacaattactctagtgtccagtgttttttgccccttctgatgtgttctgaattgtttgaggggcattgtgagggttgttttagtgcatatccccaggatggtaggggctgctgggatctggtagtagtgttctgttgcttggtctcataagcattactttgagaaaattcagggagctatgctgtatgtatctgactcttcaataaaatttatcaaaaccgaacaccacttatgtgcatttatatgttacgtgtacacagaactctgtttatttggcaaagcagtattttggttttatctctaggcttttaccatttttcatttaaaaatatatcattgtgtttctgttcctagtcagcatttttacttacctttcctatatattggctattaagttagctgtcttagattcctgttctgtgtgtatttagccccatgtcagtctcttgattcttttgtctttccccacctctgtcttctctgaactattcataacatgtaatttaacatatgtgttagagactatttagtagttttaaagtagtttattttactgttactagttttaaaagtatgtgagcttatttttgatagacttttatgacagtctgtcctcaattctagtccctgcttacaaagctataaattgttatggctagacctccactgattttccttcttttctaagacagtgacccctaaaagagcaaattcttttcctactcaaggtgtaaaacaattgtaagatcctttttaaaggagagtccacaagcttccattgttttcctgatgagaacattacgtttaatcagttgacctgaaaaccttattttacttcctgtttatgtaactttatattctttttgacagcatgattctggaacagagtgcacaccaggagaatctaagaatttgggtcaaaaagaaaatggcaattacatcatgtatgcaagagcaacatctggggacaaacttaacaacaataaattctcactctgtagtattagaaatataagccaagttcttgagaagaagagaaacaactgttttgttggtatgtatattttcctaacgttttgttatgaacattttcaaacattcagacaacttgaaagaattctatagtgattactgacatacccaccacctgcattttactattgctaacactttgctgtattccctttatctcgttatttcttaatcttgccatctctcaattcatgttttattgcaatttaaagtaagttgcagccatcagtatacttcacacctaaacattttagtctgcaaatcattaactagagttcaatattgtttatagttctttttctgttttctgcataagtgaaatgcacaaattttaagtgcatcatttgatgagttttgacagatgcatttacctttgtaaactacctatcaagatacaggacatttctgtcaccccggaactttcttttatcacccttcccaatcaggctctgtcccaacacaccctcagaggcaaccactatctgatttatttcactctacattggctttgtcttcatataagtgaaagtatacagtttatacccttctgtggaaggctgtttaactcagtatacagctttgagattcatctttagtattatactcctttttattgctgagtactattacgttgtatgaatatgtcctagtttgtacatctactctcctatcatgaataccttggatttgggctaatgtgaataaagttactatgaaattatttcttattttagtaaaatatatatagcataaagtgtgccattttaaactgattttaaatgtacagttctgtgacattaattataggtacaatgttgaatgtgaatgtaatcaattacattcactcttcatttgcaaactttttcatcatcccaatggaaattctataaccattaagcagtaatgctctgtcttcccctcagcccctggtaacctctaatccactttctgtctttatgaattggcctattctgggtatctcatgtaagtggggacatacaatatttgttctttcgtgcctggcttatttcacttagcataatattttcaaggtttatctgtgttgtagcatgtatcagagttccattccttttcacggctgaataatactccattgtatgtatagaccagattttgttcttccagtcatctgttatgtctttcttgcggcattgaacatactctaaatatttactttgtattagggtttttttgtgtgtgtgtgtccttgtcctatttcacaagaccataggtttctttaggggaaacactgaggcctattcatctttgtacattaagagcactgaaagaggggttaaacatgtgacagcaaaggagaaagaattcaggaagatttccagataagcatgggattttgtttttaattgaaattttattgagataattaatagattcacatacagttcataagaagtaatagattccctgtacccttcactcagttccctccgatggtaatgccttgcaagactgtagtacaatatcatgaccaggatgttgatattgagaaaatccatagatactattccaatttccctagtttttttttttgttctcatttctctttgtatgtatttagctctatacaattttattacatgcgtagatttatgtatccaccatcacaatcaagaatcagaacagttctgtcattacaaggatccctcattgttttataaccatgcttacctcccttctgttgtcccttcctcccccctgctaccctgttctccatatgtaaaattttgtcacttctaaaaaagttatataaataaaatcagacagcatacaaccttttggaattgccttttctcactcaacataattccctggggattcatctaaattattgcctttatcaatagttcgttcttttttatttctgagtagtattccatggtatgtatgtactgcaatttgtttaaccatccatttgaaagacatctgggctgtttccagtgtttggctattatgaataaagcagctgtaaacattcatgtacaggttttttgtataaacatataagtttttactttgagataaatgctcccaaatcgaattgatggaccatatagcaattgcttgttttgctttgtacaaaactgccaaactcttttccagggtggccatactattttatgttctcaccagcactgcacaaatgatccagtttctctgcatgttcacaaccatttggagttttcacagttttttattttagctgttctgatgggcgtgctgtgatatctcatggttttaatttgcatttctctggtggctaatgatgctgaacatcttttcatgtacttattggccatttataaatcatctttgatgaaatgtctgtccatgttttttggtcattttagtgatcattagtgggacttttttcttttctttggagtattgagaattctttatatagtctagatactagtcctagatactggtttgcaaatattttctcccagtctgtagcttgtcttttcgcccttttcacagttctttcgtggagcaaaagtttcacattttgatgaggtccagttaatcagttttttattgtattgattggcattatctttttcttttaaaagggcagattgaaattacatcttcaatcttcaaaaactgatgttatcatttttgttattgttattgtcagtggttgtttttctaatgcttcttaatgtacaggtacattaagattcttcatttgtaaactgggttttcacagtaaaccttctgaaataagttgacttttaaaaatgtacatattgctttgtaggtattaacaggaaagaaaattttttcttaaattataacaaaatgtgtacctattataatttttgcatttaaacagtatttttaggccagacagggtggctcatgcctgtaatcgcagcactttgggaggccaagacagggagattgcttgaggccaggagttcgaaaccagcctggccaatgtagcgaaaccctgtctctacaaaaaattaaaaaatcagtgaggcatggtggcgtgcgcctgtagtcccagctacttgggaggctgaggcacaagaaattgcttgaacccaggagttggaggttgcagtgagccaagatcgtgccactgcactttaacctgggcaacagagcgagactctgtctcagacaaacaaacaaacagtacctcattgttgtttaaactgttagcaaataactaacttgaagtactaattttatatgaaataaaaattaatatgtagtaaataatgtatgtaacattttctgacttcgttatttgttttcttataaattacgtgtcatgtgaattataaaattattactagacttgtaaaaatcattattcacctagtatatatgtgcagatgcatgtttctagttttttttgtttttgtttttgctttttttttgagacagagtctcgctctgtcaccaggctggagtgcagtggcacgatctcggctcactgcaacctctccctcccaggttcaagcgattctcctgcctcagcctcccaagtagctggggctgcaggagtgcgccaccacgcctagctggtttttttgtatttttaggagagacggggttttaccatgttggccaggatggtctcgatctcttgaccttgttatccacctgcctcggcctcccaaagtgctggcatttacaggcgtgagccacctcgcctggcccccccttttttttttttttttaaatttcactttaagttccgggatacaagtgcagaatgtgtaggttcattacataggtgtacgtgtgccatggtggtttactgcacctatcaacccatcatctaggttttaagccccacatgcattagctgtttgtcctaatgcgctccctcccctcaccttctacccctggactggccctggtgtgtgttgttcccctccctgtgtgcatgtgctctcattgttcaactcccacttatgagtgagaacatgtggtgtttggttttctgttcctgtgttagttttctgggtatgatggcttctagcttcatccatgtccctgcaaaggacgtgatctcattcctttttatggctgtgtagtattccatggtgtatatgtatcacattttatttatccagtctatcattgatgggcacttgggttgattccatgtgtttgctattataaatagtgcatgcttctggtttttgagaacgaaagagatggtttaaagtgaaacagggatgaagcttcgatgacctccaagattttaaaaaatagtcgatgtggttaagaatgaactttctgctttcatctaggccagtctggctctggagagcaggtgcctccacagcaacatccctgggggccctgaaatcagggttcagctaggctcctatgtgccctgagggtctgggttcccagtcctgttgccaagtggctttgtcccagatcctttcttctgggctgatgtgagtgcatatgtttgtgccaagcttctgttttatattgcacatataaataaaggaagataatttaccataaagaaataattatctgaatataaagccagtctttctagaacatttttgatttagataggcctcatgtgggtttcctgtgttgagatgtatgggttcctgtgttgagatgtatgtgttcccttctacttattcaattcgcaacttaaagcctgtacaatgactgttttccatgtcgatttggtgtaggagaaagaaaagagcaccagatcgtagacctagaaaaccctagatatagtctgtgttttgcctatactgggatatatggtccctagcaagttacagactccttggaagttagttttatttcctagaacatttaaggcatttgatttttatcattctctgcagttgctaaagctctttgattttatgatcttacaaagaggagcatttctattccaattttaaattccattgacaaaaatcaaagaactttagaagactgctgaagaaattttctaaaattattcactatgcttagatgagactgtctaatcttaatcaaccaagatctggctcaataccattaaggtctgtgagaatacagaagatataaataatacatgtttgttcccttaaggagcttggtttagttcagcagcaaaactaatgtacataaaaaaaattacctactgattgtattacaatcagctaaatagaatgtgggacatttcatagacaaaatcacccaacttctttaacagatcaatggtgtaaaaataaataaaaatggagaaatctattatacgttaaaagaacataagagacctgtcaaaaagcaaccatgaggggaggagttggggttaggggaaccttgggtttgaaacttgattcacagcaacaaattgtaaagagacatttgaggaaaattgaacatggcttggctgttagatgttattaagcatgctattaattttgttagatatgatcatggttattatggttaggtttaaataagaaaaaaactttatgtcatagtgatacattctgaagtatttacagggacaataatatgttaggtggggttgttttaaaatactccagaaaaaaattgtgggagtaagtgagacaagaacagcatattgttgttgatagttgttaaagatgagtgattggtacatgggaattcattgtacatattcttttattacttttaggtgtgtttgaaattttctgttgcaaaaaaaggcttaatttttttttttcctggttagtgaagcactaacttggtttgtatttgtgtgatatgaatagaacagtcaataaagctcaatgtagcatggcctaagttgcaagttacagcttctagaagggaccctctgtcaaatcctctcactgtacagattgagaaactgaagaccccaagattgcattgctagttagtagcagaccccctgttagaattaggtctcgtaatttccagattcctagtttgttctacttattcatcaaagttttcctttatccctttgttatgatgatctaaagaatttgtgaattttaaataaaattaatgtgtgcacacaatgcttactttgtcttgtttattttcctcagaatctggccaacctatttgtggaaatggaatggtagaacaaggtgaagaatgtgattgtggctatagtgaccagtgtaaagatgaatgctgcttcgatgcaaatcaaccagagggaagaaaatgcaaactgaaacctgggaaacagtgcaggtaccttgctaatttcagtgatgttaacattcttgtaaagttacctcaatgcagttatgacaaatttaaaactgagattaagagatgcatatggttttgaaactttgcttttatctgttgtttgttttctttttctgaagtagtgttggttactgctctgttattggcagattgaactacttttttttttttttttttttttttttttgagacagggtctcgctctgttgcccaggctggagtgcagtggcatgatctcggctcactgcaacttccacctcccgggctcaattgatcctcccacctcagccccctgagtagctgggactataggcatgtgctaccacacccagctaatttttgtatttttttttagagacagagttacgccatttgcccaggcttgtttggactacttttaatagtaatttgtgtggtgaatgttaacaaaaggacatactcaaaggacatactaaaaagaatcctaaaaaatacatattctttagttacttattgtgaaaatgtaactatcttccatattttaaaaatcttaactttaaatatttagttaatgtggaatccatttacttttctaacttggcgagttataactatttcacttgtcaaatttactttggtagcagtgtaagcaattgtttgcacaatactttttttttttttgagatggagtctcagaaaaacctgtcacccaggctggagtgcagtggcatgatttcagctcactgcaacctctgcctcccaggttcaagtaattatcctgcctcagcctcctgaatagctgggactacaggtgtgtgcctccatgcctggctagttttttgtatttttagtagagttggggtttcactatgttggccaagttggtcttggactcctgatctcaagtgatctgcccaccttcgcctcccgaagtgctaggattacaggcatgagccaccgcacccggccagttcaatatgttttaaacggctggtctgtatatcctagtttgattttagtatgaaaatgggagagaaagtgataaattaactaatgtgtgatgtaactgaaaaaatactgataaattgcctaatattaaatccattttccattgtagccttttcctaaaggtgaacagggcaagaatgtggaatgtagtatgctttgactattaaaaaaaaaagtcgcacacttttcttgactgtttggcttagtagcttcctattcctttttttaaatttttttttttgagatggagtcttgcactgtcgcccaggctggggtgcagtggcgcgatctctgctcactacaagctccgcctcccgggttcacgccattctcttgcctcagcctcccaagtagctgggactacaggcgcccgccaccacgcctggctaattttttgtatttttagtagagatgggctttcaccttgttagccaaggtggtctcgatctcctgacctcctgatcctcccgccttggcctcccaaactgctgggattacaggtgtgagccactgcacccggcccctattccatttttaattgatacataatgattgtacatatttatgaggtatatgtgatattttgatacatgcatacaatatctaatgatcaaatcaaggtaataaggatatttatctcctcagatatttatcatttctttgtcttgggaacattttaaatcttctattttgaaatttacaattagttattgctaattgtagtaactttactgtgctatcaaacactagagctcattccttctatgtgtttgtacccattaaccaatctctctttatccacctctccactacccttctcatcctcttgtaacaccattctactctctaacctctatgagatcaacttactttgctctcacatatgagtaacaacatgtgctgtttgtctttctatgtctggcttattttatttaacatgatgacttctatttccgttcatgttattgcacatgacagtattttgctcttctttgtgaccaaatatataccaccttttctttatccatttgtctcttggtggacacttagactaattctgtatcttggctattgtgcatagtgatacagtaaacggggctgtaggtatcccttttatatactgacttccttttctttggatgtatacccagctggatcatatagtagatctatttttagtttttagaggaacttctataccagtttacacagtggctatactaatttatattcccaccagcagtaaactaatggttcctgatctctgcatccttgccagcatctttatttatttatttttttgatcattttgataatggtcatttttactgggtgtatctcactgtggctttgatttgtgtttccctgatgattagtgatattgaacattttttcatgtacttgttagcaatttatatgtcttcttttgaaaaatgtttatttaggtcatttgtctactttttaatgagattatttagttttttgctgttgagttgagttccttgtacattctatcagtccctagtcagatgaataatttgaaaatgttttctcccattcagcagatcgtctcttcactctgttgattgtttccttttctgtgcagaagctttttagtgtgtgtaaccctatttgcctatttttgcttttgttgtctgcagtattgaggtcttactcaaaaatcttggctcagatcaatgtcctgatatcttttcccaatgttttcttttagtagtttcatcgtttcaggtcttaaatttccatcacattttgatttggtttatgtatgtggtgagacataggggtctagtttcatttttctgcatataggtatccagttttcccatcaccacttattgaagagactgtcctttccccactgaatgttcaaaaatcacctttgtcgaaaatcaattggctgtaaatatatagatttatttctgaattctctattctgtttcattggttaatgtgtctgtttttatgtcagtatcatgctgttttagttgctatagctttgtagtatattttgaaattaggtggtgtgatgcctccagctttattcttttggctattggcttctgtggtttcatatgacttataggattgttttctctttatctgtgaagaatgtcattggtatttggataggcattacattgaatctgtagattgcttttggtagtatggccgttttcacagtattaattcttccagtccatgaacatgaaatgtgtttttttttttttttgacttgttcagtttctttcatcagtgtttcatagttttccttctagaaatttaataaactcacctccttgcgtttattaaacttactcttttttttgcagctattataaatgagattgattttctgctattttcttgtatatagaaacacaactggttttttaatgttaattttgtatcctgcaactattctgaattcatttatcaattctaagagttttcagtggagctttaagggttgtctatatatataagattatgctgtctacaaacaggaacagtttggcttcctcctttccaatttggatgtcctttattttcttctcttgcctaattgctctggctcagacttccattactatattgataacagtggtgagagtggacattcttgtcttgttctagttctttttttcttacttattttacctggtgatcaggaagtattgttgggaaacttttttttaattactgattcaatcttgttacttgtgattgatctgtccaggttttctattcttatttcaatcttggtaagttgtatgtgtccagggatttattaattatcattcggttttcccatttattggcatatagtttattgtaatggtttctaatgattctttgtatttttgtggtatcagttataacgtctccttttttgtttctgattttatttggatattttttccttgtctagttaatggattgatgattttatctttccaagaaaccaactgttcattttgttgatatatttttattttatttttttatttttttattttttgagacggagtctcacttttttccccaggctggagtgcagtggtgcaatctcggctcactgcaagctccgtctcctggattcacgccattctcctgcctcagcctccggaatagctgggactacaggtacctgccaccacgcctggctaatttttttgtgtttttagtagagacggggtttcaccgtgttagccaggatggtctcaatctcttgaccttgtgatctgtccgcctcggcctcccaaagtgctgggattatagacataagccaccgtgcctggcctgattctttgtatttttttagtctcaattttgtttatttctgctctgatcttcattatttcttttcttctactaatttggggtttggttcgttcttgctttttcctgattcgttgaggtgcattgttaggttgtttatctttctactttttctatgtagacatttattgctataaacttccgtcttaatattgctttagctgtatcccatagtatttggtatgttgtgtttttctattttcagttgtttcagagagcttttaaacttcatttttaatttcttcattgactcattggttgttcagaagcaagttgtttaatttttatgtgtttgtacagtttctaaagttccccttgtgattgatctctagtttcattctgttgtgttcagaagagatacttgatatgatctctgtttttgaacatctgttgataattgttttatagcctaatatgtggtctatcctggagaatgtttcatgtgctaatgaaaagaatgtgtattctgccacagctgttggatgaaatgttctgtaaatgtctgttagatctatttggtctaaagtatagttctaatccagtgtttcttgattttctgtctagattatctgtccagtgctgagaatgggctgttgaagtctccaaccgttactttattggagttgatctctctctttagatctaatagtatttgctttatgtatctgggtgctctggtgttcggtgcatatagatttagaattgttatatccctttgctgaatggaacattttatcactatatagtgatcttttttgtctcttttcacagtttttttttggagacagggtcttgctctgtcacccaggcttgagtgcagtggcatgatctcggctcactgcaacctgcgcctcccgggttcaagcgattctcctgcctcagcctccctagtagctgggactacaggcatgtaccaccatgcccaactaatttttgtatttttaatagagacggggttttgccatgttggtcaggctggtcttgaactcctgacctcaggtgatctgcccgcctcggcctcccaaagtgctggcattacaaaatgagccactgtgcctggccctcttttcacagtttttgacttaaaatctgttttatctgatacaggtatagctagtcttgcttactttgtttctggttgagtgaaatatcttcttctgttcctttacttttagtctatatatgtctttagaggtaaaatgattttcttgtaagcagcatataggtggatgtgtcatgtgtttgggaggccgagccgggagttttgcttgagcaggagtgcaagaccaacctaggcaacatagtgagatcccatttctacaaataaatgaatacataagtaatttaaaagctacagagggagaagagattaaaataggcccattcagccaggttgtgtctttttaagtagggggatttcattggtgtatattcatgattgatatcagtaggtgaggacttcctcttatcattttgataattattttctggttttttttttttttttttttcttcagacggactcttgctctgtagcccaggctcgagtgcagtggtgcaatcttggctcaccacaagctccgcctcctgggttcacgccattctcctgcctcaggctccctagtagctgggactacaggcgcctgccaccacgcccggctaattttttgtgtttttagtagagatggggtttcactgtgttagccaggatggtttcgatctcctgacctcgtgatctgcctgcctcggcctcccaaagtgctgggattacaggcgtgagccactgcacccggctgtttttgttttgttttgttttgtttttgcatattcttctttctttttttctctcatttagcattgtggtttggtagttttctgtagtggtaacatttgactcttctttttctcatttgtatatcacagtggcctgtattgtacagctttgtggtaatggcggtgttggtgtacgtaggttgttagcattataattctgtgtgttttcacaatggtgattattggttttttttgcttccaggtgcaggaatcccttgagtatttcttgtagggtcagtctagtggtgatgaatttcctatttttgcttgtgtgggaaagactttatttgtccctcatttctgaaggttagttttgctgggtatagactcttggctgctaatttgtaaactatccttcagaaatgagggacaaataaagtcttatagattcttggctgccaatttgttttttctttcagtactttgaacatattatcccattctctccatgcctgtgaaatttctgctgagaaatctgctgctagtctaatagatgctcccttatatgtgacttgatactttcctcttgctgttttttttagaattctctatgtccttgacttttgacaatttgactataaatcctcaaggaagacttccattttcagctattattttaataaataggttttcttttttttttctttcttttttctttctttttattttgagacagagtcttaacttcatcacccaggctggagtgcagtggtacagtttgagctcactgcaacctctgccttccaagttcaagtgattcttgtgcctcaacctcctgagtagctggtattacaggtgcgtgccaccatgcccagctagtttttttcgtatttttagtagagacggggtttcaagctcctgacaagtgatccacctgctttggcctcccaaagtgttgggattacaggtgtgagccagtgcaccccagccaaaacaaaggttttctgtgcctttttaaatctcttctccttctgtagcttttaagtgattgattgattggttgcagaggtgggctttcactacattgcctaggttgatcttgaactcctgggctcaagtgatcctcccacctcagcctcccaaagttctggcattacaggcatgagttactgcacccaaccttctgcagctcttataatatgaaaatttattcacttggtggtgtcccataagtcttatagactttcttcctttttttttccttcccctaaatgagtaatttcaaacattctatcttgaagttcagagattttcttttgcttgatcaagtctgctgttgaagctgtctattatatatttttattttattcactgaattcttaagccacaggatttttgtttctctttaatgatatttattacttttttgaatttctcattcatatgaattgttttcctagtttcattgaattttttatctatattttcttgtgtcttttccctcaaatcattattttgaattcctttttaggcaatttattgatttccttttctttgggacctgttgctagagagttaattatgttcctttggtggtgtcatatatatttgttttttcatgtttcatgagtccctgtgttcatgtctgtgtgcctgtctggtggaacagtcgtctcatctaaattttctagagtgactttcatggagatatactctcacctgtagctaggtcttagtgtgctggtcgggaagggtgtggtgcttctttttccaggtaggtgcagtggtatagtctccatgcagcttcttcagctgtattcaacatcatcaataactgtaggcacctcagtggtctgtgctgtagaagtttgtggtaatggatgctggtggtgtaggttgttaatgtcctcagtggcaacgccttttggggccctcctattctcatttttcccataatggtgagacttagccaaggggatccctcttggtgtcaggtctgacatggcctacgagcacctgctgcggtgctggcttccagttgcggatgcgtagagtaactgtggggctggagttctaggctcaggatctcacaaacctattatggtacttgtgtcttgcagtgcatgtttactgtctggcaagattgaatgtaggttgcctatagcaccaggatctgtgactctgggttactccctagcaccttgggcccagcgggccagtctgtagctgggattatacactttgtgggcagggtatagcccgggcttgggtccagggaagaggtgctctggagatttgagcccagagcacagtgcatggcagtaatttcggagcctgagccaataggactcagtgacgagttgggtcaccggggatggaggtggtggtgagtctagaccctgggatggtggggcttggtggtatcccaaagtctgtgagaccaggtgcagcaacagcaagtacctcagaatgttcaagcacagctgtcatttgggccctagggggcagggaacagcacagtgatgactactgtggggagaagggtgtctcagcagctcagactctagggggctagtctagctccagggaagcagggtgctagagttgtttggcctgtaggcatagtatcccagttcagccactgatatttccctgggatgtgagttactgtgttggcttagccctggaatgcacagctcctcaacttggccaaggcattattacctgaaggagcaatgtgctgctttatctcataccctgcagggtgtgacttttctgtgtaggcccaggcactgtttctttgggacacacggctccaccagtgcactgtttactcaggagggcggtgtgcggtttcagttttttgaagttgtataccagtaacatacttatcatttaagtgatgagacttaggatttaaaaattggtactatgtctaataatgtggatctaatctaatatctaatagtatatagggaataactagtgatttactttgtttaatcacttaatgtttcctctagtccaagtcaaggtccttgttgtacagcacagtgtgcattcaagtcaaagtctgagaagtgtcgggatgattcagactgtgcaagggaaggaatatgtaatggcttcacagctctctgcccagcatctgaccctaaaccaaacttcacagactgtaataggcatacacaagtgtgcattaatggggtaagcatttaactatatgttttaaaatttaattttagaaaacttgtttttcagaagaattattgatgcttaaagctacatagttaaagtaattaatcttggtctctgtttaagtaatattccctcacaaaaccatgaatatattatgtggcattcaattagctactaatttgtctttcatctttccatgtacatgtggttgatattctctagagaaacatagttgtacaactcggcatgtgatttgtctataatatttaagttttataaaataatatttcagtagcctaaataaaagaactctttggtcatcttctctgaatatcaaaccttcaaagcttttgtggctgaatatcactttgctctacaggaaaaaaatttaatttttctttctttatagaagagccgtaataaccaacataaaatcgatcctcatctaatctcttgctctgcttttatttcatttttttaagttgccattgctttaaaagatttactatctttcttggatttactgtttttcaaattttttcaaatgtatttatgtaattcagttttgatactcatctctgtttgtttttcactttcatttccatttaaatattttgacattggaagctcatacttgcctgtctgttactataaaaaataggtttgactgtatagggattaaacaatttgtcttttatttttcttctagcaatgtgcaggttctatctgtgagaaatatggcttagaggagtgtacgtgtgccagttctgatggcaaagatgataaagaattatgccatgtatgctgtatgaagaaaagtaaggcttttaaaaacacaagagtataaaatttgcctcaaactattattttctcctaaattttaagtgtaaaactttgacctacagtttggccagataatttccagctaaatctgtcctcttgaggagattataaatgtaacgtagcattgtgtctctattattatggtctctacaatgttttaaaaatgataaactagacaaaacgttgccagctttacagcagtaatttacataaacactgttagactttaagtcatcgtggacactgagtcaagacttgctggttgcttgtttacattgtaacatttaatatgaattactgatggcgttacccagcctaactagagaaggtctgtataacatgttatggtaatgatttcagttttttttccctctttgtatttgcacaactggaaatctgatcttcaacttatatttgaatctgaccttcagcttatatttggcatttcttttccagtggacccatcaacttgtgccagtacagggtctgtgcagtggagtaggcacttcagtggtcgaaccatcaccctgcaacctggatccccttgcaacgattttagaggttactgtgatgttttcatgcggtgcagattagtagatgctgatggtcctctagctaggcttaaaaaagcaatttttagtccagagctctatgaaaacattgctgaatggattgtggtaagtatgttttttatttacaaagaaaacttaaagtggtttgatcttaattttacttggccagaagtcatcaaagttacgagaaaacaacttaactatttatattagaattactttatatgaagatttttaaagttctaatatttctggttattatttccttctgaagtgatcagaatcatgtgtatcattcatagattgcttagtaggtgatgggagtcattctgttttaccgtgctccttagttcatctcctggatgggttacttcttttggtgcatattattagggcattttcatgggacttaaaaaacatttttttttgttgtttttcaagacaacttatttgcccaaatcgtggactaattggtgatttttcctgatctttcagtataatctctgggtctttatcttgtttgtaataggaaatgttgaacagaataagatcagatacacagccttttgtagatctactaatgattatggatgttcatccagcagtaatccactgaacgcttatttttaagcccacatatctccaagttgtacaaacacagaattacctgatgttttcttaaaagattgtcaagattgactatctcaacttaagtgttcatgctttaaaagtgataacattaaaatatctataggaagcttgcaaatgatatatttgagaatgtgctataattgaactgaatgtagtttgctttggaaattgacttataactcacattcccctttctcaaattagtgtgtatgtgtgtgtgtgtgtatgtatgtatgtgtgtgttcagaactatggatgccttaaagcacaaaagatgttgtttgtgtgggatgtcagccttttttgtactcttctaataacattctagagtaaaaattttatagttaaccccagcatttaaaatgatgtttaccgttcctaggacacattaggatatgtggtttttagatatgtaatgatcatggagtagaaggattgttgaaattggatttaggagatctacctaggtttcaaaccaaatacttgagcagttgacttaacttaggtttccttaaaacatgttactctttttttaaattcctgtgcttgttgcgtggtaagttctagtaaatacctgtcaaactgaagttgtcttctggtaccatggtgcagtggaaagagcacatgtttgagaatcacgtaaggattcaaataatctttctggtgtttatcaattctgtgacttcaagcagcttacctttcttggcccttctttattttcaactcagctatttttttttctgattgtctctaataagaaaagttgaaatttggtatacttgtctgctgtagaagacagtgtatacagaaaacgaaaggagatctcagaattacattctactgagtatatattgtgctagatattttagatttttggggtactaagtcatatctaaacatagcatttttttacttttctctgttatctctaattttcactcattacattatttagaatttcaaaagcccatttattttcactttaaaaatatttaatagacatgatcttttaagtatttttaagaccttttctccccatattttagatgtgaggattaatgaaatgtttcacaatgaattggcaacatgaagtcctttcttgtgctctggaactaattaatcagacactttcaagttcatagacgttgactttaagtgtgtgtgggatagaacatgcctttattttatatcattgttgacaggcatatgccagtctttcgaatagcatgctcataatgtgtgaagagtaccgctaggctgttggtgcatttgtgggcattaaccacatcaagcagtaagataataaacatctggtctttacaagttacttgtctcatttgcttatgtgcatagtttacttgcataccgggatttatcatgttagggaagtgcccttccagttagtaatacagattatcaggatgctcttgtgtaagaagctgtgaaagaagtgaggggttagtttcactactttcctttccagtggtgcctggtggcgttttgtcttctttctgtgttacactatggcagcttttctcctcatgcagggtagagtaggaagaaccttaacaatttagaacttcagggcatgggttattgactgctgctactggtaccacggaagtgatactttcttttctgtgttgacaactatgttttgatttttccaaatacatttactgtatttgctgagtgcctactgtgtgtttggacaggataaaatgataaacatcctttggatttatcaaagagtcatctagttcttgaaacatttaagagcattcatcagtaaatctgttgagaccttatttcagcatctccttttctttaattagggattgagggcattggtaattcatttccagtttcttctatagttgatgtgttctgattttctgtatctttcatgttaggtttgacattgtagaaaactacctcttaccttgacttttattgttcaaatgtattgttgtgtttcccctccttttaaaaatcattgcctgatgattttgtggcttttttctttttaacttgttcagatttatcaggagtttgtatttttgtattgctaatttatcaagagtcaaacacattctcattttaaaattagtttctgctgtcatattttgctataattttatgcatctaagtagtaagtatctggtattctttatgaatgaaagatttagagcactgtttcccaaatgcttaacagaacactagttccattagatgttctgggccttcaatggtcaaatgaatctggaaaactactccatactatagacctttcttggagatttgtgagaagacctgcaataaataaatcgtttaaacttcattttccaaacttacctaaccctagaaacttttatgatgaaaagactaagtcctaaatatccttagatgtcatttggaaaaatattgattaatagcagtagttctcaatcctgattgtataccagaatcaccctagggtttggactaattaaatcagaatctcttgggtttaagtatctgggtcttttaaaactctccagttaattctgatgaggagccagggttaagaaccactcatctagaacaggggttggcaaactatggcccatgggccaaatccagcccgtgcctatttctgtatggctcagaagctaagaacggtttttacatttttaaatgattgaaaaaaatttaaaaattatcaaaacattcttttaaaaatcatatgaaattcaaatttcagtattgataaataacattttataggaacatggccacacccatttgtttacacattgtctttggctgcttttgcactttgagtagctgcaacagtgactgtatggccccacaaaacctcaaatgtttatctgggcttttatgggaaatatttgccaactcctgatcgagagcggtgatctcaaagtgtaggcctgagaagcagcatcagcatcacctgggaacttcatagaaatgcaaattcttacgttccattccagacccactgagtcagtaggtgatggtgcgtgctaatagtttgtctgccatttttttcagtctctgtgatatgtgactcctttttaaaaagacttgtaacagaaattttccattttatcatcttgatatgttgaaaatagaaggtggtttcattgctttgtggaacagaccacatagcatagcacttaatgaaactttaacaacaaagatataatgatattgtaaggttttcagcatatagtgaggacacagtatacatttgctagatgaatgaagcagatttctcaaatgtaataatttatatggaaaagagtaaaacttgtgcatattaactttgaaactggaatgttttcaggttcctgttagtggtattttatcttacttgcccaggttgagcttaaagtaaccaaaagtttagtagcaagttgctttctgcttggcagatcgctgttgctgctgctgctagtggtggtgggagtttgaaggataggaggagtatatattcaaagcccagactatagtattatgtcttctgaaaaattgaaaggaaactttctgcccctatagggatgacataatcagtatcatggcaaggagctctgggccccacatggtcttgtgacccatgggaagtccagaatgcatttgctgagagtgagcgttgttgaacactgcagtattcattgaaaggatcatatggttgactttctggaggtctttaagaacagtagattatcttatgtctgaagagacttgagtgcatgtcttccctgtcctcgctcatgcacttttttttagatgatacttgctttgtcattttgttaccatataggttctttttgtttatatttagattatcaaattaaatactattgtaattaatacataataaattagactatttaattttgactttttactttattattggctatgtttaagtgcctgtattgaacatcatctctctttttcttatgtagaattattttctgagttgagaaacttcttgagtttttgaaaaatggttggatgtcttctctttgtccctaaagttttgcttaacacccttgtctctgggatataagaccctggcactcagtttacgctcagtaaatgttcattgaatgaatgacagctcccctttctttcagactaacaggtgggcaatttgtgatcttttcttttgagagaaatgcatattttacatttactaccctagttagtattcctttccctgattttatagtatatttaaaggggatagcatgtaatttagcatttaactcattctttttttaaaaaggaaaactataaaggtggccgtacttactaatattttcagatgcactatttattttgtttagtttttcttactgtcttttgtctattgccatgttccatttccccacacgctaaattcacaaaagctactatcattggcactaaaacatctcaagcattgggcttgtgagatacatagttacctgaaaaaatttagaagaaagccaggaacactgtgctagaaggaactggaagttctgaagggcttgagtgccatattttattatacatctgttgatctaaactgcgactaggttctttttacctttgttttctacagttttaaccactactaaatctgggctttctgtctccaatctgcctctcttactgccatagcgtgtactcgtatggctctttatttaaatctataggccaggtacggtagcttatacctttaatcttagcactttgggaggttgaggagggaaaattgctggagactagcagttgaagaccaacctggacaatctagcaagacctgtgtgtgcaaataaataaataaatgaattcgcagggtgtggcggcatgtaccttgtagtcccagctactcaggaggatcaccacagcccaggagggcaaggctgcagtgagccgtgattgcaccactgcattccagcttgggcaacagagcaagatcctgtctcttaaaagagaaaaaaaagagtgtgtaggtactaaaaagactatcattaaatatatccaaaccagttttactgtcctatctctgttgtaacggccttgtcacattatttgtatgtgttaggcaatctggaagtaataaatgagctgttagttatgtttcaaggtcaatatttaaataatgacttacttgtaataactagttcaacaggtattttgtttgttgggtaggtactgaggtaataggatataagtccagggagctcacaggtcagtttgggatagagaagacaggccagagaaacatatcttcagtctgtgtgctgttttcacagaactgggagaacctattaggaaaagcctttaaggagataacgccagagctaagttctttgtttatttttatttttgaaatggagtctcactcagccacctaggctggagtgcagtggcgtaatctcggctcactgcaaccaccgtctcccaggttcaagcggttctcctgtctcagcctcctgagtagctgggattacaggcacctgccatcatgcttggccaatttttgtattttagcacagatggggtttcaccatgttggccaggctggtcttgaacacctgacctcaggtgatccacccgccccggcttcccacagtgctaggattacagacatgagccaccgtgcccggccaagctaagttcttaagaattagtagaagtagagagtacagaaatattttatggggacagagcatgtgaaaaagtcacagaagtatgaattttgcaaaacatttttttctactttttttcttttgaaaagtttgattattctttttttagttgacaaagtaatacattctaaagtaggccttttttttttttttttttttttttaaccctggacccccaatctttctaggatggatttcttgtgtattcttcgaaactgtctataccactgtaaggatatttactttttaaaaaggtggaatcatatacactttgctgtactttatcgtgtgctcaagtttttgcttttgctttttttcctctctcctacatagtggtctatcttggaaatctttggtgggaagcattcgaagaagggtttgacatgaaggagtaacatggtcagttccatattttaggtagccataacactgatggccatattttcataaaaatgaaagtaaagatgaaggaaggaaatatattgaagatgataatgactttaggaagagaagtgtgtctcctgtacccaacttgcccatcatcgtgagaaagctagtaggaaaactcttaagcctttgtactcatggattggctcacattagaggtgttaccacttccccagcaggtgtttggaaatgtacggttgttgtcagagtaactgaaggggctctactggcatttgatggttgggggccagggatgctaaactttctgcattactcaaaatggtcgtgtactgctttgacagactgagggtggccttctaccctgtcttgcgataagtagcaggtctgttatttgaggatgaataaaaacaaaaaacaataggagtctatggaatacctatataataaaggaatgggaacatcatcctaaagactaacaaggagagcagagctctgaacacaatttttatagaaaacaaaataaaacttaaaaaaaaatctggcagtctcaagaagtggcttttagaaagtagattgtaaagttttaaattccaagccagattcagccctgtcagcatgttttgtgtattctacacattgttttaagaaatttctcacaagtttgccagcatttaaaaatagattttaaataaaaattcggatatattgcttctcttgaaaaatcagatctttaagcagtaaggttgaattgcattccaccttaccttccatgtaagcttttgagtttgccgtccctgcaataacaagcaatgtgagggacaaccatgatacagtttttacagattgaacaataaacatgaaaataaagagaagaaaggtgtctgtgggactcttctgtatagagatctaatctgagaattaaataagactgagaaatgacactcaagtgtaaatcattctaagtttgattttaaaattgaatatatatatgaatatgtgtgtgtgtgcatatatatgtacgtatgtatatatctctttcccttttttattccctctccttttttgaagcagttaattcctaaagccattaggtgagcccaagcaaggtaggcatccacgccaaagttggggagctatagtggcacagagcagagtgttggaagctgaccaggttcagaaggtgtgggatggggaacactaccagtatggggtttcagagcccaagcagggtgagaattgcacccctgtggaggagtgactggcatgggatgtcaagagtgcaagtaggatgaggaaggtgtctacataggaagggtaggactaaaagaaaccagggctctttggcaggttccaaggctggggtagggaaagaacaggataaatctggaacttcttgttgggccagaaagtaagaaagtgctcaaagaatgatgaggacatgtccaaaaaacacaataatgtcagtaattgattatatatttataaaaaataggaaaccatgagggaataaataaatgaatacattgaaagtttgatgaagaacaggatatttacatacttccaaattaggtccctacaaaattttcattgtctacaaaagagaaacaagaatcatggtaaaatttggcagataacaccttaatccagtgatcaagttaacatcagcagtaatgaaataaaaatcacgtgttacttgataggatgcagcgagaacacagcatctgtgatattcttaccaaagatgtgtgacctgaatttgatcacaaagaaacaccagaggaacccaaattgaaggacattcccatgcaaaataactgccctgtaatcttcaaaagtatcaaggtcataaaagccaaggaaacactggaatttttccaaatcaaaggagagaaaagaaacatggtggctaaatatagcacacgattctgaactggatagtattgggacaaatggcaaaacctgaatggggtctgaggattaaatgttagtaatgtatcagccctgatttcctgattttgatgattgtcttgttatctaggaaaccacccttatattgtagaaattatatgctaaaatgttcaagagtaacagcatggtgctagcaacttactctgaggtgcttccagatttttaaaagtttttcttttttgtttttgtttgtttgtttatttgaggtggagtctcactctgttgcccaggctggagtgcagtggcacaatctcggctcactgtaacctctgcctcccgggttcaagcgattctcccccctcagcctccttaatagtggaattacaggcacccaccatcatgcctggctaatttttgtatttttagtagagacggggtttcaccatgtgggcctggctagtctcgaactcctgacctcaggtgatccacccgccccggcctcccaaagtgctgggagccacctgggagccaccgtgcccggcctcaggtttttaaaaggtacttggaacttttgaattgtacttgcaacttttctttaagtttgagactctttcaaaataaaacaaatgtttagaaagtaggaaaggctttgtgtacacaaagaaaaagtggcttgggatattttgctacaacatgccttttaattttagcattactctcattaatgctaaaattagcattagtattactttaattatataaacactgctggaaaaactaaacagtgtagaagtagtacccagtttgttgtaagtccctaagtcatagacagtcttcttaaatgggagttttgctggaaactattagtagtaattatatatgttacagtaacctgtgttaaataaatgtaaaggttcagttttgaagctgtaaatattttgtatgatgtttattagtacatgtggtcttaaaacaaagtttgaatatttggaattgcaaaatataatttaagactagacacagtaattttcctataaatttatcaataatttttgaaggtttttctgtttggctaattgatttgtttaatataggtcaggttaaaatagaagttttggtttcttctaagacgggatgaactttgcctgctgctaaaatatgtatcttcttccacttttcatatttaaaaagatagcctataaactaatgaatacaataaagatattatatataatgtaatgaaaactgatgtatataaaaagtaatttcataactagtccgagtctcaaattccaaatgaaataaaagaggaaaagggtgtctcaaagagatagaatttcagtcttaactttgataattagaaagcaatgtaggttaaagagtaatttttaaatgtattcactagtagaatttaaagcaagttacatgctttctaagccatggaaagtataaacgcaatcaaaacatagtctataagagtaagaggagatccttttgtagttcataagtgtgatgattgggtttgcacactcatatgtgagatgtgccttcctcaaaccttgttagggcattggcacattatccatttgagggagaaaaaagagtaaggggaaaaaacaaaggcaatatttaaaccagaaaatatttaataacatgggaaaatgcaatataactatatgcaagatgaccccagttttgtatttgtgttcatgtgtatgacaaatgttgttatatgtaaagagactaaaaaaaatcagattgagcggtttcctctatgagatgaaattatgggtgatttccattttctcctttaaacttttttttatatttaaataatatatatgtgcaaatatctaacatatgtatacaactcctaaacaaatgttctttaaaaattacaatatactgtgttctattctatgttttatatactgtaaaagatactctaaaatattttgtagtttttttttttcagtggaaaaatctgtttatttctaggctcattggtgggcagtattacttatgggaattgctctgatcatgctaatggctggatttattaagatatgcagtgttcatactccaagtagtaatccaaagttgcctcctcctaaaccacttccaggtaagaatatttgagcaagatacatatttatgtaactcagaattgtttagcaggtagaattgaattataaatgagtctgtagtaactaatgttacagtactttctccgtaagaatgggattattggatgaatgatttagttgatatttgtgtgctttttgtcaatccaatctggccagtgactgctaagttaatgctaatttatctgagtgtctgaaaatatttagaactagaaattttaaattttgcttggtatttgttttcttgtttttttttttttaaatatattctaacatattcccttgccatgattatggtgaactactttaaaattgttgatctttctattctaatagttgtgcttctcatattgttgtccttcattcctccttccttcccttccatcttccctccctcccgccctcccttccttctttttcttttttctttctctcactgtgttgcccaggctggacttactcctgagctcaagcaatcctccccactttagcctcctaagtagctgggactataggcgcgtgcactgcacccagctctcttatcgtttttagtgtttgtgctcttgaaatattttctggcacataagcttattttcccccagggtgatgcttgtggggacatacagatcccagtctgtgggaaagtcttagagtagaggattcattcatcaaataagcacagtcaagtattctccattcctgaaaacaactctttagttctggtctccaccttttacctctcagggagacatagcatgaggaagaaccctctttagatgagctgtgggcattggaaggagaaaaggacaggaaataaacccttcgtattgtttagttccctctgtttatccctccccttctccaaggtattcgtagctattctctacaggtgtgaggacagacattgtctcagggcagcagcaggggagagccagaactaaatgacagcagttccctctcctgccgctctcagacttctcataagatgtcttgcctcaggcaaatccactaccttatacaaagtagttcaaaactaggtttcttacactttttctctgttttccctcagttgttcacctgcatttacctgtctggggcaagatggcccagtagtcatgctaggacagtatcttagtgagagttagaggaaatttgatttttatatcattgcttttcttaagttcacaatgttagttagcactctggaacttatgttagtatttaaggaagttctaagggccacatgacactttttagatgctgttaccaattgtggtcttattcagtgaaacattttatgtgtatgttggtttcattttaagtgaatagcacctttaaaaacttagaaaactagctgtcatttattgaaccctcacaaaaagtgttaaacatttttatatgaattatataatctttacaacaggctatatacgttaattatcatccttgttttacagtgtaggcatctgagtctcaggttaaggcatttgctcaaagacacttagtaattccctcatatggattctgtccagaatctgtgatattaatctggattaatctaatacttgtggctgctgagcactgaattgttgctagtttccattgaaatgtgctgttttaattaacatacataccagactttgaagatttagtataaaaaaagaaatattttgttagtaatttttgtattgattatatattgaaatgataacactttggctatattaatttaaataaaataaaaaatattattaaaattatttcaccttttaaaccttttttattgtggctatcagaagattttaaattacattgatggcccatattattggacagcactgaactaaaacctttcttattgaaacagcagctttgcttttaaagattaaaaagctcatgataaataaatctgctttgcttttatttgtggctcacaggcactttaaagaggaggagacctccacagcccattcagcaaccccagcgtcagcggccccgagagagttatcaaatgggacacatgagacgctaactgcagcttttgccttggttcttcctagtgcctacaatgggaaaacttcactccaaagagaaacctattaagtcatcatctccaaactaaaccctcacaagtaacagttgaagaaaaaatggcaagagatcatatcctcagaccaggtggaattacttaaattttaaagcctgaaaattccaatttgggggtgggaggtggaaaaggaacccaattttcttatgaacagatatttttaacttaatggcacaaagtcttagaatattattatgtgccccgtgttccctgttcttcgttgctgcattttcttcacttgcaggcaaacttggctctcaataaacttttaccacaaattgaaataaatatatttttttcaactgccaatcaaggctaggaggctcgaccacctcaacattggagacatcacttgccaatgtacataccttgttatatgcagacatgtatttcttacgtacactgtacttctgtgtgcaattgtaaacagaaattgcaatatggatgtttctttgtattataaaatttttccgctcttaattaaaaattactgtttaattgacatactcaggataacagagaatggtggtattcagtggtccaggattctgtaatgctttacacaggcagttttgaaatgaaaatcaatttacctttctgttacgatggagttggttttgatactcattttttctttatcacatggctgctacgggcacaagtgactatactgaagaacacagttaagtgttgtgcaaactggacatagcagcacatactacttcagagttcatgatgtagatgtctggtttctgcttacgtcttttaaactttctaattcaattccatttttcaattaataggtgaaattttattcatgctttgatagaaattatgtcaatgaaatgattctttttatttgtagcctacttatttgtgtttttcatatatctgaaatatgctaattatgttttctgtctgatatggaaaagaaaagctgtgtctttatcaaaatatttaaacggttttttcagcatatcatcactgatcattggtaaccactaaagatgagtaatttgcttaagtagtagttaaaattgtagataggccttctgacattttttttcctaaaatttttaacagcattgaaggtgaaacagcacaatgtcccattccaaatttatttttgaaacagatgtaaataattggcattttaaagagaaagcaaaaacatttaatgtattaacaggcttattgctatgcaggaaatagaaggggcattacaaaaattgaagcttgtgacatatttattgcttctgttttccaactacatcacttcaactagaagtaaagctatgattttcctgacttcacataggaggcaaatttagagaaagttgtaaagatttctatgttttgggtttttttttttcctttttttttttaagagtataaggtttacacaatcattctcataatgtgacgcaagccagcaaggccaaaaatgctagagaaaataacgggatctcttccttgtaaacttgtacagtatgtggtgactttttcaaaatacagctttttgtacatgatttagagacaaattttgtacatgaaaccccagatagactataaataattctaaacaaacaagtaggtagatatgtatgtaattgcttttaaatcatttaaatgcctttgtttttggactgtgcaaaggttggaagtgggtttgcatttctaaaatggtgacttttattctgcaagagttcttagtaacttcttgagtgtggtagactttggaacatgtaaattttttgcttgtaatgttatcctgtggtaggattttggcaggtacacacactgccctattttattttgagtctaagttaaatgttttctgaaaagagatacatgcactgaactctttccactgcgaatcaagatgtggtaatataaaaggatcaagacaaatgagatctaatactactgtcagttttaatgtccactgtgttttatacagtatctttttttgttcactttggaaatttttactaaaaattgcaaaaaataaagtattgtgcaaagatgtaaggttttttgaaacttgaaatgcattaataaatagacgattaaatcaacttgaaggttctatactctttgaactctgagaactatcacaagaagcttcccacaaggcagtgttttcttacagttgtctcttcctacaaaagtatagattatctttattcttaatactttggaatccatgtagaaaatttccagttagatactctgcgtacacacaataaacctttttaaaacacccaactaatctcaactgcattacattgtttctaatcaatattcagtgcttgtcttggtggaagaggtgagtcattttgaaaacttatggtcttgtttttatgtgtttttcaaagttttgaatgctaagtacctcatttattttaaaaagcctagtttaatgataagtttgtttaaaattttgagccatcatttttctcttcatagcaaataaggagagaattgacatttcagtgttacctagaaaaggaattgtaagcccagaataattccctgcatgaggtaatctgcttcaaattctttttttagtcaaggttagctataagtaatacttgttaaatgagtaaatatgtaatactttgtgaattactttgttaatttaggagcatcaaatgtatattatgtttagttatttatgaaactctcaatattgattgatttgggtaattataaattagttatttttacttgtaattgaatgcttaaattctgtttacagtccgtcctctctccctccatccctccctccccagttttataaattcaggtaccaattcacaaacaaaatcagaaataaaataaatttattgactgcttctggatttagcattccctgtagtgtcaagcaatgtcatgcagtttggggaagcatttatttaaggaaatgacaactttctctgatcagtcttgttttgtgaggtgtcttcaacactttatgctttgggtacttcgtgtttgtcacagtcttaggatagtgaaatctgatttgtccaagcggagcaaactactcgaccctcagtccttgtatttgtccctgtagtaagacctaattattattatttcttaaagatgggattggtgtccttggcaactatgaaatttcggggcttgtgcatgagaaggcatttcttattaagtatttctaattgaaggtatcagagtgtcaagcattacaaacctggacagttcacctggaggagtacaagaagagatattcattatccatatttaaagggtcaaggtttcccaaaaccagggtgcaagccagatgtagttttaaagcagctgccagggacagttcatctttagagaagtcactaaagttgtaagaaattttagtttccccaaaaccactttcaacttcttagaaactagaaagacaattggtttgccccacagaggacaacttcagtttcagcatctctcatgttgtgttcttgattaaaaacaacttccatttgatatacttttccgtttattaccagtttagttttttcactattgtttctgtattcaactctttatatgattaggatagaaatttagcccttctgttttatattactatattgtttgtgtgtcttagatatatacatgtatgtactattttcagtagaaattcatgtattttataattggtaagttcttcagagcatctcttctataaaaagcaacaggatgctaggtaaaacggagcattgagcaaaatactgattagtttttgctttttcctgaaatctacactaaagtgatagggtgtggggtaatccaacaaggacaaggtgaattgaacaagaacgaaatctggaagcagatgaaggagtactattgattgggcagacccagggaagtcaaatcctaaaccagcagtgggaacacaacagaatggtgtagtttgcactggtaagatttgggtacctggcagggctgggtgcggtggctcacacctgtaatcccagcactttgggaggccaaggcgggtggatcacttgaggtcaggagttcgagaccaccctggccaacatggtgaaaccccgtctctactaaaaatacagctgggcgtggtggcacatgcttgtaatcccagctactcgggaggcagaggcaggagatttgcttgaacccgggaggcagaggcaggagatttgcttgaacccaggaggcagaggctgcagtgagccgcgattgcgccattgcactccagcctgggtgacagagcgagactctgtctcaaaaaaaaaaaaaaaaaaaaaaaatttgagtacctggcctttgttactttttttctatgtgtgtgacaaaaacataatatgcacacttttgtaacccacctttctcatttaatggtacattgataatgtatatcacattaactactctaaatatttctgtggatgtatgtttttttttttcttaaccaatttcccattgtttggacatgtaggttccacattgtttattattttaaacaattctaaagaattttaaacaattcttaggaaaatcctcagcctaataatgaaattaattcctaaaagtggaattgttggggtaaaggttttttgagggacattgataaaaattatggtactgtctcccagatagatgtaccaagttatactaccacgatttaatatatatatatatatatattaaatcagagtcccatccttagaaatccacatatatgcagccacatgaatgtattagaaacaataatagaagactcatgcttaattcagttgattagctttagacataattcaaatgcaagtcaaattgagtgccctaattgtggtctcttaagtaccatttttcttcaagggaaccagactcctttggataaatcactaattccacctgtaagaaagaaatgtacaagaagaacctaggaaacattgttttgtaccagatcagaaagattcaggaggcaccttagaagttaccactggccaaggctgagataactttagcatcagcaaggataatatctgcaagagattgaaactcatagtattgtatttaactctgtgagttaatgatggtagtggacagaattatagttacctttgggatacgcttttaaagaaattccaggtaataagagaaatgatagaattaggatatcaccattttacccccccaacaatttatggatctagacaataatcgccagtgactgctaacctcacaaagtgagagcaatcagattttgtgcctcctaatggaagtacatataccacctatgaagcagttctgccaaaagtcacatctcatcatgatgaagcctcctgatctaactaccccttcattagaaatacaggggacagagggacaaataatatacaagggactcaatcagcaaaatccagactctggaaaactacaagacatatggtcctgcttcaacaacagaaatgcaaagagaaaagacaacgatgggttaaaggagacttaagagctacatctatcaagacaatttatggacttatttggatactgatttgaacaaactgttgagaccattggaaaaatgtgaaaagtggatatttgatattaaggtttttaattatttttaggtgtgataatggtattgttacattttttaaaggaccccttttagagatgcaaattgaaacacttaaaaaatgaaatgatacgatgtataagtttttgcttaaaaataaggattgaagttggctggtgtgtgtggatatagttgaaacaagattggctgtgagttgataattattgaagctgggtgatgggcacttggggatttattatactattttctctacctgtgtttatatttgaaatttttcatagaagttttaaaatgtggccagttgtgatggctcatacctgtaatcccaacactttgggaggccaaggtgggaggatcacttgagctcaggagttagagaccagcctgggcaaaatagtgagactccatctcaaagaaaaaaaaaaagtgttttaaatgtgaatcaaattcctatagaagctgattcattactgtttttattttagcagtaattcatgataatgacctgtattcataatgattttcataatgattgttttagtggaattaaacttgaaccagtcaagctaacataattatattctgctccagttacaatgaataattaattgatttcaactgctagggtgaactcttgaagctatcagtcatccagcaatcttagcaagcaggccattgggtccctgtttgctctgtctctctctctctctctcactgttgaagggcttagctaactacttaagtaaaatatttgttctctgttaaacatgtcaaggagtatggtcagcttatccacattaagcctgtgtgtcccacgttggagtaaatgttaagtagctcactacaataaactagattcttctgccctctcttgtttaaatgatcatgttccctggaggtggaaatagatctttaaaaagatattctgtagttgtttgttctcagtgtaaaaaaatgagaataatttgataagagtgtaggttgtcttatataaaaagtggttccatttgcatgaattttagaaaaatcattttggaaaaatgaaggctatgtggttatactgaacacattaagcaattttattctttattttaaatgaatattttattatcgttttcttcccttgccctttgggtatgggagttagcctttgtgtttctaaatacaacaggccggtttttataaattaaggtgtcaatatattcttcattatttagttttgtgattgtggttagttttcatttttcttaagtatctgctagtagcatctgtaattaagtgaagtgacctgttaaccattttcctctttctcctcctttcctcctccttgaaacatatcagagcatgtttgaaattctttggcttttatggtatgcatttgctgatatgcattgaccagttaccttactcacagatacttcttaggcacttgattgtgccagggccttggctagatgataagaatacagtagtgaacttaacagtttccctgccctggtgaagcgtatggtcttgtaggtgagatagatatcagataatcatgtgaataaatgtacaattccagctgtgatacatgctgaggaggaggtttttggtgatccaagagctgatcatgcagagataggactgagaaaggagggtgggacgttgtcacagctgataatgcagagataggactgagaaaggagggtgggacatcaggaaggtcagagaattccttatgaaagtgatgcttgagtcaaaatatgatggatgaagagagtttaaatagattacatagaatttttaataatgtcgattggttatatactgggcactgatagctgatttttctttggggaaaggtatgtcagcctagtcattcagattcctttatttttttaaatgttttttcattttttgctttgcattgcattcatttgctgaagagctggcttgtactttggcaggtgtcatacttggttattctccttaggatattggcccaacaatctgggagttgtgaaaggcgcttcgcttttcagacctgggcgtctgtatcatgactatcataaatttaggattaagacacctagcctcctaccagggtgaatgaggtgtccatgtgacctgctgtgccctggaattttatacatctttctctcatagcacacaccatattacaatataatcctgcctcatctaagccaaactttcgagagaatcatttacactcagtggctacttcagctcccattcacttatcaacctgctgcaatttttcacagcccccaaaggactgcagtctgtgccttcagggagctgagggtctagcggaaggaaagaaaccagcagttacagtacagaggggtttgtgttggaaactctacaaacacaggatgccctggtagctcagaggaagtgcatatcgagcatggtaggtaggtagtgggaagagccaagatgacttcccagaggagaaaagctggacctgagttttggagtttcggtaaaagtttgctctaactagtccaagctgctgtcacaagcttttagaaatgatgtaaccatggggcagttgactgtcgtcatgttctttgctattttcatgactctggatgtgcttttcctattccctggattgccctttccctcgattcctctgcaggactgggctttattaatctccatttccttgagcttggctatagtaggtgttcaataaacatttgttttgttgtgtgctttgtaaataggcaatgaagctgatttcacaagataggcacaaaagttagtttcattacaacacattaccaacagctgtatttttaacttttaacatatctcattctaaatcctgtggcagcacaacctccttccgtcatacctggagataaattttctttcaaaatctaatatgcactgtatttatagaatatgaaacataccgaccatgttttgcaaaaatgggaaaggcataacttagctttggggcatgtaagtaacaactcctgataggagaagaaatgtattcagaaagctcaaattagaaataaaatgggagactctagatttgtgtttgtggatgaatgttttctttagctaaatcattgatgtaatgtttatttggctatttcatagtgaaaggtggaagttaaacgttttgaaggtattttcctgcagtaaacttccagattaacattttctgttttttcacagaaatctagtattttttttttttttttaataacaggtttttagacaaatattcaggaaaaaacaggaggtataaattccagggtcaaatggaaatgcagagttacacgggtttttattttgttctgttgattgattttttaaaaaatgaggtatttctgagagcctctagtatgctagcactgattgtgatctgtaaaagcatcttataatatgcagtgctcccaaactagtaaactcttctgctgttttctcccctaaagagtcttgagttctgcagaacacgctgggtgttacttcttggatagctggtactgtagtgtgccctgctggggacaggttctccttacctaaggaattctcactgggctgggacttccacatctgttatgacacttggcactgacaatggggttgcagaggttctcaggacaggctggttagcctactccctcacccttacaagcaactctgctctctgtggcactcatcagaattgctttgcacagtggtctccaactttttttttttttttttgaaataggttttctgtagaccaggctggagtgcagtggcaccatcatagcccactggagcctacaccctctgggctcaagcaaacctcccacagttgggattacaggcacatgccaccacgcccagctaaaattaaaaaaatttgtagaaacgggtgtcttgctgttttgcccaggctgatctcaaactcctggcctcaagtgatcctcccaccttggcctcccaaagggcatgaaccatcgcatccagcttgtctccaagttttttgatcttgtatcttacacttaaaaatcttgagtacacactcctaatatggaaatatgtataaataatatgactgtgttactgcactatgatgatgttttaaagtatgccacaattttgagggataagagaaaaatgaacggagatcatatttcttcccacattccagtaggcattttgcactccctactgtgtacacaatccactttgtaagcctctggcttttgagatagagtctacttacaagccaactagctgtcgccctcccttcgttcctgggttaagtttgctttccagtgaaacactctgcaaccattgaagaatgcaggctacctgcaggtatttgcttctaaagaagtccaagaagtactaagtggaagaagcaagtattaatatatatgtatggtctgatttcttgtgtgaaaattttttacatttgtaaaaatgtataatttattcagagaaaatctctagattgatacattaaaagctgttaagttatttctgagcactgggattaagggccttgggagagtaagaagatttttattttttacttcactcttctgcactgcttgaatttttaatgaaccggattcttttcgtaataaataatttttaaaatcactaaatatattaggatgtcaactatgttacaatgcattgccaatgttgattgttgaagttgggtgatgggcatgttgggtttcattgtattcttctctacttttatgtgtatttgaatatttccataataaaaactttaaataaaaaatgcgctgcaaaagagtctatagaaatacactacacagttaacgtggttatcttaagggtgggaggacagaagaagggttgaatagaacttcagataccttctgcctcaaatgttttataatgggaaaaccactgatacacacacacacacacacacacacacacacacactcactgcagagccaccaatgcaaagagtttcatatgtagaagggagtagaaaatacttacttgatttcctagataaatgttagttcctagggaaatctacaaaataaatgtgtaagtcgagtgtttcatatgtaaggcttggctgttccatattaagatttttttttttttttttttttttgagacaaagtctcactcttttgtccaagctggagtgcagtggtgtgatctcagctcactgcaaccttcacctcctgggttcaaccgattttcctgcctcagcctcccaagtagctgggactacaggcctgcaccaccatgcccggctaatttttgtatttttagtagagacgggggtttcactatcttggccaggctggtcttgaactcctgaccttgtgatccacctgcctgggccttccaaagtgctgggattacaggcgtgagacactgtgcccggccccatattaagatcttaaggcttgttttataaaaaggattcctgggcatgttgtataatcaaaggtgaaactccacagcatagccacatgcctctgcacagtctcagcggcagcagggagggcacagctagtggtctgccatgaatgatttgcacttatagctggttaccaagctccataacatgaaaagacagtgtcttaaagtacaatacctaattatagctctcacatggggtccaagggagttaatatgtaaaggacattttctgttgctgactgcaatggtaggctgcattcatggacacagaatctataaagagggaaatgatggtccattagccgtgtgaccttgtaaaagctaagctgtaggtacctcatctgtgaaacagggataatagttttagccacctcaggggactatgatgtggattaaaggagaatgtatgtaaggcaccttgcatatggtgaacactcgaatgtcaactgttctggttttcatgtgaaaaactgcttactgaactggaacatttagcttgcgagcaggtgtcccctgattttaagtatcttctcctctaacagacatgtggttagggtccttggtctgtggttaatctcattacccttgccaagtttaggaatggtcatgtcacctaattttggccagtgagataagagggctgtctcccgcatgatgtctactgttccttctctggatgttaccatgcctgagtgagctgcctgcagttgcagtgggcaacttggtaacagcctgaggatgaagccaacatcaaggatggtggagcagagagaaggaaaaacactgcatcttcataacattaccaagcagcccagtcagctcttcctgaggccccactctaccttggaacttccttttgtgtgagatttaaaaacaaaacaaaaccaaccaaacaaaaaaccctctttatttaagccagtttgagttagcttccaaaggcatcatgattgattgaacctgcaccagacaggatttgaggtaggggtggtagcatgtattcagtgatgtttattaagcactttagaatgcaaaaataaagacatcaagaagttccgagacatgaggaactgggggttctggaatgatagcagcttgaacttttttctacttgcagtttaacccatttgcctctcctgagaaaagcagctgctggggcttgccgggggaagataaggcctgggatgtgaatgaggcttcgggccacagcagaatcctgtcagagagctggggcaagat

SEQ ID NO: 660 - DNA, 3730 bp, Homo sapiens
caggaagcggcggcaggcctagcagcacgggaaccgtcccccgcgcgcatgcgcgcgcccctgaagcgcctgggggacgggtaggggcgggaggtaggggcgcggctccgcgtgccagttgggtgcccgcgcgtcacgtggtgaggaaggaggcggaggtctgagtttcgaaggagggggggagagaagagggaacgagcaagggaaggaaagcggggaaaggaggaaggaaacgaacgagggggagggaggtccctgttttggaggagctaggagcgttgccggcccctgaagtggagcgagagggaggtgcttcgccgtttctcctgccaggggaggtcccggcttcccgtggaggctccggaccaagccccttcagcttctccctccggatcgatgtgctgctgttaacccgtgaggaggcggcggcggcggcagcggcagcggaagatggtgttgctgagagtgttaattctgctcctctcctgggcggcggggatgggaggtcagtatgggaatcctttaaataaatatatcagacattatgaaggattatcttacaatgtggattcattacaccaaaaacaccagcgtgccaaaagagcagtctcacatgaagaccaatttttacgtctagatttccatgcccatggaagacatttcaacctacgaatgaagagggacacttcccttttcagtgatgaatttaaagtagaaacatcaaataaagtacttgattatgatacctctcatatttacactggacatatttatggtgaagaaggaagttttagccatgggtctgttattgatggaagatttgaaggattcatccagactcgtggtggcacattttatgttgagccagcagagagatatattaaagaccgaactctgccatttcactctgtcatttatcatgaagatgatattaactatccccataaatacggtcctcaggggggctgtgcagatcattcagtatttgaaagaatgaggaaataccagatgactggtgtagaggaagtaacacagatacctcaagaagaacatgctgctaatggtccagaacttctgaggaaaaaacgtacaacttcagctgaaaaaaatacttgtcagctttatattcagactgatcatttgttctttaaatattacggaacacgagaagctgtgattgcccagatatccagtcatgttaaagcgattgatacaatttaccagaccacagacttctccggaatccgtaacatcagtttcatggtgaaacgcataagaatcaatacaactgctgatgagaaggaccctacaaatcctttccgtttcccaaatattggtgtggagaagtttctggaattgaattctgagcagaatcatgatgactactgtttggcctatgtcttcacagaccgagattttgatgatggcgtacttggtctggcttgggttggagcaccttcaggaagctctggaggaatatgtgaaaaaagtaaactctattcagatggtaagaagaagtccttaaacactggaattattactgttcagaactatgggtctcatgtacctcccaaagtctctcacattacttttgctcacgaagttggacataactttggatccccacatgattctggaacagagtgcacaccaggagaatctaagaatttgggtcaaaaagaaaatggcaattacatcatgtatgcaagagcaacatctggggacaaacttaacaacaataaattctcactctgtagtattagaaatataagccaagttcttgagaagaagagaaacaactgttttgttgaatctggccaacctatttgtggaaatggaatggtagaacaaggtgaagaatgtgattgtggctatagtgaccagtgtaaagatgaatgctgcttcgatgcaaatcaaccagagggaagaaaatgcaaactgaaacctgggaaacagtgcagtccaagtcaaggtccttgttgtacagcacagtgtgcattcaagtcaaagtctgagaagtgtcgggatgattcagactgtgcaagggaaggaatatgtaatggcttcacagctctctgcccagcatctgaccctaaaccaaacttcacagactgtaataggcatacacaagtgtgcattaatgggcaatgtgcaggttctatctgtgagaaatatggcttagaggagtgtacgtgtgccagttctgatggcaaagatgataaagaattatgccatgtatgctgtatgaagaaaatggacccatcaacttgtgccagtacagggtctgtgcagtggagtaggcacttcagtggtcgaaccatcaccctgcaacctggatccccttgcaacgattttagaggttactgtgatgttttcatgcggtgcagattagtagatgctgatggtcctctagctaggcttaaaaaagcaatttttagtccagagctctatgaaaacattgctgaatggattgtggctcattggtgggcagtattacttatgggaattgctctgatcatgctaatggctggatttattaagatatgcagtgttcatactccaagtagtaatccaaagttgcctcctcctaaaccacttccaggcactttaaagaggaggagacctccacagcccattcagcaaccccagcgtcagcggccccgagagagttatcaaatgggacacatgagacgctaactgcagcttttgccttggttcttcctagtgcctacaatgggaaaacttcactccaaagagaaacctattaagtcatcatctccaaactaaaccctcacaagtaacagttgaagaaaaaatggcaagagttccaatttgggggtgggaggtggaaaaggaacccaattttcttatgaacagatatttttaacttaatggcacaaagtcttagaatattattatgtgccccgtgttccctgttcttcgttgctgcattttcttcacttgcaggcaaacttggctctcaataaacttttaccacaaattgaaataaatatatttttttcaactgccaatcaaggctaggaggctcgaccacctcaacattggagacatcacttgccaatgtacataccttgttatatgcagacatgtatttcttacgtacactgtacttctgtgtgcaattgtaaacagaaattgcaatatggatgtttctttgtattataaaatttttccgctcttaattaaaaattactgtttaattgacatactcaggataacagagaatggtggtattcagtggtccaggattctgtaatgctttacacaggcagttttgaaatgaaaatcaatttacctttctgttacgatggagttggttttgatactcattttttctttatcacatggctgctacgggcacaagtgactatactgaagaacacagttaagtgttgtgcaaactggacatagcagcacatactacttcagagttcatgatgtagatgtctggtttctgcttacgtcttttaaactttctaattcaattccatttttcaattaataggtgaaattttattcatgctttgatagaaattatgtcaatgaaatgattctttttatttgtagcctacttatttgtgtttttcatatatctgaaatatgctaattatgttttctgtctgatatggaaaagaaaagctgtgtctttatcaaaatatttaaacggttttttcagcatatcatcactgatcattggtaaccactaaag

SEQ ID NO: 661 - protein, 746 aa, Homo sapiens
MVLLRVLILLLSWAAGMGGQYGNPLNKYIRHYEGLSYNVDSLHQKHQRAKRAVSHEDQFLRLDFHAHGRHFNLRMKRDTSLFSDEFKVETSNKVLDYDTSHIYTGHIYGEEGSFSHGSVIDGRFEGFIQTRGGTFYVEPAERYIKDRTLPFHSVIYHEDDINYPHKYGPQGGCADHSVFERMRKYQMTGVEEVTQIPQEEHAANGPELLRKKRTTSAEKNTCQLYIQTDHLFFKYYGTREAVIAQISSHVKAIDTIYQTTDFSGIRNISFMVKRIRINTTADEKDPTNPFRFPNIGVEKFLELNSEQNHDDYCLAYVFTDRDFDDGVLGLAWVGAPSGSSGGICEKSKKDGKKKSLNTGIITVQNYGSHVPPKVSHITFAHEVGHNFGSPHDSGTECTPGESKNLGQKENGNYIMYARATSGDKLNNNKFSLCSIRNISQVLEKKRNNCFVESGQPICGNGMVEQGEECDCGYSDQCKDECCFDANQPEGRKCKLKPGKQCSPSQGPCCTAQCAFKSKSEKCRDDSDCAREGICNGFTALCPASDPKPNFTDCNRHTQVCINGQCAGSICEKYGLEECTCASSDGKDDKELCHVCCMKKMDPSTCASTGSVQWSRHFSGRTITLQPGSPCNDFRGYCDVFMRCRLVDADGPLARLKKAIFSPELYENIAEWIVAHWWAVLLMGIALIMLMAGFIKICSVHTPSSNPKLPPPKPLPGTLKRRRPPQPIQQPQRQRPRESYQMGHMRR

SEQ ID NO: 662 - DNA, 3105 bp, Homo sapiens
ggtgaagaaggaagttttagccatgggtctgttattgatggaagatttgaaggattcatccagactcgtggtggcacattttatgttgagccagcagagagatatattaaagaccgaactctgccatttcactctgtcatttatcatgaagatgatattagtaagcttaaactgaggcttagaaaacttatgtcacttgattgtggacctcctgttctttaccctgtgctcttctgcttcactcatggaagaaagctgtaaattctcactgcctttacttcaaggatttctggggcttttctgaaatctactatccccataaatacggtcctcaggggggctgtgcagatcattcagtatttgaaagaatgaggaaataccagatgactggtgtagaggaagtaacacagatacctcaagaagaacatgctgctaatggtccagaacttctgaggaaaaaacgtacaacttcagctgaaaaaaatacttgtcagctttatattcagactgatcatttgttctttaaatattacggaacacgagaagctgtgattgcccagatatccagtcatgttaaagcgattgatacaatttaccagaccacagacttctccggaatccgtaacatcagtttcatggtgaaacgcataagaatcaatacaactgctgatgagaaggaccctacaaatcctttccgtttcccaaatattggtgtggagaagtttctggaattgaattctgagcagaatcatgatgactactgtttggcctatgtcttcacagaccgagattttgatgatggcgtacttggtctggcttgggttggagcaccttcaggaagctctggaggaatatgtgaaaaaagtaaactctattcagatggtaagaagaagtccttaaacactggaattattactgttcagaactatgggtctcatgtacctcccaaagtctctcacattacttttgctcacgaagttggacataactttggatccccacatgattctggaacagagtgcacaccaggagaatctaagaatttgggtcaaaaagaaaatggcaattacatcatgtatgcaagagcaacatctggggacaaacttaacaacaataaattctcactctgtagtattagaaatataagccaagttcttgagaagaagagaaacaactgttttgttgaatctggccaacctatttgtggaaatggaatggtagaacaaggtgaagaatgtgattgtggctatagtgaccagtgtaaagatgaatgctgcttcgatgcaaatcaaccagagggaagaaaatgcaaactgaaacctgggaaacagtgcagtccaagtcaaggtccttgttgtacagcacagtgtgcattcaagtcaaagtctgagaagtgtcgggatgattcagactgtgcaagggaaggaatatgtaatggcttcacagctctctgcccagcatctgaccctaaaccaaacttcacagactgtaataggcatacacaagtgtgcattaatgggcaatgtgcaggttctatctgtgagaaatatggcttagaggagtgtacgtgtgccagttctgatggcaaagatgataaagaattatgccatgtatgctgtatgaagaaaatggacccatcaacttgtgccagtacagggtctgtgcagtggagtaggcacttcagtggtcgaaccatcaccctgcaacctggatccccttgcaacgattttagaggttactgtgatgttttcatgcggtgcagattagtagatgctgatggtcctctagctaggcttaaaaaagcaatttttagtccagagctctatgaaaacattgctgaatggattgtggctcattggtgggcagtattacttatgggaattgctctgatcatgctaatggctggatttattaagatatgcagtgttcatactccaagtagtaatccaaagttgcctcctcctaaaccacttccaggcactttaaagaggaggagacctccacagcccattcagcaaccccagcgtcagcggccccgagagagttatcaaatgggacacatgagacgctaactgcagcttttgccttggttcttcctagtgcctacaatgggaaaacttcactccaaagagaaacctattaagtcatcatctccaaactaaaccctcacaagtaacagttgaagaaaaaatggcaagagttccaatttgggggtgggaggtggaaaaggaacccaattttcttatgaacagatatttttaacttaatggcacaaagtcttagaatattattatgtgccccgtgttccctgttcttcgttgctgcattttcttcacttgcaggcaaacttggctctcaataaacttttaccacaaattgaaataaatatatttttttcaactgccaatcaaggctaggaggctcgaccacctcaacattggagacatcacttgccaatgtacataccttgttatatgcagacatgtatttcttacgtacactgtacttctgtgtgcaattgtaaacagaaattgcaatatggatgtttctttgtattataaaatttttccgctcttaattaaaaattactgtttaattgacatactcaggataacagagaatggtggtattcagtggtccaggattctgtaatgctttacacaggcagttttgaaatgaaaatcaatttacctttctgttacgatggagttggttttgatactcattttttctttatcacatggctgctacgggcacaagtgactatactgaagaacacagttaagtgttgtgcaaactggacatagcagcacatactacttcagagttcatgatgtagatgtctggtttctgcttacgtcttttaaactttctaattcaattccatttttcaattaataggtgaaattttattcatgctttgatagaaattatgtcaatgaaatgattctttttatttgtagcctacttatttgtgtttttcatatatctgaaatatgctaattatgttttctgtctgatatggaaaagaaaagctgtgtctttatcaaaatatttaaacggttttttcagcatatcatcactgatcattggtaaccactaaag

SEQ ID NO: 663 - protein, 565 aa, Homo sapiens
MRKYQMTGVEEVTQIPQEEHAANGPELLRKKRTTSAEKNTCQLYIQTDHLFFKYYGTREAVIAQISSHVKAIDTIYQTTDFSGIRNISFMVKRIRINTTADEKDPTNPFRFPNIGVEKFLELNSEQNHDDYCLAYVFTDRDFDDGVLGLAWVGAPSGSSGGICEKSKKDGKKKSLNTGIITVQNYGSHVPPKVSHITFAHEVGHNFGSPHDSGTECTPGESKNLGQKENGNYIMYARATSGDKLNNNKFSLCSIRNISQVLEKKRNNCFVESGQPICGNGMVEQGEECDCGYSDQCKDECCFDANQPEGRKCKLKPGKQCSPSQGPCCTAQCAFKSKSEKCRDDSDCAREGICNGFTALCPASDPKPNFTDCNRHTQVCINGQCAGSICEKYGLEECTCASSDGKDDKELCHVCCMKKMDPSTCASTGSVQWSRHFSGRTITLQPGSPCNDFRGYCDVFMRCRLVDADGPLARLKKAIFSPELYENIAEWIVAHWWAVLLMGIALIMLMAGFIKICSVHTPSSNPKLPPPKPLPGTLKRRRPPQPIQQPQRQRPRESYQMGHMRR

SEQ ID NO: 664 - DNA, 5037 bp, Homo sapiens
caggaagcggcggcaggcctagcagcacgggaaccgtcccccgcgcgcatgcgcgcgcccctgaagcgcctgggggacgggtaggggcgggaggtaggggcgcggctccgcgtgccagttgggtgcccgcgcgtcacgtggtgaggaaggaggcggaggtctgagtttcgaaggagggggggagagaagagggaacgagcaagggaaggaaagcggggaaaggaggaaggaaacgaacgagggggagggaggtccctgttttggaggagctaggagcgttgccggcccctgaagtggagcgagagggaggtgcttcgccgtttctcctgccaggggaggtcccggcttcccgtggaggctccggaccaagccccttcagcttctccctccggatcgatgtgctgctgttaacccgtgaggaggcggcggcggcggcagcggcagcggaagatggtgttgctgagagtgttaattctgctcctctcctgggcggcggggatgggaggtcagtatgggaatcctttaaataaatatatcagacattatgaaggattatcttacaatgtggattcattacaccaaaaacaccagcgtgccaaaagagcagtctcacatgaagaccaatttttacgtctagatttccatgcccatggaagacatttcaacctacgaatgaagagggacacttcccttttcagtgatgaatttaaagtagaaacatcaaataaagtacttgattatgatacctctcatatttacactggacatatttatggtgaagaaggaagttttagccatgggtctgttattgatggaagatttgaaggattcatccagactcgtggtggcacattttatgttgagccagcagagagatatattaaagaccgaactctgccatttcactctgtcatttatcatgaagatgatattaactatccccataaatacggtcctcaggggggctgtgcagatcattcagtatttgaaagaatgaggaaataccagatgactggtgtagaggaagtaacacagatacctcaagaagaacatgctgctaatggtccagaacttctgaggaaaaaacgtacaacttcagctgaaaaaaatacttgtcagctttatattcagactgatcatttgttctttaaatattacggaacacgagaagctgtgattgcccagatatccagtcatgttaaagcgattgatacaatttaccagaccacagacttctccggaatccgtaacatcagtttcatggtgaaacgcataagaatcaatacaactgctgatgagaaggaccctacaaatcctttccgtttcccaaatattggtgtggagaagtttctggaattgaattctgagcagaatcatgatgactactgtttggcctatgtcttcacagaccgagattttgatgatggcgtacttggtctggcttgggttggagcaccttcaggaagctctggaggaatatgtgaaaaaagtaaactctattcagatggtaagaagaagtccttaaacactggaattattactgttcagaactatgggtctcatgtacctcccaaagtctctcacattacttttgctcacgaagttggacataactttggatccccacatgattctggaacagagtgcacaccaggagaatctaagaatttgggtcaaaaagaaaatggcaattacatcatgtatgcaagagcaacatctggggacaaacttaacaacaataaattctcactctgtagtattagaaatataagccaagttcttgagaagaagagaaacaactgttttgttgaatctggccaacctatttgtggaaatggaatggtagaacaaggtgaagaatgtgattgtggctatagtgaccagtgtaaagatgaatgctgcttcgatgcaaatcaaccagagggaagaaaatgcaaactgaaacctgggaaacagtgcagtccaagtcaaggtccttgttgtacagcacagtgtgcattcaagtcaaagtctgagaagtgtcgggatgattcagactgtgcaagggaaggaatatgtaatggcttcacagctctctgcccagcatctgaccctaaaccaaacttcacagactgtaataggcatacacaagtgtgcattaatgggcaatgtgcaggttctatctgtgagaaatatggcttagaggagtgtacgtgtgccagttctgatggcaaagatgataaagaattatgccatgtatgctgtatgaagaaaatggacccatcaacttgtgccagtacagggtctgtgcagtggagtaggcacttcagtggtcgaaccatcaccctgcaacctggatccccttgcaacgattttagaggttactgtgatgttttcatgcggtgcagattagtagatgctgatggtcctctagctaggcttaaaaaagcaatttttagtccagagctctatgaaaacattgctgaatggattgtggctcattggtgggcagtattacttatgggaattgctctgatcatgctaatggctggatttattaagatatgcagtgttcatactccaagtagtaatccaaagttgcctcctcctaaaccacttccaggcactttaaagaggaggagacctccacagcccattcagcaaccccagcgtcagcggccccgagagagttatcaaatgggacacatgagacgctaactgcagcttttgccttggttcttcctagtgcctacaatgggaaaacttcactccaaagagaaacctattaagtcatcatctccaaactaaaccctcacaagtaacagttgaagaaaaaatggcaagagatcatatcctcagaccaggtggaattacttaaattttaaagcctgaaaattccaatttgggggtgggaggtggaaaaggaacccaattttcttatgaacagatatttttaacttaatggcacaaagtcttagaatattattatgtgccccgtgttccctgttcttcgttgctgcattttcttcacttgcaggcaaacttggctctcaataaacttttaccacaaattgaaataaatatatttttttcaactgccaatcaaggctaggaggctcgaccacctcaacattggagacatcacttgccaatgtacataccttgttatatgcagacatgtatttcttacgtacactgtacttctgtgtgcaattgtaaacagaaattgcaatatggatgtttctttgtattataaaatttttccgctcttaattaaaaattactgtttaattgacatactcaggataacagagaatggtggtattcagtggtccaggattctgtaatgctttacacaggcagttttgaaatgaaaatcaatttacctttctgttacgatggagttggttttgatactcattttttctttatcacatggctgctacgggcacaagtgactatactgaagaacacagttaagtgttgtgcaaactggacatagcagcacatactacttcagagttcatgatgtagatgtctggtttctgcttacgtcttttaaactttctaattcaattccatttttcaattaataggtgaaattttattcatgctttgatagaaattatgtcaatgaaatgattctttttatttgtagcctacttatttgtgtttttcatatatctgaaatatgctaattatgttttctgtctgatatggaaaagaaaagctgtgtctttatcaaaatatttaaacggttttttcagcatatcatcactgatcattggtaaccactaaagatgagtaatttgcttaagtagtagttaaaattgtagataggccttctgacattttttttcctaaaatttttaacagcattgaaggtgaaacagcacaatgtcccattccaaatttatttttgaaacagatgtaaataattggcattttaaagagaaagcaaaaacatttaatgtattaacaggcttattgctatgcaggaaatagaaggggcattacaaaaattgaagcttgtgacatatttattgcttctgttttccaactacatcacttcaactagaagtaaagctatgattttcctgacttcacataggaggcaaatttagagaaagttgtaaagatttctatgttttgggtttttttttttcctttttttttttaagagtataaggtttacacaatcattctcataatgtgacgcaagccagcaaggccaaaaatgctagagaaaataacgggatctcttccttgtaaacttgtacagtatgtggtgactttttcaaaatacagctttttgtacatgatttagagacaaattttgtacatgaaaccccagatagactataaataattctaaacaaacaagtaggtagatatgtatgtaattgcttttaaatcatttaaatgcctttgtttttggactgtgcaaaggttggaagtgggtttgcatttctaaaatggtgacttttattctgcaagagttcttagtaacttcttgagtgtggtagactttggaacatgtaaattttttgcttgtaatgttatcctgtggtaggattttggcaggtacacacactgccctattttattttgagtctaagttaaatgttttctgaaaagagatacatgcactgaactctttccactgcgaatcaagatgtggtaatataaaaggatcaagacaaatgagatctaatactactgtcagttttaatgtccactgtgttttatacagtatctttttttgttcactttggaaatttttactaaaaattgcaaaaaataaagtattgtgcaaagatgtaaggttttttgaaacttgaaatgcattaataaatagacgattaaatcaacttgaaggttctatactctttgaactctgagaactatcacaagaagcttcccacaaggcagtgttttcttacagttgtctcttcctacaaaagtatagattatctttattcttaatactttggaatccatgtagaaaatttccagttagatactctgcgtacacacaataaacctttttaaaacacc

SEQ ID NO: 665 - protein, 746 aa, Homo sapiens; identical to SEQ ID NO: 661

SEQ ID NO: 666 - DNA, 68842 bp, Mus musculus
gtctgagcaggacctctatgccatggggtcttatagagacaggatcaaaggaacattagaacttgggacttgggtagggaaaggagccacttgcttcagagtctgttttggaagtatgtcagcagaattaacaaaaaaatttgctctgacagtgtcttagttggggtttctattgctgtgaagagaccccatgaccaaggcaactcttataaggatgacatttaattggggctggcttatagtttcagagtttgagtccattatcatcaaggcaggaagcctggcagcatgaaggcaggtctggtgctggaggagtgaggacttttacatcttgatctgaaggcaaacaggagaagactgaagagaaggcctccaggcagctaggagggtctcaaagctacctccatacagttcctcagacaaggccacacttactctcagcaaggcctcccctcctaactgctgggagcctcccagcctggggcaggataggggtggagtcacagagtaggactctggtgatgattttaaagtctgaaggtctcagggctttctagctctctaactgtactgaaatgctgatgataacttctaaaaagtcctaaaaactttcttgttctttctgagggtaaaagactgctggcttaggcgattaacacccgtagcctaacagaggaggattaagcactgcagcctgtgttctatctcagcaggagctgctgggctctttcagtctgctagttggaagtcacaggaagagaagtgattatagagtttattgctaaagttgcagaaagtttcccatgaaagctacctaaggggaaaagcagaaagatcctaagcaggtaaagggaaaaattctctaagtggggaaatggaaaagattctagtctaagtgaggaaaagcaaaacagtctcctctatcgaactcacttatctctttgtcctcagtacttatacatctttgagaatacatgatcacatattacaaagttcatcacaagttcacacaaaaaaatcaaatcgtaaattgaaagagaagtttacaacagagaatgtttatatgtgtatccattaagagtgattatctagctaaacatggatcacctgtctcagctccacaggttcacttaaggtttaaaaccataactatgctattagtgaagctttgtatagataaacccagtaaatattttatcttctgtcctaacagcaataataagtctttatgttcctttttgtgacctttggttaattgttttacaacctcttgtgtagtctcccctcccccagcctgaaacctgcttgctcggggtggagcttcctgctcattcgttctgccacgcccactgctggaacctgaggagccacacacgtgcacctttctactggaccagagattattcggcgggaatcgggtcccctcccccttccttcataactggtgtcgcaacaataaaatttgagccttgatcagagtaactgtcttggctacatttcttcttttgccccgtctagattcctctcttacagctcgagcggccttctcagtcgaaccgttcacgttgcgagctgctggcggccgcaacactcttggactgtgctctgagtaggagaaagtctgattgctatctaagagcaattaactgatgacacttgggagactggcagagttctcatcgaagttttgatcatcagaaaaagtcctaatagcggtcccattaataaaagagctcaatgatcacagatataactttaggaattcctataggatcatcattaggacttaagtcatctatttgtctatatagcatcactacaagacagtacatcttcatggatctgctccaaaggggtgtgccactatttagtgattgctatatatgtataataatgtcaggaaaagcatattaatagcaggaatctttcctaaaatgagtccctcacagccttgcttaatgagggcacacctgtcgcagattatataataatctgaggcaggccacttcaggatgatcacctgctagttattagcttgtcccattatggctcctgacacctaacagtgccacttcctgaaccaagcatattcaaaccaccacagacagtatttgaataaccacagtagccctttaatagagatgtcctgggttaaacacatcagtgaataactcagagtcactgacaaagaactggtgtcacattaagggagaaaatgaaaaccctgtccgtggagtcattaaaccaagagcaaatccagattcgaattctgtctgtcatatgctcagtatttttcatccttctgtctgaccgttgcatgcgtctaaatccatgtctgcctctgtacctgagtctgtctctgtctgtcagtccctaacaaaggacttcactgtgtctttactgaacagcacagaaggcatcacgtgggggaaagaatgaggggcacttcacagaaatctttaacagagtttacaaagggattatgtcactggctccaatggatcccaactgacgcagacaacaaacatcactgcttaccatccaagagccataaacgaattttcattttaggggcatggaaggtacatcataatttaacgagtatataacctaaactatttagtgttagtgtaggtcataaaaacttctctgttctctgtgataaacccaaggcaagtgaggttatctgttacattgttctcttaaaggaagattaaacaaacaggctgagtactcaggcttaagggacttcaaagtatattattaactttggctgtggggttcagcaaaattccagactctcaaaatgtaagagacacattgcgatgaacatttgcacgtgaaggtgcgtggacgggaatctactgtgggccacactgcagcttccgcagtggagggttctatgcttcgttgttgttattgttgtttgtgtgctttttatttggggaggggaggttgcaagggcaaagggtgagtaacaggggacaggaagaggagcaggactgggatgcatgatgggaaacacacaaagaatcaataagaagttttaaaaatgtaagagacagtttcataatattgcattgccacaagaattttttctttcttcttctttcttttcttctttctattcttctttctttctttctctctctccctccctccctccctttctctctctctctctctctcctttctttctttttccaagacaggattcctctgtgtagccctggctgtcctagaattcactctgagtgtaggccagtcttgaactttgagatttgaatgcttttgtttcccaagtgctggcattaaaggctcataaaacctcagctggcaatctatctatctatctatctatttttgccacagaaatttcaaataagagtatgtggggaggggacaggggtactgaagagatggctcagcagttagagagccctggctgctcttccagaggacctaggttcaattcccagcacccacatggcagctcacaactttctgtaactccagttctgacaccctcatacagatgtacatgcaggcaaaaacattaatgcatataaaataaaaataaattaattaaaaaaaagaatgtgcgtgtgcgtgcgcgtgcgtgtgtgtgtgtgtgtgtgtgtgtgtgtagttagttccccaggggaacagtccctcactaccaaaaattatacaatcaagtttcacaaatttggagaaatcacagcacatgtggactgcagcagacaatcctttgcctggcatctcccctgtcaggtaaagattcaaaaaaagactattaaatagcaatggtactgagaaggcagaggcaagtggatctctctgagttccaggccagcctggtctacatagtgagttctaggacagccagagctatgtaaaaaagaccctatactttatttctaacacttgctaggaagaagcaggtgatctctgtgattttgaaaccagtctggtctacagagcaagttacaggccaagcaaaactacacagtgagatcctatcagacagagagagagagtgagtgagagagagagtgagagaccctaaaagtatttcccccttggggctggggagatggatagtcagtaaagtgtttgccatacaaacggaaagacctgagctctaaccatagagatccatgtctgttgccccaacactgaaggggtagaaataggtagagcctggagcccactagctaaccagtctagacaaactggtgagatccagattcaatgagatactgtttccaaaaataaggcggagagtaattaaggaagccaagaattctggcttctcctgattagaggtgtccaaagaaaggaacaggtccggtaggagtcaggaactatgtctctggtccacatcccgttattgacactgtgatccattttcagagaagctggagaagatcagaatttctatgacccactgagaaccaatcacaaattgctgcggacagtccctgtcatggtgtgatgctggggacagcaacaaatcacaacactgcaatgacacaggaggcatgatgggatgaaccctttcccactctgcctgaaagctgtagagccgcccaccctacttataacagattaaacctctgaacctgtaagccagccccagataagggttgtcatggtcatggtctcttcgtagcaatggaatagtaactaaggcagtcagcttttgttaatctcagtagatctctaatacttagaaatttgcaagctttatttatcaacaagattttagtcatcaaacatgttgttcctcatctaaaaattttactctcaggacaaaaattatagaaaatccatcctaatccaaaatgtcttgaagatctgcttttgcctccttagtctaaaatggagacatcgtgggactaagaagtgttcccttagttatctcaatcaagatggtggtgaaattacgtggcatggactctcttttaactttagaaatggtggctgccagccacagggttgcgtctaccctgatgaggacatcgatcaagatggaggcaagacacattgttggaattttaaaacatctattttccttaacagagttgaattcaaactgcatatacactctgcagtagtaaattaacattaccttatgtgtggattttgtaaactatcaatcttttgtttttgtttttgttttgttttgtttttgaggcagggtttctctgtgtagtcccagtagctgtcttggaatgtgttttgtagatcaggctggcctcaaatttagagatctgcttcactctgcctccctaaaggtgtggaccattatgcttggttgcttgttacactcttttttttttttttttttttttttaaataggtttctctttgtgtagctctggctgtcctgggactcactctgtagaccacactggctttgaactcacagagatccagctgctactgcctcccgaatgctgggattcaaggcatgcgttatgatacttgaaaaatattttacagatttttaaaccacacctagtgaatttacaaatctggagataaagagtttacgtatagtcttaagagatttctttatgagagcagactgcaaagaagtagaaaagataagagatttttttttaaaagagtggataggtagaaaaaagcttatagattagaaacttttgcaatcatttgcttgtgtggtggcagaagttgttataatccatgagaatttgaaaattttgtggccacggatctgtcctgaggccaagtcatttttgggaagatactgaggttctaatgtaatctctgagtccaaggatgaaaagagagggttgcgtgaacaaaactcctccagagggaaggttctgttgtgtctcgtttgagagccccaaaagacgaccaggtagcccactctgatacagtcgtactaagggtctttattcaagctcgagcttgggcaacaacacagtctctctgatgccgcagaacgggagggtgaaacctgagctctcagagggacaaggctttataggaaatggtgagcaagcaagggggtttcaacccggcaagcaactagtttatgactattgtaaactgacaggtgggtgctctgaataaaaccatgaagcaatcacaaacgctcagaaattatatttgaaacaatcagactaatccttaattgactgttgctaggaagtagctagggagtaactctggggtataggccaaagataagtcatggagtcgttcctggtacttgggtgtagcttgagtacagctctaggtcaagtttctcttaagatggaggccggtcccaagatggaataggtttggcctctttgttccagttccagctcccagaagggagctgagagacagcagggacaaggatcaaaagcaggaattctaccagcaggattccagtattgtagaggtcctggaggacataaggaggagatagagtgggcagcccccgagggagatgaggaagcgccaggaaggagctgagaacatgtggtccttgtgacagtttcaacttggagcattcccaagtagatcaagagacttgtcagagagaaatatcccaagttaaagatgaggaaaggcaggctggagagatggctcagtggttaagagcactgtctgctcttcaaaaagttgtgagttcaaatcccagcaaccacatgactatctgtaatgagatctgatgccttcttccagggtgtctgaagacagacagcttcggcaagtgggtggggcaaaaagaaaaagtgtctgaagatagttacagtgcacttacttttttgtttgtttggttttttttcaagacagggtttctctgtatagccctggccttgaactcagaaatccgcctgcctctgcctcccgagtgctggggttaaaggcgtgtgccaccacacctggctttttttttttaaagatttatttattattatatctaagtacactgtagctatcttcagacacaccagaagagggcgtcagatctcattacagatggctgtgagtcaccatgtggttgttgggatttgaattcaggacctttggaagagcagtcggtgctcttaaccactgagccatctctccagccccctacagtgcacttacatataataaaaaaataaataggcatccttttccaagtgactggggcccaggagggcgaaggagcttcctggcacacctgtatggtttttatagtaacagtaggctcctttgagacaaagtaggcagcttcagggtgacacttacccagcagatgaggagagagcaggtggagggagagtaaacctttccaagtgatgaactcccaggagggcatagcagtttccaagagccagagagactgagagatgccctcacagtggagatgaagagcaggagggcaagaagtggttgaagaggcagaccccagaatttggaggcaaatatggtgggtgacagaagccagcagaaacaaatgaaccataggtccatatacaccttactgaaataaagtcagcagcttggttcagttaggaagccaggccccttgaaaaggggtttatttatgccccactgagaggtttcagcatcggatgtataaagtgagggcgtggccaccccaaggtatggttgagggcatggtttctattgtagatgtgagggagactacagtcagaggcatctggaagagtctagagcatagagactaagtagtttagtcgattgaatgtggctagcagactgaacttggccatgggaaggcagggagggaagcaaccctcggagaggagcagaagagaggggacggagaggagaagacaaaggagagcaatcaagagtgcacagctgacctgtctaggaaaacaagaaagaaagaaagaaagaaagaaagaaagaaagaaagaaagaaagaaagaaagaaagagagagagaaagagagagagaaagagagagagagaaagaaagacagacagaaagacagaaagaaagaaagaaagaaagaaagaaagaaagaaagaaagaaaagaaagagcgagcacgcagctgaaatggaagggttttaagggaaggagaaagtgaggaagggaccagcatgggctgggaacagttagggtagggagtggggtgggaaaagcagccacaggcagttgtgaaactgaggaagtctgcatgcaggtcagcatccactttggcatactactaaataccacaaatagtcttgtcctgacctgacaggcgccatatcactacccagaaagctgaattcatatccaccatgaaaagaaaaggggctctctgacgcccaccagcccgtctggcttctgcttctctctccccagccctctctccgagtgtttaccccctcccccgcctctttctctgtctctctttatctctttttctgcttctacttcattctcaaccccctttccatccccacctcaaaaaaaaagcaaaaaacaaaaaacaaaaaaagaaagaaaaaaaagaaagaaagaaaagaaaagaaaaggaaagaaaagaaaagaaaagaaaagaaaagaaaagaaaagagggagatcagacttatgatggagttggaaaaaatggctttattctttcttttgagtttcttgtatattctatggcaatcctgtcaggtgtacagcgggcaaagatcctccctcccccacgctgcattctacgagttatatattcatctaactggtgtgtaactaagggtgaccctggattctgatcctcctgcctcagtgactatatctttcttacccggttggatatttaggattactttgtttttagccgtacttcctttctgggacacggcaaggtatactatgtgtaagcagacgattgcacaccgtcctctgcatacctgaaactagccgcatgcacgcagtttggcaggatcagaacaacagtaggatcccattctcgtctcaacggagaagagccccccccccccgaaaaccacccccaacacctttcgaaaagggtttcacaaacacaaatgcggaacgatttcgagtgaaattcgcttttttcctacgtccaagcaaaaaggcattatgtggtccgataggtcattgtaagagagattgggctacggatgcggctttgttttcctgtcacgacaatttgcggtagagtgttaggggaaaggtaaggacaaaggctgaatttgagggaactgaaatttgagctgtagaagggcccgagatgatagggagagctaggagtggactacgaaactgtgtttctttctagggtggacagaaaagcttgatgacccggggaggctgagaaagagaattaatttggaaagaagcgcaggggccgggttgcgggttgcaggttgcagcgagcgcccaggttatccaggccgtgctaggacacgccttgaagcccggaggaccgctctggagcgagagcagatagagcggaaagccatttgcccggatgaggaaagcggtggcacgggatcgtactttctccagcttcacctagttcatcctgaagtttgggtaaaaccctgaatcctctctatctccctctaaaagacctgcccaccaaagaaatgggggtgagcagagatggcttgcatttttagccccgaacccaaaggacataaaatacaccaaagtgggttgagacgctgcttactgtctgattatccccaacttgcctagatttcttcacctgaaaatcaagccacagaactgtcgtcggggctgttatagtttatacaagtaaataaagcgttagaacctgactgtaactcttctagtaggaaaagccggggcgttggtcaccggagggatcatgtaccgggacataggctcctggcgccgcacagccacagtggaccaacttaaatagtgtcaaaaccgttggaacacatcctggacgcgaggcaaggtccagcgcctgggcgggggttgtgcgaggtaggcgggcgcggtccctgggactcgcagctcattcctgctcgcgtccagacctgcggtaggcagtctgcagaagtggctggagcgagctgcgatgacttccaggtagtgagtgtccctgggccggaggaacgtgggcacgcggagttggggaggaacaggtgtaacggcggcagccagcagtgctcagacagcaggcagccggctggtggagcccggggagtcttcgcgtgggtgacaaggatctcccggcacagtgcgtgccttcctggctagacatcccgctcctctctcccgtctcagacgctgcgccggctcaaacccggaaccggttttcccatgggaaaatccgacttggaggttgatctccagggggtggggggcaagtccgagcgtggggtcgtgtcttgggggtgccgggtgcgctgaacggggatcaggcgcctacctgactgagtctggtacccagctgtaggatgtgggtttaggcaagtgtaagagcctggatccctgagtcctttccagagagttttatagcagccctcacagagccaatgggtttcagaaggttgcatcaggagtaagaggctcagctgtacctcaatgcaccgcacaacaccgtggaacgctgaagaggctgaacttaggcgtgttcgattaagttttacaaaacactcagaaggatcagaaacgagttgtgtgagttagaaatcattttggtgtgttacacacacctcctcaaagtttctctctctctctctctctctctctctctctctctctctctctctctctctctctctctctcttttttcaaaagcaaatgcagttaaagggaggggcatgtagctctgatggtgaagtgcttgcctgacactcagaggccagtcactactactaaactacctggaaggcagagggccacaattctgaggccagatggacatccgatctgatctcaaaactttcaaaggggctgaggaagttcctcagtggtatacggtttgcagactctgcaccaggaccaggtttggggggggggggttgtttgtttgtttttaaagcacacatttgttccacaaaggatttagggagagagtggaggaaggcagatattgggagtctgctgtgcattgctaaggaagggcttcaggaatcccagagtccttcaatattctttctagcttcctgcttcctgcatgtgggaggagataggagctgggacttctgtttcatagactcagtcaacttgaatgatgctaatgaacacaaggctggcacattttgggccagactttgtttttccttcacttataaagagctagaattgtacccttagatctacgattttcatctctgaagtctgctattttcctgttttgactatacagtgctggccagtgtggccttggggaaacatctcttccaacttctgactttctatttctgaaatgggacagtttccctcaaaaacaaacaaacaaataaacaaacaaaacccacacaaaaccaaccaaacaaacaaacaaagccaaacacttccccaaataaaacaaaaacccaagaagagattagtgtcctctaaacaaaactgactatatattaattattccactcatttcaaaagccagtgtgatggctcatgtctgtccactcttcaaggtcatcttttgctacattgtgagtttgaagccagcctgggctacatgagaccttggctccaaaggtggaaaaaaaaacgttcaattcattttatacgccgggagcacctaggagagggctccaggattatgtctctgtaaagtggactgaaaagcctgatgaaggaagaggggggccaggatggagagatgcactcattcctatgcagcactgatacagggtggagcggctgtgttctggattctcccagcagctctcctaacagttcctatgaagaatatactgcacgtatctccactttacagtgggggaaatggagggagaaggttgtctgagaaccatgctggaaggagctgattggattgtagcaattgtttactagaattttatttaaccagtgttgaagaactttctctctctcctccccccaccccccaccccctttctcattttcacacactcacttaaaaaaaaagagctagctactggatagtccctactatgtgctgggtatcttttttgttgttgttagctttttttgttttgttttgttttttgttttagggggggtttcgagacagggtttctctatataagtgctgggtatctttttttgttgttgttgttgttgttttttttttttttttttttttgagacagggtttctctgtataagtgctgggtatcttttttgttgttgttgttgttgggttttggggggggtttcgagacagggtctctgtataagtgctgggtatctttttgttgttgttgttgttggggtttttttgtttgtttgtttgttttgttttgttttttcgagacagggtttctctgtataagtgctgggtatcttactaggttctggaaacacaaaagtcccaacttcttggagaaatggtaactgtggtgtatttggcaccgaccggcatcgaaacagatgtcctgggcaaaggctttcattccaacgttacattcccctcccttggaccttgaacaacaccacatttctttaaatgcattctcattaccttcagtgaagggaacatttctgcgacctgctcctgtctgcaggacatgtacacggaagtcagaggacgacttttcattggccttgttagttgcagggggtcaaattcatggcttcagggtagcaagtgtcattttattaagaagaagaagaagaaaaaggagggggaggaggaggaggaggcaggaatatgtttaatagagccaggtatgtggaggtgagaggggttcctcagcgggcccatgctgaggcattcgttccccctgaggtaccagccacacatgctgaaccaggtttagtacagcatagagtttatctaggacgtgggaaggggagttgagaatggagtagagagaaggcgggtggggggtggggtggggggaggggaggaaagaagaggctgagcaggaacgtgttggggcagggagggagaatggggtcagagagggaagagagtcagagataataagagagccccgcctacctggctgttcctggtaacagctgggcggagcctagaagaaatgctaacagcaagcacctttaaaagtgaacctgtccagccacccagccacttttccctccctccccttttttttcttgcttctttccgattcagtgatggagtttcatgtagcccaggttggctttgaactcattatatacccaaagatgaccttgaacgtgggatttctcctccacctccatgtcccactgtggcagttttaacaccctcttccctctttggtaaccgatgaataagcaataagtattttcttgtgtctcttgtttttctgcttacttatttagtgtgtgtatgtatgtgtgtacatgtggacatctccaagtggtgcatgtgaggaggtcatgggacagattttgggtgtcctcccttccgccttgttgaggcagggtctttcctgcttctgccaggggtacgcgtactccactcccggcctaaagcttcctgatgattctctcggcgaatcttttctgcggttgttttttgtttgtttgttcttgagacagggcctcactatgtagccctggctgtcctaggaactatgtagatcaggctggcctcaaactcacaaaagatcaggagagcctccatctcacaaacactgggattaaagacatgggcaccttgcttgggagcccccctcccatttttgtggtagaaatgctgagactatagatgcatgtctttttatgtgggttctgaggtcaaactcaggacgttgggttcccacagcaagtgtgtttcctggctgagccatttccccagttttttttttttttctttttaggcaattaaaaagttatatttttaaaagattttcaagttgtgcgaaatatgtatgaaggaaagcattaccagtggtagggtttttgtctagtttgcatgaaggcctgggttcatgcactgtattacccaaaggggcagagcttagttagctaagatgtttaattcatagttaataaaagattacacttctcaagccaagcatggtgggtctctccatctcacagatcttggtctacaggggcagtgggagcagagacttcagagggggatttggatgccctgtgagtgtggaaggtgaataaacctgagtcgggaggcagagcaactttactcagggtgacttaaggcttttaaagttttggggaactgagggtaggactttcaggataggcaaagatcattggctgggagtttagggtatctggaatgtctcattaatatggggaagcattctaggaatctcaggtccgggaatctaattgaggctacatgacattcctcagggaatgagacagggtcctaatctcctcactataggtcaaagagtcaaagctcagccttggctggagggctagagaaaccctgtttccaaaaacaacaacaacaacaacaaaaaccaaaaaaaccaaaccaaaccaaaacaaaccaaaacaaaacaaaaaaacaatactggttgaacagagagggaaaaaaaattctactctccaaaacagctagagagattctatatgttataaaattaattcacttgccagcttgttcttataaggaatccaggtggctgtctgtgaaggagtgcagtaaagaaactgctgacataactactccatgattattatagatgtgtgtgtgtgtgtgtgagagtgtgtgtgtgtgtgtgagtgtgtgtgtgtgtgtgtgtgtgtgtgtgtgtgtgagagagagagagagagagagagagagacagtcagaagcatatggaagaatctggaatagacaaagaaagaagtcaactgaacatgtccagagctagggaagtgggagagaagagtggacatagagagataaagaatagagcagagctagaaagagtaagtaagtcagagagaattgtggaaatggccgggttatatgaaggaggactagctgaggggagggaggcctgtgagctgcagggagcttagggtagctgaggaagtaagaagacaggatgctggcatggactctgaactgtccaacaggtacctgtgatatcagaacgggtgttgacatgctgataggcggtggcacaggtctcttctgccagagagaagggaaatgatgtcttgatagatgggagcaggcttcacaagtccccgaggaagtctgacttttatttaaccaccagaatcctatagtccaggctgggctcatttctggctcttgacagcctgagacctgacctgagaaccaggtggatgctgggagccaatcacccaactctgagttcttcagattaaattcctcatgaagggaaaaatctaaagatacggttcttggctagggctcccatatattgtgaaaacacagcagaaagcagctgtgcagaaatgaagacagaagtcctcctatttttctgggatgaaataacctgtgcagaaattaaaaatcccccaaatcaaataccctggaagggctggtgagatggctcagtgggtgaaggccttggcacaccacagatctgagacgaatccttggaacaacatgtgggaaaggcagaacccactgcacaaagctgtcctctgatctccacctttgcatggtgtgtgtgtcccaccccatgcctgtgcacctgaacacacacacttgctcacagtcacataaaacacatacacacacaccaagaggggcatggtggctcatttctttaatcccaaccaacactccagaggtagagacaggcagatcactatgagtgtaaggccagcctggtctacatagagcgttttaggatagccagagctatgtagagggaccctgtttcaaaacaaaaattaacaagtaaacaaagcaacaacaacaaacccccaaaagcttttgtttacatgagatatttttactgctacttgacaagttgtgaattaaagctgaggccttttaaagatacttaagaattaattaaaagtgaccggggctgggagtggtgttgtggtgctagcatcacaatcaatacaatcaatcaatcaatcataaccttagtaggtgttatcccaaattcatttatttatttatgataaagatttcacatgtagcctaggctggcctggaatttgctttctagccttggcctcttgaattctgagtttataggtatgccctgccattctcaggtctaaacatattttaataaaaacataactataattagttatgctttatatagctataattagatctgagtaggtctccagtctccacttcctagctcagtcctgtgccctttgcttagaggttgtagattttctttaggtgaaactctaccaattcaccatatggaaacaagtttctgagagaaagagacagagacagagacagagatctgggagagtccagagtgacatgagtagattgagccaggtcacgtgatgagagatgggagaggagaggagacagggactaaattaagaggtcaggaggttaaagtgtagataaaagggccaggtaatgaaaatggttggatttatagggtaggggggggggcatggtgtgctagccaggagggccctgtaacaggtaggggccagtgtctggctttgacaatgttaagtaggcacttccacagtttgtctggggtttacaacttcctactcaggaaatcatctgaggacaccaccaaggctatgtgcatgtttgccaattgcaaaagccagtgtgagaaaggatgacacgatcggttaccacagtgagctgaggagtttgtctcctaccacaaagtcaagatggagggagtcctatgtcccaaccatacaggtttccgatgctgagcagacagcttgcctttgaggcgaccacttgataaccacagctgaagacattctggttcccagaaaaaccataggcagactgctcacagtgtgtcagttgacagtcctttcctactttgtgacgagttgtttctccaccggtgaaagaagtcaattcaagccagattagattatattaaagtcagggttttgggaagctcttccgaagagcacatgaactcgtaaaagttactctttccgttctcatgcctttggatgaagcaacattttcagtgtggaagtctcctagcccggtgattgacaggtagttccttattactaattaacattagggaaaggaacaatggtatatagtgttctgacttttggggtagatcagaacaccaggtctccaggccaggccaaggaaagagttcagatttcattcctttaactaggaggaagtaactttacttaatggggctcaatggagtcctgatttccacctcctttgatttggtagtttgaattttaagtgggtgttgcaggatttttgaccgcattgggaaccccgagattgtgttggaagactctgtttataattgtgatatagctcagccccttagcacacacctttaacaccctgactggaatagagacaggccctgagtacacaaatcccccaaaatgaaggtaaagttagtttgtagaaggaagcacacctgtgtttgaaagtgatgtctaattgagtggtggacaaagtgatgaatcagagaaagatctgatagaacaagatctgcccgactctcaggagaagagcgaggaaagggaagctatttgaggggcggagagagaaacagttttactgggacagttgtacagagactgattgcagagaaagaacaagctagacacaggtgaagacgaatgagacaaagaatgagctagaagattagaacagattaccagagttagaggtcaagcagaacaattgagaggcagagagagagagagagagagagagagagagagagagagaggccagattgaaccagtttgcgcagagaggagtttgagccagagtatagaaagaacaagaaagggcaagcttattcagaagcaagtctccaggcttagattagactatattggaggctagaaacttctaggactagttctaggttagcaggcaaaagcggtacgcatcagagagaacaattcacaggaaaattaaagatataaatgggggcaaagatgatccttccctttctagagtgtccagagaaatggggggggggcacatccaaaactgatcacgagggaagggtccatctttttttccgagacagggtttctctgtgtagccctggctgtcctggaactcactttgtagaccaggttggcctcgaactcagaaattcgcctgcctctgcctcccgagtgctgggattaaaggcgtgtgccaccactgcccggcaggaaaggtccatcttgactggccttcaagcctgccagtacttgtccagtcacccaataactgcaggaaaaaaccaaccagcactcattttgtaccctaggcccagcactgccatttggtctgtcacctctgcactcttgttaccattttaactctggagcggttctcattggttctttcagatacttgtgggatttgtgggtaagcatcttcattaacttgtgggaggacatgagcaaatgtctattcaccccggctaggtcaccaatgacagttgtaagtaggaccccaccaaagcccaacctaacaaaccaataagctttgaggacttacagaaagagcatgagttatctacaggaacacgggtgaccgcaaaataatgacatcagtacaaagttgcaccccattgtggatggagacttagcgggagccacactgtggagtcccatttctagtcaaccgtctacttcctatgaatcctagtatctcccaagatcacttgcagctggtcagtcctgtgacccttccttggcttcttctacttccaacgagcaacagctgtaaccagggaaccgttactggagacctggaggcctcagtcttttttaattaatagccatggtaatcagccaaaggattctccacaccaaagaaacgcctggaggaaaggagtcacattgcaatatccttgaaggcggggacagttttacagacaggtcctcagcatggtgatgtacgcctttaattccagcactcagagaggcagaagcaggctgatctctgagttcaagtccagctgtgatctatatagagttccaggtcagccagggctacatagtgagatagtttcaaaaaaaaaaaaaaaaaagataagaaaagaaaaaagaataacagcctttaaaaaaatatatttttgaggtgggggtctcattaattcagctgagatggccaggaacttatagagatctttctgagtcaaccttgggagtgctgggtgctgagagtaaatgcatgcaccatcacacctataactatgtcatatttaatatgtttttccccactgtgcacgagtcgctgtgcacgagttacttttctcatcattgtgatgtaatatgttagagaagcaatctaggacagagcagcttctgctgttcacagttcaaggctacatctgtccgtccgtcatgggaaaggggtaatggcagcaagctgaggcatctggtcgagttgtacctctggttgggaagcagcgtgatgagtgctgttacttaaatcactctcttcttcttcttttttttttttttttgttttcatttttgtttttcgagacaggatttctctgtgtagccctggctgtcctggagctcactttgtagaccaggctggcctcgaactcagaaatccacctgcctctgcctcccgagtgctgggattaaaggcgtgctccaccacgcccggctcactctcttctttttaatcttaaatttttaaaaggcttttgatgatgggtgtgtgaagaacgtgtgtgtaggcacacatacaagtgtgtgcactcggcaggtccaagatccatgttaagagttgtccctggagtagttgccgggcttggtggcacacgccttcaatcccagcactcgggaggcagaggcaggtggatttctgagtttgaggccatcctggtctacaaagtgagttccaggacagccagggctatacagagaaaccctgtcttgaaaaaccaaaaaatccctaaaccaaaccaaaccaaaccaaaccaaaaagagtaaaaagtgctcctaaccactaaactatctctccagtccccgtccccccacccccaccctcacccctaaagtattttatttttactgatagcttagactggtctgtaacttactctgtaacccaggctggccctgagcttctagcaatcctgtctaccaagtgcttggattaccagcctatggccacacccacttctgccccgcccccttgtgcatgtttgctaaacactctacaactgtgcttcaccccacagctgtgttcttaacctttcttgggaaaagtttcagtagtttagtaagttgttaaccagcaatgttggatagttttttatcaacctgacacaaagcaaagtcaactgagaggaaggaagctcagtgaagaaaatgcttccataagatctagctgtaaggtgttttcttaattagtgattgagggctgagggcccagcccattgtatgtggccatccctggtttggtgatcctgggttctgtaagaaatcaggatgagcaagccagtaagtagcactcctccatggcctctgcatcagctcctgccttcaggtccctgtcctgtttgagttcctgttccttgatgatgaacagagaattgagactataagccaaataaaccccttcctccccaacttgcttttggttggtcatggtgtttcatcatagtaatggtagccctaactaagacacaagctttacttcagaaatattttttcactatgcaagaatttttaaagttctgatatatattcaaatcttctgtctcttccaccataggtgtttctggatagtcagtggctatgactcatgaggggttggtgggcaaagtgcacagaaataatgagttaggggctggaaagatggagattaagagcccattctggttctgtagaagacctgagttcagttcgaagaactcacagtgggtggctcacaagtgcctacaacttgagttccaggagatccagtgccctcatctggactccacagcacctgtactcacatatacagagtcacacacacacaatcaaacataaaaataagtcggggatagtgagatggctcagcggataagagcgcagactgctcttccaaaggtcctgagttcaaatcccagcaaccacatggtggctcacaaccagccgtaatgagatctaataccctcttttgatgtgtctgaagacagcaacagtatacttatttataataataaataaatctttgggccagagcaaggagaggccgacccaacaattcaattcccaacaaccacacgaaggctcacaaccatctatacagctgcagggtactcatatacataaatatataaataaattgcaataaaaagtaaaataagtctttaaaagataatttaatttattttatgtgcattggtatgaggatgtcagatcccctggaactagagttacagtcagttgtgagctgctatttatcagtactaggaattgaacccatgtcctctggaagagcagccaatgctttaaaccactgagccatctctccagccccaaatgaaacaagtctttaaaaaaaaaaaagaatttctaaagcaaacgccaaaaaaatttttttttctggtttctgagacaggatttctctgtgtaggcttggctgtcctggaactcactttgtagaccaggctggcctcgaactcagaaatgtgcctgcccctgcctcctgagtgctgggattaaaggcatgtgccaccacgcctggcacaaatgccaaatcttgaaaaacataatcaccaccaccaccaccttcttgtgtaggaccaggagaaagacccatctgggactcaggcttcagctgttccctatttctgctcatttcaaaagccaaccctgccaattgcatataagccagaagggacacaacgctaacttctgacacagatgactaccctgagtctttattttggcatggacttttatagtgtgcacagttgttctttcttggatgtttcttaggcgttgttcaaccagcttccatgaaagcacataaactgtattgttttaacaggataaaatctttttacttatccagtaaaaattaaaccttcattaataatctcctacaacaatctctgttaatgattataccataagatgttatcctagttagagccagatttggggagtcagaagcctaagaacgtggggctgagggtttaactcagtggtagagtgtttgctggacatacagaaggctgtgggatcaacacgtagcattaccaaaaagtccaagtccagggatttaaattgaccacggggctccacgcctgtcatcctggcccttgggctaggggtaggatcggaaggaacagggagtccctggagcaggaaggagcaggaagtcaaggttatctttggctagacggtgaaattgtggtcagcttgtggttttttgttttagtttttattaaagaaaagtccaagggccacagagatggctcggcatataaaggttcttgcctccaagggaaacaaacgacatctaatccctgacttcctcgtggtagggaacgagaatttattcccaaaagttgtcctgggacctccatatgtgtgccagggcacatgcacattgatatacatcccccaaaactaactaactgacaactaactaactaaatggttttttgtttgtttgtttgtttgtttgtttgttttttttgtttttagagacagggtttctctgtatagctctggctgtcctggaactcactctgtagaccaggctggcctcgaactcagaaatccgcctgcctctgcctcccaagtgctggattaaaggcgtgagccaccactcccagcaactaaatggtttttaagagctttaggaattgaagaaaatagagaaaattgaagaaaatagagaaaattgaagaaaatagaggtgttctgctagtgtttctgaaacttgattaaatgaatgtgttttgataccattttataaagttcagacattaataggcatacataacaaaggtagtgtaatttcctcatacacacacacaaacacacacacacacacacacacacacacgaagttattctgagtacttgttgattcctggatcaataaccgtgccttaaaatcactagctcctttgaaagctcaccctagagcatggccacccccagtttttcttttatctttttgtttgctttggggggggggttgttgctttctttttcaagacagggtttctctgtgtaaccccaggtgtccaggaactcactctgtagaccacactggcctcaaaaccagagatccacctgcctctgcctcccaagtgctggaattaaaggtgtgtgtatctatatatgctttgagtatctgtatgtgcatcacttgtgcacaggtgcccaaggaggccacatgagagcgttggctcagatcttcctgacctggagtagtagctgtgagctgccgtgtgagttgtgggaattgaacttcatctgcaagagcatcagttgcttttaaaccactgagcatctctccaagtcccacacggtagctgttttggtgtatgcttaatttattaatttcatattttgtcatgaaaaaaatgtgcatttaaggtgggtggttgtggtgcctttaatcccaacactacggaggtagaggcaagtgggtctctgtgagttcgaggtcagccaccctggtctacagagtgagtgccgggacagccagggctacacagagaaactctgactcaaaaacaataacaaaaaaagtgtctatttaaaatttaccattttcttctcaatatatagttctagcatatttcgtagtgtagtatgttctggatttgtttgtttgttcatttgtttgtttgagatgtgtagtggtttgaataagaatggctcatagatttgaatgcttgcttactatagtgtcgctatttcaaaggattaggaggtatggccttgatggaggaaatgtgttactggcggtggctttgaggtttcaaaagcccacaaaaagcccagagtctttctgccagtgaatcaggatatagtttccagctccttctccagcgccatttcttccatcattccatcatgcttcctgccatgatgatagtggactaaacccctgaaactgtaagccagtaccaattaaatgcattctcttataagagctgctttggtcctggtgtctctccatagaattagaacattgataaagacaagatggaggtgtcataatgcaggctggggtccctgcaggtatcagaccaggaattgaaccacataaagagagaagactgaatacccagagtagactgatttggcaacctggatcggacttcagggagtctaatgccaggtggttcattgttggcatatttaaaacacagtacaatttggggaaaggtttccaggcaacaatcagtccaattacagattcacaataaagctttaggtatgtgtactggctagttttgtgtcaacttgacacagctggagttatcacagagaaaggagcttcagttgttgaaatgcctgcatccaactgtaaggcattttctcaattagtgatcaaggtggggagatccccttgtgggcggtgccatctctgggctggtagtcttggttctataagagagcagactgagcaagccaggggaagcaagccagtaaagaacatcccttcatggcctctgcatcagctcctgcttcctgacctgcttgagttccagtcctgatttccttggtgatgaacagcagtatggaagtgtaagccgaataaaccctttcctccccaacttcttcttggtcctgatgtttgtgcaggaatagaaaccctgactaagacagtatgattacttagaaactctattataaagtacatgcgcccatgagggtgggttctatagctaaaaggcctagactctagtgtggtctctgactgatagcataaggtcagcaggccatgaagtccatgtgacatctcccctgaggatgatctagggagggggaagagtctaggatatcattctggggaactgggagaggtctgcctctatagcaaaaggtgggtgagctgctttcacaggtagccaaaatgtcaccaggttattaataaaacccactctcgggctggagagattgctcagttgttaagagcaccgactgctcttccgaaggtcctgagttcaaatcccagcaaccacatggtggctcacaaccatccgtaatgagatctgacgccctcttctggtgtgtctgaagacagctacagtgtacttagatataataataaataaatcttaaaaaaaaaaactactctcagctttctagatggaatgcagggatttgactttatctcctccattgaggagacactcctacatgactcttggtcctcttagttcttctctgtgggcacaaggacctctgtggtcccaacatcataaggcccaggttagcctcaaattcccagtgtagctgagggtgctcttgaacctctgatcttcctgcttccactgccccagggctagagctacaggcatgggctgccacacttggtgtatgtggtgctgggaattgaaactagggctttttacacagcaggcaagcactttggcaagttatttatatctcctggcctggggtctagagttatgtatttattcttgctctgatggtcttgattcaaaagatgcctttgagagctttaaagttttccatattcggaggttggatatagtagcacatgccttgaccccagcactcaagaggcagtgagttcaaggccagcttggtctacacaggaagtccaggccattgaaaccttgtctttaaaaacagtaatagattctatgaaaccacagttactctgcatattctcccttggagagggaatgtttcaagaacttgtcacaatttcctttcatagaggacttcataagagattttttttctacttatatcatatttaatggcccaaatagactttaaaaactgattgaatgcatattactcttagtttcagaagatatcatgtatacttaagaggcatttaactattataaattattttgatgacttaaaaaatgttaatactgctgagcgtggtggtgcatgcctttaatcctggcactcgggaggcagaggcaggcagatttctgagttcgaggccagcctggaactcaagtttcaggacagccagggctatacagagaaacactgtctcgaaaaacaaaaaacaaacaaacaaacaaaaatgttaatactgagttgtatattttaaaataaattttattagtttaataaaaaagaattaaaaaatagtaatagacatagtagtaatggtgattgtaacgattgtgcattggggctgtagaagtggaatccattgcagagttaagagcatgtacttatttgtcactggaagcaagtgctggatgacaaccacacctccttgctgttattattgttactttatttttttaaagatttacttatttattttttatatatgagtatatctcttcagacacaccacaagagggcatcggatcccatcattacagatggttgtgagccatcatgtggttgctgggaattgaactcaggacctctggaagagcagtcagtgctcttaaccactggagccatctctccagctccctcgttactttattactaatggtgccaagggtggcacccagggctttgacgagtctaggcaagcgctctaccactgaactaatcccaagtttggtttatatatttttaaattttgatctgttaagaatttaacgggtgtgacagcgcaggtggctaagtggttaacagcacttgctactcctgcagaggaacctgcagagtcggttcccagcatccatatcaggtggctcacccttggctggaatgcaatggaacaactgaggcttaggccaagaagtcaagagctacctccccccagctttggaaaggacagttagccaagcttgcagccaagaggtcaagaactactcctccttgacacgaagcaagaaagaggtcacccagacccccagagatagaacccaccgttcaaccccatagattacccacccctccctaagttgctctttttggctttaaaactgaatctgcgaattcactcgggtccttttatcccggtggaattgggtccctgcatgcaggaataaacgctctttgcttttgcgtactatttgagtcttcagcggttcacagaccctaacctttggtgcattgcctgggaatcgctggagacccccccactccaatagttgaacattttggaggagcctctctccccaccaatcggaggccagaaagggcaaagcagatacatattttgccgctcagcggctgggaaataaggggaatgcctacccccccaaatcccacctggagagtgccccccaccccaccccccacccctcccgaatgccttcacatgcaatctggagaacctgggagttctcacccggtttctggagaatgtgaatatgtctacctggtttttgaaccacaccgtaggtctccactgcactcgtgcacgaaggagggagagactgtctgtagggcggttcctgttttgctttcatttctgtcccgtcgctgtgtgctctgtaactgttgttattctgtaccggtttttaggatatcatctcgattttaaaaatgggacaagaacagagcacccttctgagtctggttccgggccgtatttgggacttccgccaggttatggaggcctcagggctgatgcagatataaaacccactttatacctggctggcccaaggagggaacttatcttcccatcatttactgggtaaaaactgtggtctatggggcctcgggtcccctgggccaggtgccttatgtcatcttatggtggaaagaccccccctctttggatgaaaccctttttgctaacagctacaccaccccctgctctccttcctcccaaggataggaggcccaggcggccagtcttacttcctccttcagacccagaggaggttctccccccccccatattgcttcctcagctcctgcccaccaggtgcaggctgacaaggaagctcctgactcatcctggagcctgccacatacttggggctccagcagcccagagagctcactcaggttctcatcaggctgcctcaaccatcaccctacccctcagggctacaggaccccctagatccactgggcagaccttttatgacctatttgcctttagccaataatgacaacaggcaccaagccctatccatggacaagtgggagaaagtggacttgggagtggggcaggtagctcacccttttatggtcatcccaggatgctcataccctctgcaaaggagagatctactcactaaaatgggaacccaatccattttggctgagagaaaatggaaatgctgggtaagaagaggtataacctgttatcttgcaaccctgcaacctgtcccgtcctcaggtgtacaacatgacggctctgtagtttgggggcgtgttcagaacattaggccggacctgactggcataccctggccagatgttgaatgcatctatatcatgggtgggaacagttttgttcaacatgaaaccaagtgtccaggggtagcaataatggacttgacatgggactctgttgtttgggcagttgctttgccaccaggaacatcagccccaaaaagctgacctgatatccttgacccaggttccaaagctggcagaaggggccatagtcaacatctacacggacagcagctatgcttttgctactgcacatgtgcatgggtgcatagaccaagaaaggggattattgactgcagacgggacaacaattaaaaataagaaagagatgttggctctacagtcagcactatggctcaagatggctataatccattgcccagggcatcagaagggaccactggagatagccaggggaaacagtggctgagaaggctgccaaggaagctggcatgactcccactgctcacatccaggtggccctgccaccccctgcactcccgacggatcaggctaaatgcaaaggaatctacagaaaaaatggacgactgcataccaatgaaggtcggaccatcctacccaaggagtttgccagacagtgcatccaccaaatccaccaagcctcactttgagtcaccaaacactaaaaaacattgctaagagggccaaaatacaaaatacttgctataggacactgaccaggcaatctcaaattgccccacctgccaggctatccatcttgtaactccagccaagaaactccaggaactagaatcagaggccaaaagcctggagccaattgggaaatagataacacagaattaaaaccaggaaaatatgggtataaatatctattagtatttatagataccttttcaggatgggtagaagcctacccaacaaaggagactgccaatgtaatgacaaagacgattttgaaagaaattataccaaggtatggcttacctgtcctccttgggtcagacaatggcctagcatgtctcatggggtattcctagtggcccagagaggccgttgtgtgatgctgtgaaggggaaagcctggatggccatggagaccccaagatgttggaggcatcagagtcgtgggatttctgcagagaaaggcagctagcagggaatggaaacagcccaagagaaaatgtgttgcagtcaacaaagctgaaaggagttggagatctgaagagcactttgacatcagacatggagatccagagatgggagtttgcccggctggtttttggtctcccttggcccagcgtttcctccctgtgttccttctcctctctcctgggatggtaatggatgtcttctgccattgttggacgtatgtcatccgttttttgttttttttttttcattttgattttacaggaggtcagtgcttaagagatggcaatgcttatcagagactttggacttttaaacattgatgagactgcaatagactacagggacttttggaggaagactaagttcattttgcgttagggtatggctataagcctagaagggccagggagtgaaagatagtggtttgaatgagaatgagctcccataggccccatagggagtggcagtattcggaggtgtggccgagtggcaggaagtgtgtcactgggggtgggctttgagattcagaagctcaagccaggcccagtgtcactctctcttcttgtcgccttgccttcggatcctgatgcagaactctcagctaactctctaacatcatgtctgtctgtgttctgctatgcttctggccatgacaataatgtactaaactcctgagctataacccagctccgatgaaatgcttttctttataaggcttcctgccatggttgtggtttcctctttacagcaataaaatcctaaccggagacagtctgtgaaaacatttccaaaaggattaaatgggtgacttaacttgttagggttcagaaagttttgagtcacaatattccttcgaggaaggaggaggacacactcagaatgtaaacaaactaaggagccctcctaagcagccactgggacacgatgcttttctcaccagccacagagctgcttgcaggagcctctcagagctgttggagagaaggaagcctgcatgcaggttctgcagtgagcttggggtgcagctttcctgagttatcagccatgttgtgcatcagcgtttggtgatgcagctgcctatggattgccacatctcccgcaagaaacctcttacccagattcccaatcagttcattgcgtcaccaggtcggttttgatatcatcattacgttgggctgttgccattccctgtttagagtggacgagtgttggttcactctaaagtgtctgaagaaggaacagaaagaaagacccagggctggtgagatggctcagtgggtaagagcacccgactgctcttctgaaggttcagagttcaaatcccagcaaccacatggtggctcacaaccatcagtaatgagatctgactccctcttctggaatatctgaagacaactacagtgtacttacatataatcaataaataaatctttaaaaaaaaaaaaaaaaagaaagacccagcctgatggcctagtcggccatcactggaaagagaggcccattggacacgcaaactttatatgccccagtacaggggaacgccagggccaaaagggggagtgggtgggtaggggagtgggggtgggtgggtatgggggacttttggtatagcattggaaatgtaaatgagctaaatacctaataaaaaatggaaaaaaaaaaaaaaaaaaaaagaaagacccagcctgagtgtagggggtactgtcccttgggctggaattctgctctcccaacttcctgttttgctttgatgtgaggaacccccttggggccttctttgcattgagtggctgaacttcttaaaccatccgtaatggggtcggacgccctcttctagtgtgtctgaagacagctgcagcgacagtgcagtgagtcctgacttcagatttttttgcacgaattccagctctcctctccccatctccccatcccttcatttgggatcttctgggtcctttttgtcacttgattccttccttctctgctttgtgagttatcctaagaaatgttttccaccttctttaaggcagaacctctgcctagtggtggtggtggtggtggtggcggcggtggtggtggcggtggcggtggcacatgggaggcagaggcaagaagttgttctctgtgagtttgaggtcagcccggtctatagagccattctcaggcaagccaggctaaatcttttctcagaaaacagtaacaatgagagagagagagagagagagagagagagagagagagagagattattgccttggagcttaccattagactgtctagccagtgagcccctgcccctaatatcctctattgtcttcctgtttagcttcatacccaacttaaaaaaaaaattaatcagggctggagagatggctcagtggttaagagcactgtcagctcttctagaggtcctgagttcaattcccagcaaccacatggtggctcacaaccatctgtaaagggatccaatgccctcttctggtgtgtgtctgaagacagttacagtgcactcatacatataaaataaatgagtaattcttaaaaaaaaacaaaaaagtattccagaacccagtcgtggtgatgcacgcctttaatctcagcatgagaggcagaggcaggcagatcactatgaattcaaggccagtatgatctacatggtgaattccaggccagccaggcttatatggtgggacctgtctcaaacaaaacaaagtaagactaatgaagattattactattgagagtgcgaatgtccgtgagcaaatgccacggctcgggtattggtgtcagaggacaactcgttagactcggtcctgtccttctaccccgggttctcaaatgaagtctttagggttgcacggtgagcgctcttgcccattgaaccattcccagctttttacgtggttgcaggagactgcactcaggcccctcctgtgcagcgttactgtctacaccttctatctccccagatcttgacatcaaacattctaatgtgttttgctttttcagcgtgtcttttgccagcttcaggtttccatggctcctcaagacatttgtcctcatggtaggacttgccactgttgcgtttatggtgagaaaggtgtcccttacaacagacttcagcaccttcaagccaaagtttccagagcctgcaagggttgacccagtgctgaagcttctaccagaggagcatctgaggaaactctttacctacagtgacatctggtgagactctgggtgctccagcctcactgttgtccccctcaaggtcacttccctgattctccttgagccttagacatcgtagacaactcagaatgggtgctggttactaaagtgagtctcagagaccaggggtggtctgtgggatccagtgtctgtttcccacaacaccaggtaaccttgcaacttcactgggagggcttggttcctgccatctgccctaatgggactagctgccaactgaagtgcctatggctcttaaagacgcaagatagaagggataattctagagagggctgttaggcacggtagtgcactcaggcagctaaggcaggggagttaccatgagtttgaagccagcctgggccacatagacaagatctccgtctcaagaaagaaaaggaaaagaagaacgaaaagaaagagggaatagtctttagtccctcccttcatccccactccctcatcctgtctctggggggggggggagggaactcctgggtggttgcaggatatcaacccagttagggtaaccatgtggttaaaaaattttttttcagtgtgagcaacaagcaagtttagggtttagggctaaggtcccgcccttcctgcagtcaatcatgtttataagcttttctcccttgttctaggctcttccccaaaaatcagtgtgactgtaactctggcaaactgcgaatgaaatataagtttcaggatgcctataaccagaaggaccttccagctgtgaacgccagaagacaggcagaatttgagcactttcagaggaggtgatgcaggctgtgggggctcctgggtttctgggaacagcaaacaatcaagtgcttgagagagtgaggagccctgagaaaaggtctggaccttgcattcctgaggggctcctggggagaactattaggaacaagcagaggaagacaatggagaagagtattctccaagaaagatttgcagggctttgtgtataggaaagatttcaatgaggggctgaagagatggctcagaggttaagagcactgactgtccttctagaggtcctgagttcaaatcccagcaaccacatggtggctctcaaccatctgtaatggatctggtgccctcttctggcatgcaggcagaacactgtatatgcatactgaataaataaatctttaaaaacaaaaccaaaacatttcagtaaaactgacagagaaaaaggaacagagtttggcacttctcagtgatggtgtgtggtgcagccaccgggtgcccaggccagcacagaaggtgattctataagctcgggacattctgtcaagtgccaccatgtgcaggggtacagaatgtcactttgtcttttgacagtgctggagactgaacgcagggtgtcctataaggcaggcaagcaccccaacactgagcccctactcctttatgcccctgcctcagttcttttcctgtggtgctgggaatcaaacccggatcctcgcatgtgctaagcaaatgctttaccgctgagttacagccccagtcctcccgcctttcaattacaaaggattgatatcaaaatcgttggttgaagagggaattaaaacaggttctggctggcttttattaaaggggatttatgtatgctgggcacctgtctgcaatcccagcacatgggaagctgaagcaggaggattgtaagtttaaggccagtgtagatttcatggcaagaccttgtctcaaaccaacaagatagagttgcttgtgacagcccctttaaaagtaactaaaaggagggctggtgagatggctcagtgggaaagagcacccgactgctcttccgaaggtccggagttcaaatcccagcaaccacatggtggctcacaaccatctgaaacaagatcaagatctgactccttcttctggagtgtctgaagacagctacagtgtacttacatataataaataaaaaaatctttttaaaaaaaaaaaagtaactaagaggagagaggtgtttttttttttttttttttttttttttttttttgagacaaggtttctctgtgtagccctggctgtcctggaactcactctgtagaccaggctggcctcgaactcagaaatctgcctgcctctgcctcccgagtgctgggattaaaggctgcgccaccacgcccggctgaacagagagattttagagcagaggttgccaagcttctgaatgctgcgacccttgaacacagctcctcacgctgtggtgacggcagccacagcattattttcattgctgcttcataactgtaattttgctactgttgtgaatcataatgtaaatatctgtattttccgatggtcttaggtgagccctgtgaaagggttgttcaacccacaggttgagaactgatatttcagagacatgcttctgacgcagacctagctagctctaactgaatgtgaaccatgtttccttctagaattgtctatatatgatcattgtttcagatatagacagctatcatctcagtaagcaggcatatataaagggcttgtcagggttgaagataatctttcgttaagatttgcttcttagttgggcggtggcgaacacatgcctttaatcccaggacacgggaggcagaggcaagagtatctctgtgagttggaggccagcctggtgtagggctacacagagaaatcttgtcttgaaaaaccaaacaacaaaaacaggttcacttttttattattttaaatcatatgtatgtgtgtacatgggtaataatttcacttgctgttgttgttgattgtgaaggtgctttttaaaatgcattctctcatgcttgctttctcctgaagagaagggctgcctcgcccaccacctctgctggctccacccaatctccccttcggatacccagtccatggtgtggaggtgatgcccctgcatacaattctcatcccaggtaggtacatctggatggttacaggctgcataggtgacgctctctctgttctccttaaacaaaaggaggagtcagtagttggccattcactgtgtgaccatgtgcactggtacaacccaggaatctcagtgggatttcagtctgtgttagactccctgtgtccacaactgaccaagccagctcagtcaacagggtttcgagggaaagagtgtggattaaaaaaaaaaaaaagacaattacattatattatagtatgacccaagccagtctagaggccagtttatttttttccagtctgcttttataccattctaggtacacacaaagaatagggtcatttccagctcaaagacaaagtagtcaaggaataaaccaggcataaacaaaggtcccatgattactgtatgcaggaacttaacgagatgatcaagatacaaagaatacattcctctgctatgttcatcttgagccttgtcctagcccaatgtcaagttcttgcctgagcctacttccttgtcctagcccaatgtcaagttcttgcctgagcctacttccttgtcctagcccaatgtcaagttcttgcctgagcctacttccttgtcctagcccaatgtcaagttcttacctgagcctacttccttgtcctagctcaatgtcaaattcttgcctgagcctacttccttgtcctagcccaatgtaaatattcttgccaacatcctagaagccgcaccaaaagctcctcacacacaacctgggatctctatagccatggctaccctgaggctccgggctaattcagaagttgggattccgtgggcctctgggaatcttagggaataataattggctttcaaaggtcttccagcatcaggagtacgttgatgactccatcttcttcttcttttttttttttttttttttggttttttgagacagggtttctctgtatagccctggctgtcctggaactcactttgtaggccaggctggaaatccgcctgcctctgcctcccgagtgctgggattaaaggcgtgcaccaccacgcccggctgactccatcttcaaagagggcattttgaaaagaatacttatgtcagctcatctcccttccaggtaggaagtgtcgcttggaaggtaaaggtgtctgcgccatggctgacacctgaggtctatattcaggagctacatggctgaagagtcagcttcctcaggctttcctctaacctccctatgtgaactgtggcatgcatgtaccctcccctcacccccaccacacacacatccatatgcacaaaataaaacatgcttaatgcaaatcaaaataacaactaagtccctttccaagttcagtgtggtagcactcatctgtcatcacacagcagtcaggagactgaggcaggaggatcaggaatttgaggttggcttcacccacacagtgagatatcccaataccaaactctccaaattcaataaaacaataaagacaaaacgaagacaaaaatagctcttcgcagggtctttacccatccctttggttcagcgtcaccttctttctgaaagtcaagtgccggagaccagaggtaatacacgtattttctcccacagaggtggtagatggactctgggccttctttctggtggattcttgccctactatgggctcttggcatctggaggcaaacagccccccaccctccccccaatgagtcatggaaaagacctgagtgtagctgaataacagcggcactcaggacccaagtctctatgagcaagacccaaactatccaaacccacattgcaaataggtggagagtgagtggagtggcagagatagatgggaggcatgcaggtaccaaatccgtggggagccttctgggtggaacaggcagaaggagaagctggacctcctaggctcacttctgcctttcttcctggctgaagtcacagttatatcgtgtgggatgactgatgtattttgcctggaggaagaggactgttgagtgaactcaagacttcagacaagggctgtaccaatgtattgtacccttaaccctgataatctttttgagtagccattttaaaatgggcttacattttggttaacttaattattaaaaaaatatctatttattttattattttgtttatttaaaatatttatctattatttatctatttgtgcatgtatgtgtgtctgtgtatgtaagtactttgatacatgtggatgtgtatggaggccagaagaccatgtcaggtgctctctgttatgtctgtcttttcctttggaggcaggttttttggggtctcatgttttacctgcaaggctggaagtcaataagtcccagcaatcctcctgtctctgcacacatcagggctagagtaacaaatatgtgggacatgcatatgatactaaggtgttgggatctgaacttggatccttatgtttgtgtagcttttttttttaagatttatgtatttattttatgtatatgagtacaccaccattgctctcttcagacagcaccagaagagagcatcagatcccattacagatggttgtgagccaccatgtggttgctgggaactgaacccaggacctctggaagagcagtcagtgctcttaactgctgagccatctctccagcccttgtatagggttcttctgagccaattctccaggctgtttgtgttgcagagggtgagtttttggctgcattgctttatgctcccaggatgtgcacacccacccaggagctatctcagattctcaaaaggaacacacacacacacacacacacacatacacacaggacaacacacacacacatacacacacaggacaacacacatacacacaacacacacatacacacaccagataattttaaaatgccttgactacctcaaaggctcggtactgctagaccttcccctgctgctccaggcccaatcgaggaagtggccagtgaccacttacccaaaaaactcacagctctccctccatccatgatgggcagggcctcatgagctcttcctccatctatggtggacctaatcttgttcagataatcacagctgttgtgagttcatgatagaaaaggccacatcatgtccaggagacagcgttctacagcactcctccgggctctgactctaaggttctttttgctcactcttctgtgaagtttcctgatccttagaggggatcggatagagatatctcctttagagctgagcagacacaacggtcactttattcagatacaggtaactccacatgtctctatgtaaggcaatgaccttgaactcctgaccctccctccctctactctctgaatattgggaatacaagcatgtaccaccatgtttagggttatgtggtgctggggatcaaatgcaaggcattgtgggtgctaggtaagcactctacccccaactcccactccccacccccatactctacacacacactgaaactttatacccacttatctataactcccttgtcttggtttattttcctgttgctataataaaatactctgacaaaagcaatttaagggagaaaggtttatttacctcgtagttccagcttactgactgtcatggtagaagtcaaggcatcaggaacatgaagcagctagccatactatgtatgagatcagtcagtagaaggggacaatggatgcatgcatattagcattcagctcattttatccattcacacaggccagaatcccttgcctagggaatgatgccacccacagtggatgggtcttcccattcctccagagacatgcccagatgttcttctcccaggtgactctaaattctgtcaggttcataattaacactatcacatactctctcccactgcctgggaatttgtactctatttctgagagtctgactcttctcaggttcatttaaagatcattcattattcattatgcctccattgttgctttgccttcagtaacaggaccatctgcaaggggctgtgtgagtttgcagaacccaaagctgaggatgggcactagaagtcttagacccatgagggtttgagaccatgggacgatctcacagcccagggaatggggacaatgtaggccaaccatctgataggaaatgacacttggtggggctctgttgtgtccggccagcagctcacatgtctgggttctagtctggaaaggcatcttggaaacctggaagagaagaggggggggactaggcggcatgagagagagagacacggagctaagacaaaccaggttctgatcaaagctcaattttaatgtcagcaaacacgctttataaagaaaaggggagggctgtcgagatggctcagcgggtaagagcactgactgctctttcaaaggtcctgagttcaattcccagcacccacatggtggctcaaaaccacccatgagatctgacaccctcttctggtatgtctgaagccagctacagtgtacttatgtataataataaacccatccctagccatgcaaagttcctttgaagtagataggtcagccttctagtgggaagtcgtgaagataatagttcggtgctaactccagaaaatcttggaagagaaccagttcagcctcaggcaggttgggcctcaggcaggtagtggcacatcaaaggagcagcacagcaggtggctccgcagcagcaggtggtcacagccagccttgctaggctggaaggaggtaacagggctctccagatatgtaggagtcagaggcagggaggtgtatgagcgagctttggtatccactcagacactttttcctccctctcctgtctcttctaggcctccagtatgaagggccagatgctccagtctatgaggtaagagtccccatctcagcatttttagcactgacttccccttccacaactatgtttgatctcagcctttaacaagcccctgtcattaatccaattcaaaccctacatgaatacaaagtgggtcatggggggcattgcacagttttctagcctttggagtgactgtagggagaacttccaaagtgacctccatggctgtgtgtgctctaggagcaagcagctgccacaagtgagctctgacaacaaaaggatgagatgtcccattgtcctccccccactacacagctctgtgttgaggtctcaggatgggatgtctgagggtgaggtgcaatctcattcagaacctgcaaaagggccctggaaatggagacttggggtggggggctgtgctgatgtacctgcccggggatgagtctggaggtccagaggacagacatcagtgtgtcgtcctctatggctctctgtttccttgagacactggggagctcactgggttttggctaggctgacagccagcaacccccaatgagcttcctgtcttgttatccatctttggtggctggggttgcctgacttttttatgtgggagcagggcattcaaattcaggttcggctacttaagcaacatgcgtccttacccactgtgccatctcctcagctcagaaatgagctctacatccttcgccctccccccacaggctgaatagagggtggagtggggatgcatgagctgttctgtgtcctcagagggctcctcggtcacaaaccctcttatcctatccctgtcatttttctcataactatgatttatttcttcataagggcaccagagatggaatccagtcgctcacacacgctgggcaaacactctagccctgagccaagcctctatctagcctctttcattatgtgcttactcaagccttgttaccgtgtgggtgtggctgcctaaagatttgcttctcagagatttgtctgttgattggcctgagtcttcagcaagattgacctaatccggttgacttcccacaaagatgcctagctattgcagacaaccaaagggaagggtaacctttagagcagtgggaatggagagaagcctgcttccactgcatcttcaggtagaatgaatgggcaggagagaggagcaataatggccactctttgtgcatccaagagctggaatggaagcaagtgccttttacatgtcacaaggagaggacttgggtgagagggggtgatggacttacaacagcagtttctattagtgacaaactgatattatttattcatactgttttatttatttatttatttttaaagatttatttattgtatatgagcacacggtagctgtcttcagacacaccagaagagggcatcggatcccattacagatggttgtgagccaccatgtggttgctgggaattgaactcaggacctttggaaggacagtcaatgcttttaatcactgagccatctctccagccccttgttttgttttttaatttaattttttttttttttttggagtgctgaggattgaacttaggccatcaggcacagaggccagaagagctatctgatctctcagaggtgaagttacaggctgtagaggaattttaatccagcaacctggctgctctggcaagggatcccatccaaagatatgatctggcccaaatgcagacatgtccttgattacagtatgatcttactgtacaccgtcaaccccctaacactgaagggaaggttagtttgtagaagaaagcagccatgtttgaaagtgatgtctaactgagggtcaaagtaatgaatcagatttggcaggcaggatgaatcagagataggatatatccaactcacaggaaaacagcacagggaagagaggctacgagagagagaaacagagacagagaagaagagagagagagaggaagagagaggtggtgtggtgaggtgtgtgtgtatggcagtgttatggggacagttttgtagaggtgagctgcccagagaacaagctagacagggtgaaaacagaacgagccaagagctgagaatgggaaagagccagaagattagaacacattgaggccaggcaaagcaatttaggcagaagccaggtaatactgtttgaatcagtcatcttggaagattagattgtaggaaggctaaatgcttacaggccgaggcctagggatagttagagcagagaaggacgtgctctggactcagcccaagtgtgtatttgcacagcttggatacagctcccatcttatcacttcacttgaagaattagagcgacatgtacaacaggcttttgcagaatgccgagctttgctggggatagcacacaatgacagggactgcctgcagtaggccgggatggagacatctcagtagccggtggcagctccttgtaaaatccagttgtccccaccctgaatctccatcatccatgcttactattggaaaaagcgccaagttttccccttgttcgctaggcttctgcactgcttgcagaatgcgggactgagggagtcctcttttcttaggctgaggaggaggttgtagaagaggggacaagttaggatatttagctgcttcctcctctaatccagattcatctccaggatcttaaggctctccctcttcatcatcatcagaggtggaagaagtctctactaagtcgacaatataccgggaagaaggtgtttttgatttcttaccagtttgcttctcaccagtttgtttggacaatagaggaacaccttcttccataacatttctgtactacatacagaacctgctgatgcactgggcaggtctgttatttcggcatgggatagtgcctgttttatcacaaaccagaacataactttattctctggaacctgtccttcatcccccctcatccttgtagtccaggatccaggtcttcatatccttccccttctccatgctgcctcatccaaggtccctttatcaggaaaccaagggctcacagaacaaaccaagcaaagaaaatcagagagctgctgcttttcaaaatgaattcccttcttaagcaataaccttaaaagaatctttttatacatagatctctcactgggttcagcttgacccataataaaactataaatctctctcttctctctctctctctctctctctctctctctctctctctctcacacacacacacacacacacacacacatacatttgctcgcagcttgaggctgcacacactctgcattctcttgtgctctctgctttttctcttgtgtgcttttcttctctgtgaactctcacactcacacacacctctgtgcattctcctttcactctcacacacacacttcacacacacatctctctctctctctttcactctcacacacacacttcacacacacatctctctctctctctctctctcacacacacacaccacatgcactcttctttcactcacacacactctcttggtacatgcctcacattctctcctcactcactctccacatgctcttctcatgctctctgcattcactctctcactcgctcttctcacgttcgctcacctttttcttgctcagtcttttagtgataactccaaaagcagatttaaaaaagacgttgtataatcattgccaaatcaaattcaaaagaataaccatgtcccgcaaataatcaagagttacaattgttccccaaagtttcaagctttccctattcccaggcctgtagccaaaataataataattgctaacttatcattatttaaactttaacttttgacttattatacttcagagctcagatctctgaggtcagctacttgcattttcctgtgaagctctaatgataaatgacatgggcaaagctgccaggcagtggccagaaagaatcaagttaacgcttaactcaatagttctgctagctttctgcttctgcacattgcacacaatgactctcctaagagtcccagtgttttgacttagttttactaatataagattttacatatcctgtacttgcttatccaggaaccactctcaaattttatgtaaaacttatttcataacttcaatagttgtttttttttttctttcttggggtcccaatgttgactctatttcatcttctaataatttcttcaaactttcttttttttaagatttatttatttattttatgtatgtgagtacactgtagctgtacagatggttgtgagccttcacgtggttgttgggaattgaattttaggacctctgctcactccggtcaaccctgcctgctcagtccctgcttgctctggcccaatgatttatttattattatgtataagtacactgtagctgacttcagacacaccagaagagggagtcagatctcattactggtggttgtgagccaccatgtggttgctgggaattgaactcaggacctttggaagagcagtcagtgctcttagctgctgagccattttgcgagccccttcttcaaactctctttgcaagtcaagcattaatctgaaactaccattgtgcagttattacattgtttctaagatgagaacccacagcatgcacctgggccattaggactgcgctgtgctgtgccctatgccttagtttttaattgtttaagaatcattacatcagggaacatctagtttcgcagaattcaccatagcagaaggagaaagaagtaagaaaatcagatataatagaataattatgcacatcaaggccaactgaaaagcagtcatccacaaataaaatctatacagccgttgtctagggctaaggttaggagaattgggagcaactgctttttacgaagagctgccacgggttgctgagatgtctccatcccggctgactacaggctgtccctgtcattgtgtgctgtgtgactgtacagctgagccatctctccagtggttcagttttttaaaaactaactttgagttgcgagccttcctagcaggtttttggttagggtttattgctgtgctaacaccatgaccaaaagcatcttcgaaaacagagggcttatttcagcctaaggtttcacatcatagctcactcatcaaagccaacgcaggaactgaaagcaggaacccaagtggaagccatggaagtacgctgcttactgccttgctttttctcttcaaactgtacacttttgtatttctttttgcccgattgttctttttcattataaaccagctgaagagtgcttaataataaccatatgacagagtcggtattaagctgtcttgaaatctcctctgctgaagaaattagttcattacttttaactttgcttcaggcaggttcttagaacgagggcagaaagcagactttgccaaatcgtcccaaggaccggctctagcccagttgctaatattgttcccctctgaaacctcttgagccagacctccacaatccacatagctctcagcactgtcgtcttccagcctcctactaggatggccaattaagctctgcatacagcatttaaccactttcctagttcaatgtcccccctaattttccacattccttcaaaaatatggtcaggtatgtcatatcccatgaacatgataccaatctcggtcttagttacttttctatggctgtgataaaacactatgaccagggcaactgagaaaagtgtttatttgtgcttaagttccagagggttagagtccctggtggcagagcaaaggcatggtggcaggaacagctgagtgctgcatcttttttgtttgtttgttttttgtttttatttgtttgtttttcaggacagggttttttgtatagccctggctgtcctggaactcactttgtagaccaagctggactctaactcagaaatctgcctgcctctgcctcccgagtgctggtattaaaggcgagcgccaccacacccggcatgagtgctgcatcttaaaagcaagaggcagagagcacactggggagggtgaggagctgtttttttttgtttgtttgtttttgtttttcgagacagggtttctctttatagccctgactgtcctggaactcactctgtagactaggctggcctcgaactcagaaatctgcctgcctctgacttccgagggtgtggagcttttgaagcctcaaagcctggcacagtgacacacttcctgcagctaggctacacctcctaatccttcccaaacagttccaccgactgcagaccaagaattcaaatatatgagccctgggaggctgttcccatccaaactgccacacagggtcaaggtgaaggccgtgggatgagtcagagacaaacttttttttaaaagactttatttattattatagtaagtacactgtagctatcttcagacacaccagaagagggagtcagatcttgttacggatggttgtgagccaccatgtggttgctgggatttgaaccctggaccttcggaagaacagtcgggtgctcttacccactgagccatctcaccagcccccagagagacaaactttttgtttgtctcttttgatacaagatctctcactactgcaccctgaccagcctagaatttgctctgtagcttcaaactcagacagcagagagctggaaccaaagacatgtgccaccaaactgagctacaataaacattttaaaaccacttaaacagtgatggtacctagttgatgatggataaaatcctcagccaaggagttgtactccaataagagaaaaaaacccagatccaaagcctggaaaactccctcagatgtcagagggtagaggaccaggagtgagtgacagacagatgtcagtagcaactgcagcagggagcaaggcaaagtgccatgttgtggcataactgttgtgccagctatttggggggtggcagtgtgtgtggcaggagacagaaggatcttttcagctctggagttcaaggctgctctgggcaacatagtgagacctcagagaccttgttgaaagaggaggaggaggaagaagaggaagagaaagagaagaaggaggaggagaaataataatctctctctctctctctctctctctctctctctctctctctctctctctctctctctctcttccctctccctctctctctatgacaagagtttctctgtgtagccctgactgttttggaactcactcttagaccaggctggcctagaactcacagagatctgactgcctctgcctcccgactactgggataaaaggtatgcgccaccactgctcggctctagaagaagtctcaatgaacaatgttccctaaagagaaagagatgtttgcaggaatgaatcctttaaatccatgagtctttaggtcttgaggggaaacgtgggggaagggcgtagctgtatctattacctttacaaccagccttatcctgtcctagctcgctctgccccctgctggccatcctgagtacttgcctttcctgtgaatggatttttctccatccgtggcatttagaatctttcagggtttagaggatgggagactaaggagttacagtcaggtgggaataacgttttattgggtaggataaagggcttctagagatggatagggatggctgacagctgtacaacaatatgtgtgtgcttctaatgtcatgtctaggtcatcctgaaagcttctctggggacactgaacacccttgctgatgtgccagatgatgaggttcagggcagaggccagaggcagctgaccatttccaccagacatcggaaggtcctgaatttcatccttcagcatgtgacgtacaccagcacagagtactatctccacaaggtggacacaggtctgtcttctgatcacaaactgctggaaaagagcatcactccctctcaaaaccttcccccaggacgcttcctgtgtgcgccctctcaaaaccttcccccaggacgcttcctgtgtgcgccctctcaaaaccttcccccaggatgcttcctgtgtgcgccctctcaaaaccttcccccagcatgcttcctgtgtgccagtttctgagcctcgacaattacctgcctatttactgcacccaatagagtcccccactgccactgaccccagagcgacttgagaaagatccctgacactgctcaccttgcacacatgaacacaaagccagtgtcctgccactgtggccaatacccaagacagcatagaaaaagaaaggctctggctcacagccttggaggctccattccgtggtgactcggcccttgtggcgaggcagcatagtatggtaaagcttcctactttacagctaggaagcggctgatcctactgtcaccttaaaggcattcccaaagggacctgaacacctcccatcatatcctagtttctaagggatccacctcctagtgtcacaacagtggcttatgcctacactataccgacctttagggacactgatccaaaccacagtaccatcccattctgtctgttactgatggagttttgttttgcttgatacaggctcgtagatagcccaggctagcttcagactctgaacttgtgtgtctccagtttctaccccctatgcactgggataacagtcaaatgaacctctaagtacagtttatgtggtgctgggaatcaaatccaggcccttctgtgtggtagacaaccacgctgccaagccagttacatacctagtcttattgtttcttgagatgctctcgcgtaagccaggattttccaaactctcttacatgtttgtggctggcttgccttgagctccagattccccctttcttctctcaagctttggggttacaggtgtgtacaccccgcactctgttatttttttgtttgtttataagttcatccatttgttgaggcaggatcttgtatgtgtctcaggctggcctcaaattctcaattcctatgcctcaggctccataatgtcgaaatcacagccatacatcactatgtttggctggccttatccagtcctgttagctgttctctgcagctatttatttcacttattttattagtggggggggggcatgaacatttcacagtagtcatatggaagtcagaagtcaccttggaggggtttgttctctcctaccacatgaatcccagggatcaaactcaggccattgggtttagcagcaagcccctttacctgctgagccactttgacgacccctctggaacttttaaagctgcttcagcttctgttgaggtggcgactcttgcctaaccagtgtgtgcatcaatatctcgtgagcattcctgcagagagagaatgtggccagtttcaaggatatgaacttgtctttccaacccccccacacccattacagaaactcctgggaggacaaatcttaccaccctcactttttgtcttttcctttgtgagttgctccacggcacagcaacggggggggggggggaagaaatgtaatatgcacaaatgaaagttcagcttggctggtagagtacttgcctagcaatgcacagagccatgggttcgagacccagcatcatatgaaattgggcatgggagtgctatgcctaagaccctagcacttgggaggtggaatcagaggctagcggtcctaggttatccttcatagctatagtaagcatcctctccaccttcagattttaaggcatttcccttcagaaaatgagcctgtgttctaaggtacagtgggcactactgtcctggtcttgtcattggagtcatgacggagggtcagggcggagtaatccagattctcgaacctccagcctgttctagcagcccatccttaagcaggttgcctcagggatgcacagaagtcaggagtcaggatgccacagtgtccatgggccctcagcctcttcgcaggcagggctctccccgcagctgctggcctccttgggttcctcagggcatcatagtctgatggcatctgacactgcctggactctgacctctcttctccttccagtaagtatggaatacgagtcgtcagtggccaagtttccagtgactatcaaacaacagactgtacccaagttgtatgaccctggacctggtaagactcttatccccaaggctcaggcattgtatcaggcctggtgaaattcagagggcatggtggtttgaatgaccagggttccccccaaggctggtatatttgaatgcttagactaatagctggtggaatttggtggggggggggaaggagtaggaggccctgttgggatatcggggtggccctgtgggaggaggtgtgtcaccagggggtgggctttgaggtttcagaagttcaggccgaagctttgctttcgttgtgcctccaacttgtgactaagatgtaagctctcagctacttctaaaatgccatgtctacctacttgctgcctttctcccagccacaatggcgggggaccaaccttcagaaactgtcagcaagcccccagtgacgtgatgtatgtgtaagctgccttggttgtggtgtctcatcacagcagtagaaaagtaactaaggcagagggaacactttttctctaagattcatttcgattccttttaattgcgtgtgtgcccatgtgtacacatgcgcccttgtgtacagatgtccacaaaggccagagtttcaatcttcctagggctggagttggaagtggttgtgagccacctgactcaggcgctgggaactaaactctggtccttggcaagaccagtacatgctctgaactgccaagacatctctccagtcctctcagaccctttttgagacaaggtctcattcggcccagggtgagttcaaactatgcatatagttgagaatattattaagctcctgaactttctgcctcatttcccccagggctggaattttatggaagcaccaagctcagctgctagggatcaaacctagggctttgggtgtattaggtaggcgctctaccaacagttagattcccatccctcctgtattccaggatagacaggcaagcctctggactcagccttgttagtggtgagattacagcatttagtggtgtgtgtgtgtgtacactcatgtgtgtttgtgtgtgtgtgctggtgtgtatgagtgggcaggcaggcgggcacaccagcaagcactcctgctacagtggggatatgaagtcagaggacaatctcaggggttagccctagccttccttctaccttaggcgaggcaaggtctccttgttggtttgctactgtatataccaaggtacctggccctagaccttctagagactctcctgtctccaccttccatctcactggggttacagttatggtattgagacgagctttacatgggagctggggatttgaacttatactctcatgtttgtgcagctggaactttatccaccaaggtatcttcctagtcccgagtgatttttcttttcttttaaaatatttgtttgtttgtttattgtatgtgaatacactgtagctgtcttcagacacaccagaaaggggtatcagaccccattacagatggttgtgccaccttgtggttgctgggatttgaactcaggacctccagaagagcagtcaatgctcttaaccactgagctatctccccagccctgtgatttttctttttaacattgaatctataaacgttcttttagtgattttgctttttgttttgtgaggttgggtgttgttacacagcctaggctggtcttgacttcaccatcctgcagtttctgcctctctggctcccaagcactgggaatataggtgtgagcctgtatacctagcctagcgcttgatatctctctctcacacacacacacacacacacacacacacacacacacacacacacacactcttcttgcaacatatggatcaggatgcaagtcctcagctactgcttcagtgtcatgcctgcttgtctgctaacatacttccagccatgatggttatgaaccatccctcggaaacaataaataagccctcagttaaatgctttcctttctacgttgccttggtcatagtgtctcttcacagcaatagaacagtaattaagatacttgtcaagttatatttgcctaccaactcctccatggtgttgaataatagtagcaggcagttttgtttgctcctgactttaagaagaaaataatagcatgatgccattcatgttgccatgtggcaggtgtttcagggcaaaaaacctttcttcttccatctcctttctaagaatttttattattaatgaatgttgaatcttttcgaatcttaagatttgacattgcatttgtgtgcatttgcttacacacacacacacacatatatatacacatacatactttttttggtttttttcgagacagggtttctctgtatagctctggctgtcctggaactcactttgtagaccaggctggcctcgaactgaactcagaaatctgcctgcctctgcctcccgagtgctgggattaaaggcgtgtgccaccacgcccagctttatgtatgtgcaccacatactcagtgtccatggaggccaggtggctgggagcctgcaggtggctgctgggaacccaagtcctctgcaagagcagctgctgtttattgctcctggtgtttgtatcgtggtgttttttccgtggaagagctgacccttttccctttgtaagctttttgcttacatgttttgcatacatatgttgtgtgtgtacacgtctgcttgtatatcgatgatacactgtcgggagcaggttgtggggaaataaagggggtgggagagatgacctgcatcctgccatgtggatgtctggctgcgaaaagtcatggaaccccagtttgaaggggtagcgagggagcagtccagggtctctgggcctcatggaggccagagatgagaggttctcagtctcagacatcccagacaccactgtatttcgtggaagagctgagaacaaagtgagggccccaggggcggggttaggggggcagctttgtcagccttgggaccgaagtgggcaaggggagaaggtgctgggtggttcccacacgggcaagagtctggctagctcagactgttagctctgcaggcggcttgggttggctgggtctagcacagtgggtcttgatgagcaaagatggtccatggttttagagctttattgtagaaagtcaaaggggggggaggaagaggaggaggaggagaggccatgtggagagagaggagaaagaagagggaggagagaggtaagagacaagaagagcttaagagagagaggaggggctgagaagcctcttttatagtgggatgggttaccttgctgttgctaggtaactgtgggaaggagcttacctggctatagccagaacaccaggagcttgggacattgtctatgtgactgatagtcacaggcttatgcagttgaggagttgtgacgtcaggcacttgtgtctgggcgcatagcttatggttcagtcccttgtagatttttctactgggtttcccgagtaagcctcactcgaccagaacagactgcctttcatggttcaacaatgcacatgaacacatgcacaaacacatgaagagcaagtggaggaccacgggtactgcctggaaccctcctccatggcacttccacctagttcactgaaatggagtccgagtcaaagccagagctcaataatacagctagtctccctggctagcttaccctggggttcccctgaatccaccttctgaagctagaattacaggcatgctgccacaccctcccaagcacttacgtgggttctggggacgtgaatttgaggaactgcacatttgaatggcaaatgtttgaaccactgagcatctccccagcttctccaattcctgtgggtttcttgtttgtctttacaagtcatgtgctttatggtgaacagcctggtccaggtcctctggtcttcaagtagacttctttctaaccatgccttcctgagatagaggcaggaaacttctcctgtgaagctcttctcagaacggatggcaaaggtaggccatgaggcttttagaccttttcttctctccctgggctctgggcatcaaaacttctagtagttaacgtggaagcaggacacaaggggttgctaacaggcatgctggaaatgaagaatccaggcaacaggaaatggcatagcaaatgcaaccaaggacaaaatgacttcaccaagttgggtaaccttaaaatgtctttacttcccagtgcaactaaaaaaaaaaaaaaaaaaaaaaaaacctctgattaaacaactcctgcaactcctgtgtacagaaggcacgaggccttaggtcagaggataaagaggtcatcagatgatgggagtgtggctcaattggtagaatgctcagcatgagagaggccctaggtttgaatccccggcctggtaggaaacaaaacaaagcaaaacccaactgaacaaaacaaatcgggaagggggctctagcatccacttttacactcttctctagagaggaagatcagaaacctggtgaccattgccacgaagacttttctccgtccccacaagcttaagatcctgcttcagagtattcgaaaatattacccagacatcaccgtgattgtagctgatgacagcaaggagcccctggaaattaatgatgactacgtggagtactacaccatgccctttgggaaggtatgtccccctcagactggggacatttagctcccagaacaagagggacccagattcagttgtttccctgatcatctctgtggcaaggctgggtggagtcgggtggggtaatgggtgggtggggtggggtaatgggtgggtgggggcggggcttctcttgttctgatgcagagggaaactggatcgatcgttatcccacattaatgaagtgctagtttattctaccttcctcctattcgatgtggaaattgacaggggttcttacaggtgacatatgggatctgatagctgattgtgatgcatggggccatagcagccttttgttctctgtgactgtccccaagctaggctccctctccctccctgtcccatccacttcctttcctctctcctcctatcttccgccaaacatagaaaagggaaggatatcactgagcgcaaatgttccccaaaccaacatctcccaggaggtagaaggcaactgtaagatgagaggggactccagtctattcatagaggtcactggactaaggaaggactttccagtctttgtctcagcctctgatccagaaagtcactgtccctgccatgtctctctgaggcagactgtagttagtcgtcagccttgtctgaactacagaatcccacagattccaagttcacccatggtgggaggcagcctggtcactgggaattcaagaagcccccgaggtgacaactgctgatccaaccccatgctgcctgcagggctggtttgctgggaggaacctggccatctcacaggtgactactaaatacgtcctctgggtggacgatgactttctcttcagcgacaagaccaagattgaggtactggtggatgtcctggagaaaaccgaactggatgtggtaaggaacaatggccaagctcagctggctgccacctgtagtggtgaggaatggtggaggaagaggaaggaatgttagtgtcagagggaggaactgaggggattagggactcatggctcggacagagagcatgagctctgcttttgactcaaccattttctttgaaacaaattttatatgccacactagagaaaagtttacaattgttctaccaaaaaattaacagttaaaaaaaaagcatatttatacaacattttaaattatattcttggactatataaggtttaagaaaaccatgttcttgttcggtcacatttaaaaaaattattttttagatttatttccttttatttcatgtgtatagtagttctgcctgcacatatatctgtgctcacagaggccagaagagggagttggaccccctggaactggagttacagatgggtgcgagctgacacatgagtactggatgggaacagaactcgggtcctctgcaagaacaaatgcctttaaccactgagccatctctgcaacccccctccacattcattttaaatatgaaaacatagttggggctggtgaaatgactcagcaggtaagagcagtgactgctcttccgaaggtcctgagttcaaatcccagcaaccatatggtggctcacaaccacctgtaatgagatctgatgccctcttccggtgtgtcagaagacagctacagtgtacttatgcataataataaatctttaagaaaaaaagaaaatatagttggacctggtggtacacacctttaatccagcactggggaggcagaagcaggagggtctctgtgagttcaaggccagcatggtctacagagtaagcccttagctcaaagacaacaacaaaaccaaacccctaaatttatattgtgtgtggtagtacatacctatggaagcaggatgatgggggctcgaggccagcctcagctacgaagcaggtgtgtatgtatgtgtatacacatgtgtatgtgcgtgcctgcatgtggagatagggattcagtgacccagcagtagtgtggaaagggctgtggccacatggcagagccactgagggtcctttggaggctagatccagagtacagttttttttttttttttgtttttcgagacagggtttctctgtatagccctggctgtcctggaactcactttgtagaccaggctggcctcgaactcaagagatccacctgcctctgcctcccgagtgctgggattaaaggcgtgcgccaccacgcccggcttcagagtacagtttttgttctcgtaaaagctgcagtcctgggaggcttcgcagaggaatgaacactgatctgctcagaccctggtttctgtttgctgactaggtgggtggcagcgtgcaggggaatacttaccagttcaggctgctgtatgaacagaccaagaatgggagctgtcttcaccagaggtggggatcattccaggcccttgacggctttcccggatgcacgttgaccagcggcgtggtgaacttcttcttggctcacacggaacaactccgaagagttggttttgatcccatcttgcaacgagtggcccacggaggtgagaggcttggaggggtgcgctggggagtggggaagggggtcctcctgggaaactccttcttgataccccagggatctttctttcagcccagactgtggaactcatggtccctcttgccgccctcatctcccggtgtctccctacgctgcctctgcccacttgagacacgttcctccgtccttccccgcagctcagccctctacctttctcagcttcagtcttctttcagaacgtcttttccaccaaaaactgcacttagggactgccctctcccttcaccccttcctctccagaacccacagtcccatttagtggaacccagcggacttgacgcccactctccaatctgagaaactgaggttatctgtttctttcctttcagctccagggctccctgtccggcgtgggtggggaaccacagctgtctgtctttagcttccttttgtctcccgttcctcttctctttgcagagttctttattgatgggctggggagactgttggtgggctcttgcccgggtgtaattataaaccaccaagtaagaacaccaccaaaggatccaaagctggctgccttggagaagacttatgacaaataccgggccaacaccaattctgtgatccaattcaaggttgcactccagtacttcaagaaccatctctactgctccacttaaaaagtaccaagaccaggaatcgcaataaacagattagcggcgggcaacaaaaaaaatagtaggattggacattggagggtaccaaaagcagactcctaacaaggggaacagggaacaaagaagctggaagctggagctagggtaggaccctgaagtcggctcaggacccccaagaccaaattctcagcacagagatttatctgccctagagagagaaagggcagggaatgagacaaagacaagggctggaaggtggtggggcacacctttaatcacagcactccgggggcagaagcaggtggatctctgcgcattttgaggacagcctggtctacagagagagttccaggacagccagggctacagagaaactcttatcttaaaaaggcaataagttgatctaaaataatgttatttaaagccagatgataaggttggtgtagtgttgtgatcccaaagcccagtaactgaagtaggaggattgagttcaaggccagcctgggctatgtaacagcccatctttaaatgagtgactagggggctggagagagctcagtgcttaagagcgattaggacagaggacctagattggctcccaggacccacatgatgagtcacaacttcatacctgcagtttcagggaattggaagcatctgcttacctccaaaggctcctgcatatgagtggtgcatacatacacgcaggcacacacatatgcacacaaaatacgctttaaaataaatgaaggaatgagtgaatggctaaatattaaccaaataattccgattttattttgtcaagactgcctggcctagcactcactgtgtaagactgacctcacactcatggcaatcctcctgtctccacttcccagtgctgaggtatgaggtgtgaaccacaatttctggcttggatttttaaaaagaatttacacacacacacatacatacacacacactgtagctgtcttcagacacatcagaaagggcatcagatcccattacagatggttgtgagccaccatgtggttgctgggaattgaactcagaacctctggaaaagcagtcagtgctcttaactgataagccatctctctagtctctagcttgatttttaaactttgacttttaaatatacttattcattataattttttttctttttgagacagggtttctctgtgtagccctggctgtcctggaactcactctgtagaccaggctggcctcgaactcagaaatccgcctgcctctgcctcccgagggctgggattaaaggcatgcaccaccatgcccggcttatattttgattttaatgggatattaagatggatgttaagattgtgagctttcaaccctgtctcggaaaaccaaaaaaaaaaaaaaaaagaaagaaaagattgtgagccttcatgtggttgttggggatagaatctccactcactccagtcaaccctgttctcagtccctgctaactccggcccaaagatttatttattattataattattatacgtaagtacactgtagctgacttcagacacactagaagagtgtcagatctcattaccggtagttgagtcaccatgtagttgcggggacttgaactcaggatctttggaagagcagtccatcctcttacccgctgagccatctcgccagcccatttcaacactctgaacatacttacactttattttttacttcctgaggtaaatattgctctgagctagaccatagaaagccaaacaccagtgggtaaggaggcgaggaatgacatgccagctagttgtggtgtgggcctttaatcccagccttgaattcagagatcctctagccagggctaggcagtgagctctgttttgttttgttttgttctgttttcagaacaaaaccaaaatcaggggctgaggaaatggctcaaaaggtgaagtgtttgttacccaagcatgaggacttgagttcagattcccagaagtaaggcatagctgccagtctgtaaccctgggcattctcacagcaaatgttaacatcctccattttgactgggttgtcgttagcatgctcaaacacagtcttttctctacttcaagatctagaaccatctctccagaagagagagagagagacagagagtgagttagtttcctatgatccagtaacacctcttccccaggaacacaggatgttctaaaaggacatccattcaactcaaagggttcagggactccctgaaacccaccagacagactaggccccctcttttccaagtatattagctgtgaagactgctgagaggcactctcagacaagttgagctgcctgaaacagacattctctaacctgttgagctgtctgcaagttgtacagagggcttcaagtttacagcttttgtgacatggtgagctttcatggtgccgctgtctttcgagtcatttgtgatcctgcggtaacccctcacccatacttctgtctgtaaccccaataaaactcatcagtctgctatactggactcgggtggtgtgcttattttgatccgtcattggttcctgattggagtgagtacatgtttgtccccatcttcccaaggttagtgtcacatggcagggtgatattaagagtctctgagcacaaaactggaacatttcttcctttgggtcttcccgtgtcccaaagcaagtggctcagtgaccaagtctgttaaaacattagccacatttaaagactatgaaggcccagggcccactcttgagactgccagccacatcaagtggagtgagagggcaggttaaaaaacaaaaaacagaaacacaacgaacccccttcctgctaattcatactgcagtaagcaaagacagggaagcaatctttttttttttttttttttttggtttttccagacagggtttctctgtatagccctggctgtcctggaactcactttgtagaccaggctggcctcgaactcaaaaatccacctgcctctgcctcccaagtgctggaattaaaggcgtgcaccaccatgcccggctggaagcaatcttttaatgccaccagaggaacacaagtagggttacagtgagtgtgccagttcgattaagttaagaaagaaggtgtggggaatgcctgggacaaacctgagcatggagaagtggggacacaaaggcagtcactgtcacctacacactcgctgtagggatataatcctcttgagaacccataccaggccagttgtggtgacaatgtcttcgatctctggtctacagagccagttgtggggcaggagagctacagagctatatagtgaaccctggaaagtggaccgggagtggggggggggggcggggaggggagggggaaattatgccaatgtgtcctgtgcagtcatgggaccctttcggagggtggggcaggtctctatgtagccctagctctcctggaactcacagagatgagcctgcttgtgcccacagagtgctggaattaaagccatgtgctaccacgcccagctcacatggcctttgtaagaatgaaataagcgggaaaataaatgaggtctacaaatgcctagtgttcaagcacagccttgaggtactgggtttcagacccaggacaagaggctgaggttttggtattttaccaaagcagacctggcctccaggttctcccagcatccctcagtccctacttgaactctgcagcccagaggctgggcttctcctcagaggttcttcactatataatccagacattttgttttggtctgggcatcctgtacccccagccccctctgcatttctcttcccccctccgctctgtctccttgtctgcacggtgacctccctggtctcatttcttgggactggtgaacctgcctaagagctgcctccaataaacctgcctttatactttaacttggcatgagctggctcatttcatcgtcggagataacctatcaggaatctcaatgtcagatggggttaattctcaaaatggaaactctgtagtgttccttctgataatatgcaagagctacaaactacttttcttttcttcttacttttttgtttgtttgtttgtttttggagacagggtttccctgtacgataatagcccagccctggctgatctgaaacttattctgtagactggactcaaactcgcctgcctctgcctccagagtgttcagattaaaggcgtgcacaccgcccgccatgcacacccacactagaaaatctcttatccattcactcagggacaaactgtcagactcttaccaaatgagcgcttggacttggactaactgcattcgtgactgcatgcacagaagaggaatttagcagaatagtggacagctcatagcactagaagggggtagacaaagcaagctcagggaagtggccaagaatccagggactgaggcaaccaggggcccaacaaggccagtttgcttggcatgtcacctgagaggacagtgggcatggcctggctgccttactgcactgaggtcaatggtgtcgaagacaccaccagaactggatccagttttaaaatctctggttcctgggtgtcagttgttggactgagttcaactggccaagctaaagatagtcaggccgacgcacacaaacacacacgcttacacacacacacacgcttacacacacacacacgcttacacacggtctttctttctctctctctctctctctctctcacacacacacacacacacacacacacacacacacagagcctggagaataagtgtatgtaccttggacacagtctagtgtcacccagacttgcaaaaacattggatttctcaagaaagtgagacaagctatttttggatgtcaacttgactacatctgagattaactaaagtccaaaaatggagggcatacccgtgaggggcttttgcacaatttgaagtaggaagagccacttcaagttcagatcctgaggtaggaagtcacactagagtatagtatatactctatattaatatacatttataatatatgattacttatatacagaaatatttatattatatgtaatagtctattataattaaatatattcatcccataagttgctatcctatagaaccctagtacaaggtcacacagcaaatagactgcacggtacatagctcttctgtttgcttgtgtataagaagtgaaaagcgggctggtaagatggctcagtggttaagagtgccgactgttcttcctcaggtcccagcgactacatggtggctcacagccatccgtagtggaatctgatgccctcttctggagtgtctgaagacagctacagtgtacttacatataataaataaataataataataaaaaattgtaaaaaaaaaaaaaaaaaagaagtgaaaagcagagctgtttggtttggtcttttgtctcaatacatgtttgggggcgggtaagtggtgccaggggacctctacagagtggtgatctgtaggaaacaaggttgctcaattcaatacaattaagcagccagtgttggttcaaactttgcaagcctgaccccaagtagtttatttggtgaaaacttacctggtgataattaacccaatcacctgtgcacagcacagcttaggacaccactgcactggaactctttgtaaagtacatgtgacatcttccagaaagatagtttctatagactgagaaaaacatgctcaccgataagagtccagggaggaactggtgagatctcagcctatcagtctcaggtcacaggccattacccacatctgctcccagccttctgggcagaagacacgtcatacatctctctcactaaacagacattcctgtgtagttaacattcctggtgtccctagtgcttatctgagcctcgcacacaggttatttcttaaactcttgtagaggacttatacaatagccatcattatggggccaagcctcactatattataataaacaatacatagtccagagcatccttgaagcagcctcgaggcacagatggatgtccactagggtaatgctccgaaggtgaactgctgagtcaaagtgttgactgacctgcagaaacacatttagggaaaatgaaagactagacagtgcagaagtggggattttgttgttgttttgcgggatatgtgtgtgtgtgcgcgtggtgtgttgaatggtgggtgtctgttgttaaaattctgactgggtttttctaaggatcggcacactagaagtttcggtagtccggccttttgaagcgcggggggaagtgctgaattggaagcgccaatctccctacagataatttgcatagcgcggagcaggggctgcggcatccacgtgcggcgcactctccagcatccccgtctgtaccccaggtttcgtccggggtttgaacggctgtgccaccacgtgccagtccgcgtccttccccgctgggccaaagcgtcctagccacagccctcctgatataaacgcagaaaacaagtagaaagcccaggctgcgtgcgccgaacctcctgcccggagtccgggaccggagccggctttctccggacttggtccgatcggacgaccagccgccctcgagacttggggtcaagagccgggacccttggaggatcaccggaagaggtgacagacacctcggggcccatgaacgtttggaattcgtaaggacatgagaatctcggtggttccgtgtctgcccgccatcgcggccaccggccacgggcccaagccaagtgtagcgaagcttagaaaaggttgcccaacgtcatgtggcttgagaaggctgccgggcgccttaagccgccagcaggtcccatggtgtaatggttagcactctggactttgaatccagcgatccgagttcaaatctcggtgggacctcactgaacctttttttggccttagaatccctgttttggggcctgcaggaagtagcaaccaacccgagcctccgcagggaatgcactgacctgtagaatggacgttcagcttccctccctgtgtctcaacacgattacatttcaggaacagcctgggctgggaggcactgcgcacgcgcgccgagtcgggcggaaaaataaacgagttgatggaagactgaacataactttacccaggagggaaaacgaaagaacccgaaggatcccgaggctttcctgtctgagtaccgctgcacacaccgcgcctcggagtccccgccccctaccctctgattggctgctgtgcagaacgcgcggtaggattgctttgtgagccgcgaatgaagtggccggacggggccggggggcgggtaagtggtgccaggggacctctgattgggtacaagagagcgattccccgaggcttgtgcgtttaggggtcataaacccgtgttttggttctgcgttgctcacccagcgaggttgtgtttcaattagacaacagtcacttagtcaggctggcaggcgatcagtacagtttctcaccgtccatgaggtgtttctccgagagaagggcaggaatcgctaaggatttctttagctgcatcgcgccgcgggtggaaaatatgtacagggagtattgtatcttctttggattaagatctgggatttgtgttcgtccctgtgggataaatgacgagggagcctgctgacgcattatggtctccctacagagtgattggcacggtggctataggttctcacccttgggaggatgccatggaaaccaaaaggagcctctcccgactctccgattaattctctaagcatgcctcttgcagacacaacccacgcactctttaaaacatctgaatggatcagtttgaatgaaccatcgcaacctcaaaaagatcaagacgtgagaggaggcacacttgcgctaccagaaaataaagatgcttgttaactgtacattaaagaaattaagataatgtctggatggataaacataccgatggaacagaatagggaagcaagatgcagcctcacctttatgcatagtttataataacaaaggtgtcacaaatttaaataataataaaaggtagcacaacagagttaggggaaaggacctacttgacatcctgctgtgtgcttgcttatagggaaagaatatgaaatcggattcttgttaacactaaacacagcagaaagtcccaagagaattgttgacctgaaagtgacagaagcggtgagcttggctgacgacataggggaatgcctacacctcagtttaaacaaagcccgaataaaacgcacagacgaggactgtgctactccaagtaccatcagaagagtgaaaatatctgggcctgttgctcaatggtgaactgcaaggcactcagggcctggcatactaagagaaaaggtaagccacagactagggatatgcatgtgtaatgcataaatagcaaataaatctaaataaattctcaaagcctgtaagaaaactgcctgccgaaaaatagcaaaacctgtgctaggggcatagctcagcaggtaaagagcttgcatgcaaccatgctggacctgagctccatccacagaactcatgtcagagctgggcatgctggggattgtagtcctaatgctggggaagtgaaggcagaagggtcattggccagccaatgagagaacctgtctttagaaagaaagaaaacacctcacattgaccctggcttccacattcataccaacatatgcacgcctttaatcccagcacttggaaggcagaggcaggcggatttctgagttcgaggccagcttggtctacagagtgagttccaagacagctagggctacacagagaaaccctgtctcgaaaaaccaaaaaaaaaaaaaaaaaaaaaaaaagaggaaaatagcctcagacttgaaaataagctcactatgtaggatatcactaaagagctaaatcggacaggtcacacccacccgatgacaatgctaagtgtctccaagaacatgggataaggtgggcaggcaggagcataggttagcagtagaacacacatagaggtgaacacacacatgggccctggcctgacacctgcacatacatgggtccattcacgtaggcacagatgtgtaaataagacaaaaccgacaggtactgctcagcatcatgggacatccctgtataccaatacccggtgttggagtcgggaaaaaccaaaacaacgcaagcagtcacaaaagtccagcaaagcaagatctttattggaattaggcaacaaaaatctggccagtcagggacagcagcacatactcagactgtccaggctcaaaaaataagagccttggctgttcttccagaggacctgggtttgattcccaggacctccatggtgctcacaactgttcacaactccagttccagggaaccaatgctgtcttctcaggcactgcttgcatacacatggtaaacacacacacgcacacacacacacacacacacacactcgccaaaacactcatacccttaaaaataagtcgctcatttggtagagtgcttgcttagcatgcagaaaatcccatgttcattcccagagcatctttaggaggtgaaggcaggacaaagatgtgttcaaggtcatcctcaactctaatagggagttaaaagctggcctgggatacagcagaggctgtctcaaaaaattgcagcacttgggagtcaaaggcaggcaagatctctgtgaatctgagggctgcctagtctacacagtgagttccagaacatcccaactgtgctgaaagaccctgtcttcaaaataaataagtaacaaaatagttaaaagactttgtctaaaacaaaaccgatccagcaatatggttttgcttttactagacatatggatgtatttacaaggccaggtgaagtctaggtgtcatacaaagacctggataacaatccatcctcctcagttggcaagatgcagccaggtaagcaatttgaatgtattaagcctctttggtaaaagaataaacatgagccgggcatggtggtgcacgcctttaatcccagcacttgggaggcagaggcagacggattt

SEQ ID NO: 667 - DNA, 1624 bp, Mus musculus
ctgcggtaggcagtctgcagaagtggctggagcgagctgcgatgacttccagcgtgtcttttgccagcttcaggtttccatggctcctcaagacatttgtcctcatggtaggacttgccactgttgcgtttatggtgagaaaggtgtcccttacaacagacttcagcaccttcaagccaaagtttccagagcctgcaagggttgacccagtgctgaagcttctaccagaggagcatctgaggaaactctttacctacagtgacatctggctcttccccaaaaatcagtgtgactgtaactctggcaaactgcgaatgaaatataagtttcaggatgcctataaccagaaggaccttccagctgtgaacgccagaagacaggcagaatttgagcactttcagaggagagaagggctgcctcgcccaccacctctgctggctccacccaatctccccttcggatacccagtccatggtgtggaggtgatgcccctgcatacaattctcatcccaggcctccagtatgaagggccagatgctccagtctatgaggtcatcctgaaagcttctctggggacactgaacacccttgctgatgtgccagatgatgaggttcagggcagaggccagaggcagctgaccatttccaccagacatcggaaggtcctgaatttcatccttcagcatgtgacgtacaccagcacagagtactatctccacaaggtggacacagtaagtatggaatacgagtcgtcagtggccaagtttccagtgactatcaaacaacagactgtacccaagttgtatgaccctggacctgagaggaagatcagaaacctggtgaccattgccacgaagacttttctccgtccccacaagcttaagatcctgcttcagagtattcgaaaatattacccagacatcaccgtgattgtagctgatgacagcaaggagcccctggaaattaatgatgactacgtggagtactacaccatgccctttgggaagggctggtttgctgggaggaacctggccatctcacaggtgactactaaatacgtcctctgggtggacgatgactttctcttcagcgacaagaccaagattgaggtactggtggatgtcctggagaaaaccgaactggatgtggtgggtggcagcgtgcaggggaatacttaccagttcaggctgctgtatgaacagaccaagaatgggagctgtcttcaccagaggtggggatcattccaggcccttgacggctttcccggatgcacgttgaccagcggcgtggtgaacttcttcttggctcacacggaacaactccgaagagttggttttgatcccatcttgcaacgagtggcccacggagagttctttattgatgggctggggagactgttggtgggctcttgcccgggtgtaattataaaccaccaagtaagaacaccaccaaaggatccaaagctggctgccttggagaagacttatgacaaataccgggccaacaccaattctgtgatccaattcaaggttgcactccagtacttcaagaaccatctctactgctccacttaaaaagtaccaagaccaggaatcgcaataaacagattagcggcgggcaacaa

SEQ ID NO: 668 - protein, 508 aa, Mus musculus
MTSSVSFASFRFPWLLKTFVLMVGLATVAFMVRKVSLTTDFSTFKPKFPEPARVDPVLKLLPEEHLRKLFTYSDIWLFPKNQCDCNSGKLRMKYKFQDAYNQKDLPAVNARRQAEFEHFQRREGLPRPPPLLAPPNLPFGYPVHGVEVMPLHTILIPGLQYEGPDAPVYEVILKASLGTLNTLADVPDDEVQGRGQRQLTISTRHRKVLNFILQHVTYTSTEYYLHKVDTVSMEYESSVAKFPVTIKQQTVPKLYDPGPERKIRNLVTIATKTFLRPHKLKILLQSIRKYYPDITVIVADDSKEPLEINDDYVEYYTMPFGKGWFAGRNLAISQVTTKYVLWVDDDFLFSDKTKIEVLVDVLEKTELDVVGGSVQGNTYQFRLLYEQTKNGSCLHQRWGSFQALDGFPGCTLTSGVVNFFLAHTEQLRRVGFDPILQRVAHGEFFIDGLGRLLVGSCPGVIINHQVRTPPKDPKLAALEKTYDKYRANTNSVIQFKVQYFKNHLYCST

SEQ ID NO: 669 - DNA, 57105 bp, Homo sapiens
  misc_feature (1)...(57105): n = A,T,C or G
tggaaaggcccgtgtgttactttttgttagtaaccatttttcctgctatgaggataataattaagcaaaatgctacagtaactgagattctctgtctgatattccaccccgaggctgctacagcatatagtcctactgcaaatagtagagtgagtaaagcagttcccacagggtggcatagtcgaaaatttccattaaaaggttttaatatttggctgagaaggagaggtaggaacgacaaaaagtatttggtgaagtaggggtgagactgagtaagatgactagttctcacttagttacttattttttatgattttcagcttaagatttcctatttctttacattgatatttaggatgttcctttgggctgtcaggggttgcttcctcagctttccaggctttgacttgagtgtgatgtatccaggagttgattcctgtaacagatactgtctcaattgccctggattccctggactcactagacgtgggggcaaaggattctgggcaccctcagttattagttgtcagtgccagcagtgaagagatttcctcctgtcatggttggaggcttacaggcagcacctgctcaaacagctagttttcagttcatagggctttaagaaagcacagcttatttggaaacttgtagccagaaaagttagaatttaatttaaactgtagaaaataataaaaattgaaaaacatttggcaacactagaatttaataacaggtgtgctatagtttttgaaacataatttcctttctccaatttcccatttttattaaaagacaaatcatggtaggaatggcttgttttattatacttggcttaattatttgcatacagtgcagcaagaataattatttgttacataggccttttaaattggcattgatggaactttgttccatagaaggaatctcagataagactttttaaagctgagcccagccatggaattataccattaaatacctatgagtttccccttgagattccaaaataacttggggttcctggcctatcagaaagtgacattctttacttaccacagatcagaaaccctgtacagggactgtgtacacaaaacgtgaggccaatttcccaagagctttcttggcttcataagtcaggtttgattccttaaaggaaagcacaccattccagccaaagccttggtaaaataaccagtttttccaattgtgtcctgttacaaaagaaaacagattcttattgcacttatgcaaataactatattgccacaacttaagaatactcacagtttccaaattctggagaaaatcaggtagagagaaacaagtatgctccaaattttgttcatgggagtatactaaattgttaaaagctgtcaatagctcaaaagaaaagtttctttgactttgaaaagcaaaacaaaggattagcaatattttcagcaaaacgtcaaaaagatcacttcagtctcctattagttcagttaatgcggttaatttctgtcctgcttgatattaatgaacgttttagctctttgagagtcctgaacgtttttcctctattctgatgtcacaatctccaaagttatcaaaaagctgcattcaagagcacctgttagagctttatagctgattataagactaccttctaaagaggaccaaaacaagacaacaattgtttatggatgacaaaaagttttagggtagccatagttaaagtcacaattgacaaggatatctgttacctttgtggcacacaatagttttaacataacaattataattactactgataacatacactaagatatatcagaattataggagtctcccataactttggaacacataccaataacatatttatacaaatatagtccaaagaaagccaaacaccattttctatttgacattgcttcctgtatgattttataccaaattttaccattatattagtgtgctattaatgttaagctcaatttttaataaaaccttgtagacaaatttaccgaattttaatgtttgaccataaagtaaagatttttataaaaatctttaaaaatagtctatagacccattataatttttgctaagagcaggttagtgctttaagagaaacctgttgtgcttttattttaatgctcaatttacagaaaaactggatgataccccttcaactttagccaatatgtttacacacagaatttcctttacaattaaccttccaaaaattgcttaaaccttcatttttattttattcaactaaaaacaattctttaaccttttaatctaggtaaaaaaccacattacattttcatgcctccttataatctttttaccaaaactatatgtaaactttttttaatagtcttaaatacatgttacacttaacttttagcaacctttacttttgttggtgagtttgggattttattttatttttatttatttatttttgagatggagtttcactcttgccacctaggctggagtgcaatggtgcaatcttgactcactgcaacctccacttcctgggttcaagcgattctcctgcctcagcctcccgagtagctgggattacaggcgagcgccaccattcctggctaatttttgtatttttaatagagacggggtttcaccatgttggccaggctgatctcgaactcctgacctcaggtgatcctcccgacttggcctcccaaagtgctgggattacagacatgagccactgttcctggccaagcttgggattttaattatgcactaggtgtagagcctaggacctagacagaagtgcagataaggtctgacttatcccagcatttaactccgtgtgtcgccgccatccggtctgggaggtgaggagcatctctgcccggctgcccgtcgtctgggatgtggggagcgcctctgcccggccgcggccccgtctggggggtgaggagcgtctccgccctgtggccgccccgtctgggagggaggtgggggtcggcccccgccgggccggccgccccgtcccggagggaggtgggggggtcagccccccgcccgtccggccgccccgtccgggaggtgaggggcacctctgcccggccgcccctactgggaagtgaggagcccctctgcccggccagccaccccgtccgggagggaggtgggggggtcggccccctgcccgaccagccgcaccgtctgggaggtgaggggtgcctctgcccgaccgcccctactgggaagtgaggagcccctctgcccggccgccaccccgtctgggaggtgtgcccagcagctcattgagagtgggccatgatgacaatggcggttttgtggaatagaaaggggggaaaggtggggaaaagattgagaaatcggatggttgccgtgtctgtgtagaaagaagtagacatgggaaacttttcattttgttctgtactaagaaaaattcttcggccttgggatcctgttgatctatgaccttacccccaaccctgtgctctctgaaacatgtgctgtgtccactcagggttaaatggattaagggcggtgcaagatgtgctttgttaaacagatgcttgacggcagcatgctcgttaagagtcaccaccactccctaatctcaagtacccagggacacaaacactgcggaaggctgcagggtgctctgcctaggaaaaccagagacctttgttcacttgtttatctgctgaccttccctccactattgtcctatgaccctgccaaatccccctctgtgagaaacacccaagaatgatcaataaaaaaaaaaaaaaaacaaactccgtgtgtcctaggacttacctagcttcagtgaaggccagttgtacagctaagagttatagtggcattgtataaagcattcaggaggcctaatcacttttaaatcgtacatttctttttttttctttctttcttttttttttttttttttgagatgcagtcttgctctgtcaccccaggctggagtacgttggttatattggtgcaatctcggctcattgcagtctccacctcctgggttcaagcaattctcactgcagtctccacctcctgggttcaagcaattctcaagctactcaacctcctgaatagctgggactataggtacatgccactacgcccagctaaattaacttttgtgttttcagtagagacagagtttcaccatattagtcaggctggtctcgagctcctgacctcaggtgaaccacccgccttggcctcccaaagtgctgggattacaggcatgagccactgtgtccggcctaaattgtacctttcttgcgtaaattcccttttataaaattttttatgacttacacagacaatttctgatgtgcctcaacttgctgacttgttgtaaacattcctttctttaaacaaccagttaatttacttcaggacaagaatttaccatataagattcttttttatataaattaccttttctttaatttcaagattagaagttaggtatttcactaaacagttcaaggtgtagctatctttattaaaccaatattaatgttcctttatcaaaaaattacacaagcaaagattattctgtttgggctgagttacagttttatagcctctatgccaaattttgacaccttatagcatttggcagagataagtatgaaattgcttgattaataaatgcaaacaaaaatgtatcctggcaactcttaagacatttctaatcttactgtaccagtaagttttaaagattaaagtcatgtgaactgaaggtcccacaacttttactttgtccttaaaaatgtttaagtgcttatttttcttaggccaattaattagagcttttaaaatagatattgcacacataacacatatatagccacacagacaaccagaagaagatccagtaattataagatttaaaaaaaaaaatttccctattggattaatggccttctggtgaggccctttaaaaacaggactaggaaaacagtttccagggcctaataaacaagcatagctggaagacaaagacagattttgagaagcacttattcacctctaattctaggggttccataaggaaaacagatttttcccaaaacgggattcatggtgcctttttgttttcccaaggagtcccaggccaccagaagtcattttagggtctttcatatatgcaccaagaatggcaagacagagtggagaaaagtaattcagttgattgggagaaaacctttcctaggaaaataagatttatgaagagacaaaacataaaggccttttgaatatactcatagcttggatatccattttaattaagctgagcactcttttttttatcaggggtgagggtgaaggttagaattatataaatgtcaggccaggttaaaggattgggttatgtgcgggaattccctgcggtaatgagagggattttcatagaaagatcctaggtatgtttgatttgcaacaaatcagacatggagaaagggcataaacacaagcaatgccttcacccccagccactttccagagagggagaatggcagagatgatttgactggatggagcagtttttgaacgggtcacaggtggagaaggaggggaagcggggtttggggctgaaggcttgcgggcaggaggggccgccagggcagagggttcagatgggtgaggagcagatgcagagggatgagaatgcagagggggttcatctgcagggtcaaaaggagttttggaggaaggagttttgaaggaaggagtttcaggggaaggagagacctggggaaggttttcattaagaaggatttcatgaagggtgcaagcttgagacagagagggtcgggatctaaagtagaagaaagcctggcctgaatagagagaacctcctggcgtttgccattcctggttataaagttgtcattgtccctgagaatttgaaagtaaaaggtgccatatttgggccttcggctcgaaattttaacttgccattatttaatttgtacccgggccaggccgtgttgcaataaaaatctgaacactttggctttatatttcctgtaagccaagttggtgaggttgtgaaggagacagcccagtggagaggatgtgggaatgcaggattgtttggtacccatgtggactggtaagaggaagccgagggtgtctgttttagttctaggcatccccagtcaaaaggcagagacccagaatcctctttataaagaggatggtcaagttgagaagaaactgggcatccccaagatttcttctagcttagtcccactggttctctgaagaccgggatggcagacctgactgtcccgagtaccatgagaaagaaaggggaaggcagatcttaccagttagctggattagtgtctgatgttggatgttccagctggaattggcaaagggcctcttggactggagccacaagaagtggggtggtggggagagaaagagagagacagagagagagagagagagatagagaggaggatgagggaggaggaggggagaaagcgaaatacctgatacccattgcaggcagtcagaggtggattcctgagacctgagggttttgagggctcactggagagtagccccagcccgagccttgcaggccctttcaggttagttgtcctcctcatgcaaattgctcaaaaagtaaagtgagagacaagatgggatgggtggccagagactctcaggatccagtgggatgagcagctgctgtccactgcttccttggttgcaagagagcctctatccccaacacccatcctggctttcagcaccaaatgtaagagttaaagaaagaggaaagaaacacaaaaagtggctcaacagtcaaaggtttattttggagaataaacctgagaggggcttctggccgattttttggtcagaagcattctgtcttacagactaggagtatttattggttttagggtgagacagcttatcacaagcttggaatatttctgtgtggggggggaagtttattgcagggttggaatgtctctggtcagaggagaggttatctcagggctggcatgtctctggttggggagggatttatcttatggttggaatgtttctggtcggagatgtcatttgtggtttatggtcatgctaaccttagccattaggctgatgccctttggatttaggtggtttttgatcaaggtgaactttaaaatggtggtgcttgtccaagatggtgatgctcctgtctgtcactcagggtagcagcagggcagctgcttggctgtggtctagacagtcagggaccacagctagctctgccaggcagaaaccctgatcaagctgaaaaagagtaaatattctcctttaatccactctgccttcctgcagtcatccctagagcagggagagaggatctacaaccatagagggttcaccttggaaccacaatcaccaatcacaacactaatgtgaagcaagagttatgcctgaactatcctcttccctgcttccaaaccacagatctgatggaaaagagctttcctacttaaatagagctggtgtggggaaaagagccactttatttcgaatgcgaatctgcctggttaaccccaagtcccaggagtgcctctaaaatgtctagttgggccaggcccagtggctaatgcctgtaatcccagcactttgggaggctgaggtgggtggatcacctgaggtcaggagttcaagaccagcctgaccaacatggtgaaaccctcgtctctactaaaaatacaaaattagccaggtgtggtggtgcatgcctataatcccagctacttaggaggcaggggcaggagaattgcttgaacccgggaggcagaggttgcagtgagccaagatcacaccactgcactccagcttgggcaatagagtgagactccatcttcaaagaaaaaaatgtctagttgtgtattactctttatgtatgaacacttattcattgtaagttttcttcttattgttgcagaaaccatagtttctgcctgtagcccctatgtattccttctagggtacatatgctttttgcccaagatatatgctctgggttgaggggttgtagtatagagatctacctgccttgtggtgtccaggaccacacttctaagttcccttaataaatcacccaataccaacaaactggatttgtctacctcctcctttggtttctcatcttcttcagcatttgggggtctctttgtgtatacaaccctttcacagaacagctggtgatacagggggtttgagggagccagcactggctttagagacacaactcttaggtgaaaatcctagccccattactggccacataagcttgaatgagtcatgaaagatctcataggctcagtcttcacatctgagaagtgcctgacagtgttattacaagagctgaatgaaggacgggaatgaatatggaagctctttgtaagcaaggaggtgttatacaaatgtctttttttacccccctacatgcacgtagtcggtacaacacttttctgattggtcttgtcaaagaggatctcttttccagtctggagctagaaaatagttatctgcatttgttacattaaaactcccttctgagagactccctttctctgctggctgccaaggagctcagacctgaacttgggactcacctgcatcaaagttgtagatcacgctggcatttccttctactcttttccaagactcactttcccagactccgaaaaaaaaaaaaaaaaaaaaaaaaagcactggccatttttctttttttccctttttttgagatggagtcactctctgtcacccagactggagtgcagtgccatgatcccggctcactgcaacctctgccacctgggttcaagagattctcgtgttctcgtgccttagcctcccaagtagctgggattacaggtgtgtgcaatcaccccgggctaatttttgtatttttagtagagatggggtttcactatgttgcccaggctggtctcaaactcctggcctcaagtgatccacttgcctcagtttcccaaagtgctgggattacacacatgagacaccgcacccggccccattttgcatgcattttgcacgccatatttaaagattcttgccggtcgtggtggctcacacccgtaatcctagcactttgggaggccgagacaggacgattgcttgagcttaggagttcaaggccagcctgggcaacagagtgagacctcctctctacaaattattattattattttttaattagccaggtgcggtcgtgggtgcctgtagtcctagctactcggatggctgaggtgggagaatcatttgagcgctggaggtcgaggctatgagctatgattacactattgcactccaggctgggtgacagtttcaaaaaataaattcttgtatttgtggcagctgggtcattagaatacaatataatcatgcgtgagaggagccatgggaaacactgagcctggcttatgaaaaaggtcctgcaaatctaatttcatctgaagttcaacagactctttcttccaggcacacaggcgttatgtggccgcacgggtccctgcccgttagaaggattcagccacaccccagctttccagttcctggggtcttttgccaggacagtaggtgtggagtgcgtggtgaagtggagggtggaggtgggaccaaggccgaatttagggacccccagcatgagctgcgggtgggtcaaggccgcgaggttggagggcacggggacacagcatagcaaggaaggaacggtagggaccgtggtgatagactaggggtggacgcggggattgtgtttttctttaagcgggagagagaagcccgatcaccggcagcggaggagaaaggtccagggtagacatgggggcgctggtgtgggggcggtcaggagagaagggcgggggccgtcccaagcgtcctgcacctgccctactcgccgagaatttgcccgggtcggtgccagggcggggcagtcggcggcctggctgctaggctccgtgacatccggcagtctgagggcggcgggattcgggatgacttcgggcgggtgagtgtccccggggcagagcagagcgagaggtgaaacttcgggagcagggagcgccgcgggtcctttctggcgtctgcagagcgggcaggtgctggggacgcagacgccggagccagggagcgggcggttggagtcttaagtccaaccggttccccgcataggtggctgcagaggcgaggtgacggcgcgtgcggaacgaactctgcacccccaggaatggggagcgctggcttttccgtgggaaaattccacgtggaggtggcctctcgcggccgggaatgtgtctcggggacgcccgagtgtgggaatcggctcgggagtgcgggcttcggggatctctgcttggaactcagaggcgctgacccagcctggggcccgtttgctgcccacgggaggagccgccgtcaggggtatgtgagtgcccgggcgcggggactgcgggctgtggacagtcggggagcccggcggcttggtctcctccacagtccgcgcggagtcagggaaaagtcggttttcaaatccaggcgcccaccgcagggcagagtgagctgcggttgtgtggccccgcgtgctaaagagcctctacggagtgatataataattaacggggtaaagtacatttgaaagtctaaattaatttttataagctacgaagaaggatcagacatacatttggtattcttttatccgcaaagtttattttgtttgtattttccaaaactctaaaacaatcgctaaacattgacaaagaagtcatctcacaaaaatgcaataacatgtttgtgacatgacatcttgtaagcatgaaaaagaacacgtttggccgggcgcagtggctctcatctgtaatcccagcactttgggaggccgaggtgggcggatcacttgaggtcaggagttcaagaccagcctggccaacatggtgaaaccccgtctctactaaaaatacaaaaattagccgggtgtggtggcaagtgcctgtaatcccagctacttgggaggccgaagcaggagaatgacttgaacctggaagcagaggttgcagtgagccgagattgctccattgcactccagcctgggcgacagagggagactctgtctcaaaaacaaacaaacaaacaaaacaaacaaacaaacaaacaaaaagcagcaacacacgttgaatagaggattggcggaatgggggaaaggaaggcggctttgcatccatccacgtccttggctaaggctttcattccagcgttccccttccccaacttcccccactccacaatccttcatgggtgactgaaaaggaggaagctgggaggcctgatactgatgcggataaatttaaagctggcaaatcctcggcaaatttgacttttcctccacctgtggaatcatgcgtaaaaggtctgcagtttctttttaattgacaaataataatcgtacatattcatgaggtacatagtgatattttgatacatgtagtgataaacacataccatagtgataagatcaggataattagcatatacgtcttctcaaacgtttatcatttctttgtgttgggagcaaacattcaatatcttcctcctagctatttgaaactatattattatcattattttgagatgcagtcttgctccatcacccaggctggagtgcagtgatgcgatctcggctcactgcaatctttccctcccgagctcaagtgattcttccacctcagcctcccgagtagctgggattacaggcgtgcgcacgcgcgccaccatgcccaactaatttttgttattttattttattttttttagacagagtctagctctgtggcccaggctggagtgcagtggcgcaatctcggctcactgcaacctccacctccatggttcaagcaattcccctgcctcagcctccagagtagccgaaattacaggcgcacgccaccacgccctgctaatttcttttgtatttttagtagagacagggtctcatcatgttggccaagctagtcccgaactcctgacctcaaatgatccacccgcctcagcctcccaaagtgctgggagtacagacatgagccacagtgcccagcctgatactatatattattgtaactatgttcatcctacaatgttacaaaacactgaaaggcatttctgctatctagctgaaactgtgtaaccatgcccttggacttcctagtgttcaggaccgtgagccaaataaatttttctgtataaattactctgtggtatacctgtggtattttgtaatggcagcacaaaatggattaagacagtttctataactcgaatagtttaaatgtatttatttttctgggtaccattttagaaaatttagaagttaagatgttacagaaatatgtgacaaagatagtgcaaactcaaattacacatacacacacagagtatttctgagcttcggtttgttccattcacttatttgcttattcctgaattggtaacatgcttttaataactgtggccttatcataactttgctctttagtagtaatatagctatccttcttttttttttttttgacggagtttcactttgcaacctccgcctcccaggttcaagcgattctcctgcctctacaggtgcgtgccaccatgcccgcctaagatggagtttcaccatgttagctaggatggtcttgatctcctgatctcatgatccacccgcctcggcctcccaaagtgctgggattacaggcgtgagccaccgcgcccggcccatccttcttatttttaatatcttccttgctattcttatgtgttacttctaataaattttagagtcattttgaccaataaaaaatctgttctgttagcctctgtggtgtgtgcctatagtcccagctactcagaaagctgaggcaggaggattacctgagcccaggagtttgggaccagccagggcaacatagtgagagcctggctctaaaaaaggaaaatcctggcccggcatggtggctcacgcctgtaatcccagcattttgggaggccgaggcgggcggatcacgaggtcagaagatctagaccatcctggctaacacggcgaaactccgtctctactaaaaatacaaaaataaaataaaataaaataaaaattagccaggtgtggaggtgcgtgcctgtagtcccagctacttgggaggctgaggcaggagaatggcgtgaacctgggaggtggagctcgcagtgagctgagatcacgccactgcactccagcctgggcaacagagcgagactctggatcaaaaaaaaaaaaaaaagaaaatcctgttttgcttttattcatgtggttattatattaaatttataaattactatagagcaaagttacatctctacaaaattgagctattctagtcaagaataaaaagaaggtatctcaatctattcatatatatatttccctaatacagtggtaatttgcttaattctttatttgttcagtgacaaaattaattcttgatcattactaaaaaagaaagaaaaaagagactatagaaacatgttcatttaatagtgcagatcacaattaagaacttgatgtgtgtcatttcaggcatacaatcgaataaagttttaattttttaagggcgcagattttatattttatgtatattcagtaatttgatttttttaaaaggtgcctttatttacttagatgtttaagctctcacattagagtttatttatttatttatttatttatttatttatttatttatttttgagatggagtttccctcttgtcacccaggctggagcacagtggcgcgatctcagcccactgcaacctccacctcctgggttcaagtgattcttatatctcagccttccaagtagctgggattacaggtgcctgccactacactcagctaatttttgtatttttagtggagacggggtttcaccatgttggccaggctggtctcgaattcctgacctcaggtgatctgcctgtctcggcctcccaaagtgctgggattacaggcgtgaaccaccgggcccagcctcacattagagttttacaagctggtgaacacttggcaaattgtttctcccagagaactacaagcatacattcttacacattaaactaatatcaatacacatcacaattttatcaattacatagtaaaacaaattatcaagtatacaaatattaagttacacagcttaaaaggcatgtaatatatcagatgtctgctcagttcattaccagaaacccacttttttttttccccaaagagagattgacaagaaaaggaaaaaattcacacttaaacaaaataactgtaaacaacttccaataggtattttaaaaattacaagctgttcagaaattttatgattaaaaattgctttagttatataatatggtttgaatgtgcccctcagagttcatgtgttggaaacttcatccccaattagacaatgttaagaaatggggccttataagaggtgatgaggccggaagggctctgcgctcatgaatggattaatgccattatcatgggagtgggttcgttatagtaggagtggattcctcataaaaggacaaattcagccccctcttgctgtgtctctcacatgcactcacttgtttttccaccttccaccatgggatgatgcagcaagaaggtccccagatgtggcccctggatcttggatttgccagcctccagaacataaacttctgttccctgtaaattacccagtctcaggtattctgttatagcagcacaaaaccgtacaaaccagaccaaggcagtgtgataacagagcattgtttccttttaaaatgtatttactaaattaaaatgtatgttctacatattctgcacaagaaaaaaacacattttaccaaaaatatttaattgttccctcccattctttttcagaacttaacagggaggcccctgttaagttacccactaaaatttaagcattcgatgaaatgtaatgtctggagatattaaagacatgtgcttccatacagtgtagattttcaaaatgaaaatccataacagcacaagatgagacttagaggaagatgttaaatgatcactgtgagacctgattaaaatccaacaaaaatcagtggttgcacaaacctgatgtatattggtacaaatgcagtagatataaacataaagtgagcaggcaaataatcagataggccccactttcaatgtttgaaatgacaggaggaataaaccatgtaaggtctagagtgttcctagttccggggattttagttctgtgtgatactaaaaatatacaagtattgggcaggccatttaggcacttaatctctctaaatttcctatatattaataagattctagcatggcaatagacttaaagatttataactcaagactgcatgatttcaggaaatgtcggttggtaccaaccataggcacatcttaaatgctaaaaaccaagaatcttttgctaagcgcccaagagatcaagatcatatgggccacctaagagtctgccacataagtcccacatgtttcttcttaagtatctgcctgcctgggtcattttgtgttatgttgttaatttgaagcagatttctgctttcattatgttttctgacttgttggcttatagaaacctttgtagggtagtggttaaaagtgtggtctgcttttgaattctgcatctgtcataaccgagaaagcaggttacttttcctatttagcttcagctatctcatctgatcattgcgtggagtaatcaaacttctctcagccagccttggtggctcatgcgtgtaatcccatcagtttgggaggccgaggcaggcagatcacctgaggtcagtatttgagaccagcctggccaacatggtgaaaccccgtctccactaaaaatacaaagaatagccgggtgtggtggtgggcgcctgtaatcccagctattcaggaggctgaggcaggagaatcatttgaacccaggaggtggaggttgcagtgagctgagattgtgccactgcactccagcctgggtgacaaagcgagactctgtctcaaacaaaacaaaacaaacaacaacaaaagaaaaacaaaaaataaaacttctcttgttatgctgttgtgaggattaaatgagataatgcacacaaagctcttggcagggggtctagaacatactaagtggtcattagacaattattattattaatttttttactatattttgtcaccaggtaccctattaaaatcttactaatagcttctcacctcatacattttagttttctgaatatgtaatcatttcacctgtaaataatactttttatttcccttttcgttatttatgttttattctataagctaatcttactgcattgattagcacttccatgacaatgttagataatagcagtgggcgtttttgttttttttttggagacagagtctccctctgacaccgaggctggagtgcagtggtgcagttttgactcactatatccttcgccctccgggctcaagtgatcgtcccacctcagcctcccaagtagctgggaccacaggcctgggccaccatgcccagctattttttttttcagtagagacattcaccatgttgctggtctcaaactcctgagctcaagcgatccgcctgcctcggccccccaaagtgctgggattacaggcgtgagacaccatgcccagcctattatgtttttagagatggggtctcagttgcccaggctgtaatgcagtagtgcgatcatagctcactacagccttgaactcctgggctcaagggattctcctgacttagcctcctcagtagttaggactataggcacatgccacggtgcttggctatttttcaattttttgtagatacagggtcttgttttgttgcccaggacggtcctgaactcctggcttcaagtgatcctcctgcctaggtctcccaaagtgctcagattatgggcatgagccactatgcccggcgaggttacatttgaattgcattgtcagaacgtatgatctgaacgatttctactttattacagttttctttgtgtcctaatacgtggccaacttttttttttttgagacagagtctcaaattaccactgtattagggaaatatatatgaatagattgagataccttctttttattcttgactagaatagctcaattttgtagagatgtaactttgccctatattaatttataaatataatataatataatttataataaccacgtgaataaaagcaaaacaggattttctttcttttttttttttgagacagaatctctctctcttgcccaggctggagtgcagtggcgtgatctcagctcactgcgacctccgcctcccaggttcacaccattctcctgcctcagcctcccgagtagctgggactacaggcgtccgccacaacacccgactaattttttgtatttttagtagagatggggtttcaccatgttagccaggatggtctcgatctcctgacctcgtgatccacccgccttggcctcccgaagtgctgggattacaggcatgagccaccacacccggcatatgtggccaatttttataaatgttttaagagctctttaacagaatacaaattatatcattttgttgttctgctgctttaaaatatttttgagacttgatcaagtgagacatgtcagcatctctaactatctttgtatttctaatccttctttcatatcctgccattttttactttgtatactttaatgctattattagtggataaaagttcacggctatctgttttggtatcatgcattgatcactataagtggtctttctgtcctatttaatactcttttttattgccttgaatttagctatgctgacattaacattactaaccttttttttttttttttgaggagtctcgctctgtcgccaggctggagtgcagtggcgtgatcttggctcactgcaacctccgcctcccgggttcaagcgattctcctgtctcagcctcccaagtagctggcactacaggcacacgccaccatgcccagctaatttttgtatttttagtagaggctgggtttcaccatgttggccaggatggtcttgatttcttgaccgcgtgatccgcctgcctcggcctcccaaaatgctgggattacaggtgtgagccaccgtgcccagcctctaacctttttttttttctggatttttttgccatccttttatttgtaatttttctaagtccctttgttgcaacttgattctttcctcctctgtttatcagaaatcgattttagtgaccaatataagctatgtgcttagcttacatttttcctgaaattatcagtctcatatacattacataatcaagaaaaaagattttaacataatctgttcttttgtgtcccaacagctcgagatttctgtggctcctcaagatattggtcataatcctggtacttggcattgttggatttatgttcggaagcatgttccttcaagcagtgttcagcagccccaagccagaactcccaagtcctgccccgggtgtccagaagctgaagcttctgcctgaggaacgtctcaggaacctcttttcctacgatggaatctggtgagagactgcgtgttctttctttcaccttaatgcacacatcttccttgctcctcctcaagtaccatgccctactgtgcccattgtacagatggttcccttgctttcctaagcctgtgctgaatgcacaagtgactgcaagccaggatggggcttggtctgtacgatccagtctatgttctctatagcatccagcaaaatcccttaaaactttcgagagcatgtagtttttttttatcaaaactgcagaaaagatgctgcttctctgtctctctgccctccttttatggtggggtgagatacaactgacagtcacgtggctctcagatttaaagaagttaggtgcaggggacaattcaagagaggaaaagtcttcagccttcctctgtccctgcttccctccctttgtccccttgtctctgtgaggggccagtgcaggggactccagggtctcatcatctcagaacagttgggtgtaggaaagaagattttcagggtaaactacacactggattaggactccggtttcctctcacccaccagcctacccacccaatccatgtttacagtcctcttgcttgtttcaggctgttcccgaaaaatcagtgcaaatgtgaagccaacaaagagcagggaggttacaactttcaggatgcctatggccagagcgacctcccagcggtgaaagcgaggagacaggctgaatttgaacactttcagaggaggtaatgcgggtcatgaaggcccttgggttctgagatggaacaaaagccctccctatgtcctgaggttgtgaatcttaagagaaaaagcaggaaggaattctctctcttgcaagggtccctgggaggaactattaggaatgaaacaaagaaggaatcgaggaaatcatccttaaatgaagatttacaaaactttgtatgtacaaaacatttcataacaacaacaacaacaacaaaaagctgggattggtgacacatgtctgtcattctagcactttgggaggtcaagatgggaggatagcttgagcccaggagtttgagaccagcttgggcaatatagtgagacccccatctctacaaaacatttttaaaattagccaggcatgatggtacatgcctgtagtcccagctactcagtaggctgaagtgagaggatcacttgagcccaggaagttgaagctgcaatgagccaggatcacaccactgcactccagcttgggcaacagattgaaactgtgtctccaacaaaagcaaaaacaaaaacaaaaacaaaaacaaaaaaaacaaaaggaatggagatagtttgaaacatctggtggtacatcctccatgcacccaggccatcatagcaggtgattttgtagtcatcaccaaggtgccctattttattcatttatatgttgagagcatactaccctgtgctatatgcaaggagtgtatccctttgttttaaattacaaggggtgtcaacactcaggtgtatcaaccagggttgttggttgaaaaaggcagaatttggctgggcgcggtggctcacgcctgtaatcccaacactttgggagactgaggtgggcggatcacttgaggtcaggagttcgagaccagcctggccaacatggtgaaaccccatctctactaaaaatacaaaaattagctaggcatggtgacgcacgcttgtaatcccagctacttgggaggctgaggcaggagaatcacttgaacccaggaggtggaggttgtagtgagctgagattgtgccactgccctccaacctgagcaacagagcaagactccatctcaaaaaaaagaaaagagaaaaaacaaacaaacaaacaacaacaacaacaaaaacaaaaaaacaaaaaacaagaaaagggctgaacttgattctgcctggcttgtatcaaaagggaatttgttagaaggatgctggggccttaccaaatccataggtggtaggatgtccaggctaggaaatcaggtaagaactaacggagcactgaagaactggtcaggctccagggccatctggtccccatattgttgttgcttctgcaatgaactgtccccaggttactgccttagtgctcaattaactgagcctaactcatgaatcaaaaggaagggaaagggtgcatcagacccctccaggtttgacttttgaagctagccactgtcttagtccgttttctgttactatagcagaatactgcagactgggtaatttataaagaaaaggtaagtttatttagcttacgattctggaggctgagaagtctaacagcacggtgctggcatctggtgaaggcttcttgctacatcataacatggtggagggtaccacatattgacagggcaagagcacatgcatcagctgaggtctctcttcctcttcttataaaactaccagtcccttggttgggcatggtggctcacgcctgtaatttcagcactttgggaggccaagacaggtgaaccacctgaggtcaggagttcgaggccagcctgggcaacatggcgaaactccatctctactaaaaatataaaaattagccaggctgtggtggtgagtgcctgtagtcccagctactcaggaggctgaggcaggagactcacttgaacctgggaggtggaggttgcagtgagctgagatcagaccgctgcactcactccagtctgggtgacagagtgagactccatctcaaaacaacaacaacaataacaaaaaccaccagtcccatcatggggtccctacctgatgaccttatcctaattacttcctaaaggcccctacctccaaacaacatatgaatttgggaattaagtttctaacacatgaaatttggggaacacattcaaaccatagtagccactaccctccaaattacatgcaagtggaaggctccccagaagacagatggaggcaccgtctccatcaggaggtgttgaaagctggacagccagtggaatacacaggtgatgctggcatggatttcaaccctggtgcacctagctatgtgaggagcaactggtcttggtagttaacagtgctgccgcgggaagctgactggctgcattcaggtcctgcatcctctatctgccagctaggtgatcttgggcaagctgcttaatctctgtaaaatgaggatgctaataacacctagctccagttgggcatggtggctcacgcctgtaataccagcactttgggaggccaagacaggcagatcacctgaggtcaggagtttgagaccagcctagccaacatggtgaaaccccatgtattagtcagggttttcttagagggacagaactaacaggggggagagagagagaaagcgagagagagaatttattaagtattaacttacatgatcacaaggtcccacaacaggctgtctgcaagctgaggagcaaagagagccagtccaagttccaaaactgaagaagctggagtccaatgttcgagggcaggaagcacccagcactggagaaagatgtaggctgggaggctaggctcatctcattgcttcacgtttttctgtctgctttatattcgatggcgtctgattagatggtgcccacccaattaagggtgggtctgccttccccagcccactgactcaaatatcagtctcctttggcaacaccctcacagacacaccctggatcaatattgcatccttcaatccaatcgaattgacatttagtattaaccagcacaagtccaccccttgtcaacttgaacccatacacatctcctgagatcatacataatcttcaaataaagacaataataaggttataattatgcctaacataatacaactatcttttgtacgaccagaaacgcaccaatccccaacccaaatactattacataaagttaacaatacttagatgctgatatgaagtcaataaatcttacgtcacatgataaaggaaaaggaaataaaatgaagatattttcttagtacaagtgtgtatatgcacaaacatgtttttaacaaaagaaagaggaaatactcatgacaattacagtcctcatttctgcagctggtcacatggtcgtagctggtattgattatcttcttttactacccattctgtattccccttgccttcagcaagcacctcagcaggtaatgttttttttcctggtggagtgacccaaaccttcattcctgaagggtctgggtcatttgtagccctgcctggattgggctattgtagtttcccattgaccttaatcacagggcatggtaatactaagagacaccctaatggatctcctgtattccatgtgcactcttccttacctccattgtggagtagtagactgattttatcttgatagcccgggtcaatcaccccagctaacacagtaacttccttcttagcctgttgacataaaggtaggaggagtccaaagtgtccaggtggcaatattaacttccactttaatggaattgttgttgtgtacactggtggcagcgttcctccctctggaactaagacctctaggccagcagaacataatgttgcgggaacaggaagcaaaaattttgctagtggatcactaggggtgatggtgagtagtgctacttcccctctttgattcctggacccgtgaatcctggccatgggagaatcagtaccatatattggacactgattcagagcatacatggccttctggagaactttgcctcagccctgcaaagtattgtcacctagttggcattataattgtgacttcaaaaggccattccaccgttctatcaatccagctgcttcaggatgatggggaacatggtaagaccagtgaattccatgagcatgaatccattgccgcacttcttcttcttcttttttttcaagatggagttttgttcttgttgcccaggctggagcgcaatggcacgatctcagctaactgcaacctccacctcccaggctcaagcaattcttctggcttagccacccgagtagttgggattaaaggtgcacgccaccactccctgttaatttttgtattttttatggagatggggtttccccatgttgccgaggctggttttgaactcctagcctcaagtgatccacccaccttggcctcccaaagtgctgggattacaggcgtgagccaccatgcctggcccaacactgtcttttcttaatttccattgctgactactccatagggatcctcaaattctagctaagccatgtgtctaaacattcctgtctgattgagggctccttaaggtgggaatgtagttttcccatcagtccaaggcctctatgagagctaaactgtcctccatcagactggaaggttcatgattacaagggctatgtctcctcccttagactggtacttctaagattgggctctctctccttccttagattagggattccctgaaggttggcactgctcttgcaggatgtcttcagctaatgaaattacatatgataaataacccagaatcatttgctccctggccaatgtcacataagctatataaatctctggagtatatacaggagatgtttcttaatttacattcttcgttacatgttggatgaggtaatctggcaaaattgcatttagagaccacatctgttatcctccggagaatgcatgactgatgtggaaggaatgacccggggatccatataggatgactaattaagaggatgtttgtgcctcttgtctgtatccttgaaattacaaatagagcttgatactggatgagatctctgactcagttgaggctgattggtcaatctgatcctgtgtgttagtgctacattatacttccattaaaaagcagcatgtgtaatgctcctctaagaaaaagttcatttttttcctcttcttttcttgttttctttttctttattcttttcttttctttctttcttttttttttttttgagacaaggtctggctctgctgcccaggctggagtgcagtggtgcaatctctacccactgcaacctccactttctgggctcaagggatcctcccacctcagcctcccaaatagctgggactacaggtgcatgctaccatgcctggctaatttttgtgtttttttgtagatatggggttttgccatgttgcccaggcttgtctcaaactcctgagctcaagcaatccagctgtctcagcctcccaaagtgctgggaatacaggcgtgagccaccatgcctggccagaaaaagtccattttaacccactcccctgaccactaccactgctattctcgtccctttcttaaatgataggttcccttgtaaacctagctaaggagtctgccattatgaatttggtatgtattattccacactatttttaaatactgttatatacatgtatgttatatatatatgtgtgtgtgtgtgtgtatatatatccatataaacatatactgttggttttttgtgtattttagtgtacttggtaccataaaaacaaatcactctgaaatttgtttttttattcaattatatatatatatatatatttcagattataagtttattcaatgcaaaataatcctctgggtgggtgtggtggctcatgccagtaatcctagcactttgggaggctgaggcaggtggatcacctgaggtcagaagcccagcctggccaacatggtgaaaccctgtctctactaaaaatacaaaaattagtcgagcgtgatggtgggcgcctgtaatcccagctacccaggaggctgaggcaggacaatcacttgaacctgggaggtggcagtggcagtgagctaagatcgtgccgctgcactccagcctgggcgacagagtgagatcctgtctcgaaaaaaaaataaaaacaaaacaaaagtcctctccaattttactgaggtggctgaccacatccacaaccaaatctgcctcttactggaatttggttgttgacacagcctcagcctcggcattcttgttggcagcaggctgtgggcttccccacttgtgggtcttgcaggtggctcaccctccagaccttcaggcagagacctgccagtctctggacagctgtggcataaggtggcaagcacaatctctgggggcagatggaggtcatcatggagatactggatacccttgttggtaaggtacgcgtagaaatgtctccaggcaaaccgttcctgcacaaagcctccggacttgagagactgcacaaccttcatgacatgaaggtcgggcaccttcttgtctgccagctccaggtgcttaggcatgtggacatccttcttggccaccgtgactccctcctttaaaaggagttcatagggctgggtgcggtagctcacacctgtaatcccggcactttgggaggccgaggcaggcggatcacgaggtcaagagatcaagaccatcctggccaacatggagaaaccccgtctctattaaaaatacaaaaattagctgggcgtggtggcatgtgcctgtagtcccagctacttgggaggctgaggcaggagaatcgtctgaacctgggcggtggaggttgcaataagccgagatcgtgccactgaattccagtctggcgacagagcgagaccttgtctcaaaaaaaaaaaaaaaggagttgataaatgcattcccgttcttcttaggcatcaacatctcggtggctgcagggtctggggccagaactggaaaggagtatgaaatgtttttaagagctatgtgtatatctagttcatccctctgaattgcaatatagctatgaatatgaatatgctgcattttactaagccacttccctattgaaaggtatttagattgttgaaaaaccttcatgtttacatttacattatttacaataatattacattatatttacattatttcctttttcattaagacatgtataagggccaggcgcggtggctcacacctgtaatcccaacactttgggaggctgaggtgggcggatcacttgaggccaggagttcgataccagcctggccaacatggtgaaaccccatctctacaaaaaaatacaaaaattagctggacatggtggtgtatgcctgtaatcccagctagtcaggaggctgaggcaggaaaatcgcttgaacccgggaggtggagtttgcagtgagccgagatcacaccactgcatcttgcctgggtgacagagtgagtgagacttcgtctcagaaaaaagaaaaatacacgtataaggatgttcatttcaaacaatgctgaaatgaacattcttgtgcttgtcttattgcttacacatgcaagcatttctcctttcacctagcatcttacttgctagatcccagggtgtgccttttttatttttgatagatattgccaaatttccctcaagagggcttgtgtgaactcacactttcatgaagagtgggtaagtgttgcaccttacatacacctaactaacgtttgctatcatcacattttcaaactttaatgaaaaaggtattccatgttttttttaattcacatttccctgattgaagctgagtatgttccatatgttcattgccatttgtatttcctcttccgttaattacctgtttatgttctttaccatttaaaaattttggaggtcggggggggtcagccccccacctggccagccgccccgtccaggaggtgaggggcgcctctgcccggccgcccctactgggaagtgaggagcccctctgtccggccagccgccccgtccgggagggaggtgggggggtcagccccccgcccggccagccgccccgtccgggagggaggtgggggggtcagccccccgcccggccagccgccccgtctgggagggaggtggggggggtcagcccccccgcctggccagcagccccgtccgggaggtgaggggcgcctctgcctggccacccctactgggaagtgaggagcccctctgcctggccaccaccccgtctgggaggtgtacccaacagctcattgagaacgggccatgatgacaatggcggttttgtggaatagaaagcggggaagggtggggaaaagattgagaaatcggatggttgccgtgtctgtgtagaaagaggtagacgtgggagacttttcattttgttctgtactaagaaaaattcttctgccttgggatcctgttgatctgtgaccttacccccaaccctgtgctctctgaaacatgtgctgtgtccactcagggttaaatggattaagggcggtgcaagatgtgctttgttaaacagatgcttgacggcagcatgctcgttaagagtcatcaccactccctaatctcaagtacccagggacacaaacactgcggaaggccgcagggtcctctgcctaggaaaaccagagacctttgttcacttgtttatccgctgaccttccctccactattgtcctgtgaacctgccaaatccccctctgcgagaaacacccaagaatgatcaattaaaaaaataataataaaaaataaaaattttgcctttttcatattaccgtaagtattcactatgatgatctaatcttttttttcaaggtaattaaatgatctcctgcttaaactgggtcccgaaggctaacatttcaaccattgtaccgtagttcctcaaaaagctaatcttgctggatggtgctatgtgcttgcttttgactaaagattgttattggccgggtgtggtggctaacatttgtaatcccagcactttgggaggccaaggcatgcggatcataagatcaagagatcaagaccatcctggccaacatggtgaaaccccgtctctactaaaaatacaaaaattagccgggcatggtggtgtgtgcttgtagtcccagctactaaggaggctgaggcaggagaatcacttgaacccaggaggcagaggttgcagtgagctgagatcgcaccactgaactccagcctggcaacctagcgagactctgtcacaaaaaaaaaaaaaaaatcgttatcaacaaccaaaaaaaccataaaaatagttactctgtttcctctaaaaatattgtgacaacaattactcccatatacactttcttgtgatttagtttatttattatttcagcggtaggagaagttccacctcccttcaggaattggtctacttcttcctttggatattaaggaccatgtgatgattgtcaatcgcttttatcctggttcccacgaagttcagatgtgactttggtgtttagctgctgcagctgggtgggcccctaccgtctgataatttccttcttctatgctggtcatggttttttttaaaaaaaatatgctttgttagccaggcatggtggctctctcctatagtcctggcttctctgacagctgaggcaggaggattgcttgagcccagcggttggagaccagcctgggcaacatagtgagaccctatctctacaaaaaaattttaaaaattagctgggcttggtggcatgtacctgtagtcccagctatgaaaaggctgagatgggaggactgcctgagccagggaggtcaagactgctgcgagccgtgattgtgccactgtactccagccagggtgacaaagtgaaaccctgtctcaaaaacaaaaatgcagccaggtgcggtggctcacgcctgtaatcccagcactttgggaggccaaggcaggtggatcacttgaggtcaggagttcaagaccagcctagctaacatggtgaaaccctgtctctactaaaaatacaacaaaattagccgggcgtggaggcgcactcctataatcccagctactaggtaggctgaggcaggagaatcgcttgagcccgggaggcggagcttgcagtgagccgagatcgcactattgcactccagcctgggtgacgagaatggagggagacagggacaacccaattttgatttctccatattgtcagggcaaggctctgtgcacaggcaccactttgagaacgaaccagggaccagcatcagggcagctgctgacgtttctgttctccttcctgcagagaagggctgccccgcccactgcccctgctggtccagcccaacctcccctttgggtacccagtccacggagtggaggtgatgcccctgcacacggttcccatcccaggtaagtacatccacataccaagagaccccagacaacattctcactcttctaaggcaaaaggagggagaggtcgggtgcagtggctcatgcctgtaattccagcactttgggagtccaaagcaggagttcaagactgcagtgagctatcatcttgccaatacactccagcctgggtgacagagtgagaccccgctgtctcttaaaaaaacaacaacataaaaggggccgggtgctgtgctcacgcctgcctataatcccagcactttgggaggctgaggtgggtggactgcttgagctcaggagtttgagaccagcctgggcaatatggcaaaaccctgtctctacaaaaaatagaaaaattagctggatgtggcggtgggcaactgtagtcccaactacttgtggggttgaagcagaagggttgcttgaacctgggaggccgaggctgcagtgagcagagattgtgccactgcacttcagcctgggtgacaaagtgagatcctgtctcaaaaatagataaaaaataaataaataaaagtatggagcagacattcattggtacctgctgtgtactcagcacaaggcaagaagcttgatgtgattttttttttttttattgcgacggagtcttgctccatctctcaggctagagtgcagtagcatgatctcgggtcactgcaacctccacctcccgggttcaaatgatcctcctgcctcagcctcccaagtagctgagatgacaggcatctgccaccatgcctggctaattttttgtatttttagtagagacgggttttcaccatgttggccaggctagtctcgaattcctgacctcaagtgatctcctcacctcggcctcccaaagtgctgggactacaggcatgagccaccgcgcctggcttgatgtgatttcatttcatgttagccttattgtatccacaactgggaatctcctttagtagccgtgacctcctggggctccaagataacacaggagaggacagaaatctgtgtgcctcaaagaatcttaggacataattggcttttcaatgtcctccatcatcatgggaacaggcaaaacataagccactctgtaaaaagtgcttttttttttttggggacggagtcttgctgtcacccaggttagagtgcaatggcatgatctcggctcactgcaacctcctcctcctgggttcaagccattctcctgcctcagcctcccaagtagttgggattacaagtgcccaccacacctggctaatttttgtatttttagtagagatggggtttcaccatgttggccaaactggtctcgaactcctgacctcaggtgatccacctgcgttggcctcccaaagtgctaggattacaggcatgagccactgagcctggccgggagtgcattgtgaaaagaatatttatgttggttaaaactgccctccatgatggatttttacacacccctctagttcagcatcacattcctcatcagaataaagttgaatattatcagagggaccagaaggatgagcctgcaggcacagatgtcccctcccagtgcagagatgttggattctgtgggtctgtccagtgaagtcttcttctgcttgtgggctcatggcttctggaggcaaacagccccccgaaacctgcaagccccagaaaagacctccaagtaaggtctcggtgtggtgacacctggggatctgacatatctcatggacccagccgagctctctccaggtccagcactgaggagcatgacagatacctgaatttcacaaaccacatctcaaacaggtgagatgagaatgactgcctgagacagagggggatgcaggacatcaacagatggcatgtcccacacagaaggaagggcaaggtcccagacaggggacaaaggggacagggaagcagagatgagagtttagtaagttatcaaaggccacatagagaggatgtacttgaattcaaatttgaattagtcctactatgagaacagagatagattctaaagtaaatgcatttggggtcaagcactagtgttcttgaatagccatcttaaaaactgtttttcattttggatgattcatttcttattgtgataaaatatatataatgggctgggtgcagtggctcttgcctgtaatcccaccactttgggggctgaggcggatggatcacttgaggtcaggagtttgaaaccagcctggccaacatagtgaaaccttgtctctactaaaaatacaaaaattagccaggcatggtggtacatgcctgtggtcccagtactcgtgaggagaattgcttgatcctgggaggcggagtttgcagtgagctgagatcacaccactgcactccagcctggatgacagagtgagattcagtctcaaaaaaaaaaaaaaaaaaaaaaaggactggtgcagtggctcacacctgtaatcccagcactttgggaggctgaggctgttggatcatttgaggtcaggagtttgaaaccagcctgaccaacatggtgaaaccccatctccactaaaaatcgaaaatttgtcgaatgtggtggctcacacctgtagtcccagctactcgggaggctgaggcaggagaatcacttgaacttgggaggtagaggttacagagagttgagattgcgccactgcactccagcctgagcgacagagtgagaccccatctcaaaaaaaaatgtatatatataaaatatagaaacatatatattatattaatgttatataaaaacatatatattattatttataatatataatatttaaacataaaatcaacaacttttttttgtttttgtttttgttttttgagacgcagtcttgctctgtcgcccaggctggagtgcagtgtcgagatctcggctcactgcaagctccgcctcccgggttcacgccattctcccgctcagcctcctgagtagccgggactacaggcacccgccaccatgcccggccaatttttttttgtgtgtttttagtagagacgaggtttcaccgtgttagccaggatgatctcgatctcctgacctcgtgatccgcccgcctcggcctcccaaagcactgagattacaggcttgagccaccgcgcccagccaaaattaactattttaaccattttaaagtgtatacttcagtgacatgaagtatattcatgttgttgtgcaaccatcagtcaccaccagaacttttccatcattcccaactgaaactctgtacccatccaactgaattccccactgtccctctccctggcccctggcaaccaccgttctgctttctgtctctatgggtttggctactccaggtgccttatacaagatgattcattattcatccattgcttcctccccttcagtgacagagattccctgaaggaactgaattaattcacagcctccaaaactgaggacgggcatcagaggttttagaaccgttggggtttgagaaagaccacgaaacaccacttaacagagccctggggagaggcgcacgtgtcagcaaacactctgggcgggaggtgacacttgaaggagctctcaaggatgtgcaggagtccatgaggttggcgagagcagcggggagctgcgatgtctttcatgagcagttttctttccttttccctgtgtcctccaggcctccagtttgaaggacccgatgcccccgtctatgaggtgagtccttctcccagcccctctttgcacttggtgtcctgtcctcattccctcaactgtggctgctctcagcctttgacggagcccctgtccagattcaaggtcagacatgagcccaaggagggaggggatggaagggtgtgtagaaaacttaacttctagccttgggagtggctggagttccagagaggacttcccagaccacactgaagaatgggacccactggctgctgctgcttctggtgcaagaggaagcggccactacagccatgggctctggcactgcgtggcctctgtcagggttagggctggcaggacagacggtgcttgtgccctgccttcctttccccactttatgcagctccacatcaagatcttatggtgctatatctgatcagtgggatgcaaattgtgcccagaaccctaaccaagaggaatctgggaagtgtggttttagttttcccacctttacatgttggtcagaggttggaatgggtgatgagtgagcagatcggcaaggcctccaccacctgtcaccatggagttcttgtttctctatgttgtcttctttttttgagacagggtctcactctgtcacccagtctggagtgcagtgccgcaatcatggctcactgcaggcttgacctcctgggctcaagcaatcctcccgcatcagcctgtgagtagctgggactgcaggcacgcaccaacaaacctggttaattttttttttttgagatggagtctcactctgtcacctagcctggagtgcagtggtgcaatctctgctcactgcaacctccacctcccgagttcaatcgagtctcctgcctcagcctcccaagtagctgggactacaggcatgcaccactacacccagctaattttttgtatttttagtagagacagggtttcaccatgttggccaggctggtctcgaactcctgaccttaagtgatccatcttgacctcccaaagtgctgggattacaggcatgagccaccgtgtctggcccctggttacttattttttatttttagtagagttgtggtcttgccatgttgcccaggctggttttgaactcctgcgctcaaatgatcctcccacctcggtctcccaaagcagtgggattacaggcgtgagccatcgtgcctggctatattgtcttcttcgtagtcctgctctggacctgaattccctgctgcgcgtagttccatgcttatcatctctcttccacgctggaatacaagcttcacgaaggcatttactgctgttttcccagtgcctgtaactcggtttttagaaagtgtctgttgactgactagtatcaacagtgtcgggagtgacactattcaatttcctttaatagataactgcgatgactcacagaaggcaagagaagagagtggctgtgggggtagcaatggggtggagaggagtaagccagttctagctgcattttggaggcagagctgagaggacttgccgccagatgggctgtctgtgtgcagaaaagggtagagcaaggaggacttcccttggggcctggaacaactgagtggatggaggtgccatccacaaggcagagggaatggaggtgagggtgggaggaaacaggtttttagaggaaaatcagtagttccattttgaagacatcaagtttgagttgcttgtgaaaggtcccagcagttggatctcagaaaggtgagctgagacttactacaatgtgaccccatctgcaaaagaacgggttttaaaccatggaaacagatgaaatctagcaggaaggtgtggagtaagaagggaaaagagtctaggattggagtttgagaccagcctggcaaacacggcgaaagcccgtctctactaaacatacaaaaacaaattagccaggtgtggtggctcatgcctgtaatcccagctactcaggaggctgaggcaggataattgctttaacctgggaggtggaggttgcagtgagctgagatcatgcactgcactccagcctgggtgacagagcaagactccatctcaaaaaaaaaaaaaaaaaaaaaggaatccagatcaaggtctgaaaaactccatttggagatatatagagagaggaagaggagttgtcaaagagaggtcaaaaaaggctgtgggtggaataagaagccaagaagaacggaaccctgcgagctgagagatgggaatgtttccagaaatgggtcctttcatccttggggccctaggacttgggggattgggggcgggggcgctagcacagtgactccctgcagagccagccctacactgtcaagggcaccctggtgcttctcccctcacccttatgtgctctgccctggctcctggcctgggtatgtatgtatctttccagggagatattttccaatccctgcattgagcatcattctacctcacccaccctaggtcaccctgacagcttctctggggacactgaacacccttgctgatgtcccagacagtgtggtgcagggcagaggccagaagcagctgatcatttctaccagtgaccggaagctgttgaagttcattcttcagcacgtgacatacaccagcacggggtaccagcaccagaaggtagacataggtgagagcctgtccttggagtgcaaaatgcttagggatccagaagatacctctgggccctttcaaagtcttcctccttcaggaagccttcctgttttttgtgttttgtgtgtgtttgtttgttttgttttgttttgttttttgagacggagtctcactctgtcacccaggctggagtgcagttctgtgatctctgctcactgcaacctccgcctcccaggttcaagttattctcctgcctcaacctcccaagtagctgggattacaggcacctgccaccatgcccggctaatttttgtattttgaatagagacagggtttcaccatcttggccaggctggtcttgaactcctgacctcgtgatccacctgcctcagcctctcaaagtgctgggattacaggcgtgagctacagcgtctggcctgcctgcctgcttttaagattccttccctctttcctctttctaatcccagacacataatttcataattactgtacccagtactatccccacattgccattgaccccatagagccactcgaggagagaacaaatcatgctgtgcgctttgcacctggtgagaaccattcagttcttttcccagtcctctgcagctctcaaagctgaagatttccactgcagtagaggagggagccagcctgtgcctcagcatcttgtcttgggcactaataggaaagaactgggagaactccccattccaagggctttgtctctcccctccttccctcccaccaagaaattctagggagaacaatccctgccactctcagggcagcctgagtttccttctggatgagttaaaagcacccttttctcttttgaccggatacacaggatgcattcccaggacatcaacagaaaaaaatgtaacacggttacagatgatattcatgaccactagctaaagagatagttctccctaccttcagattttcaaacattcctcttcataagattaccctgtgagataaaatagggtgggtatttttatcctggttttgcagacagataaaaaaatcagatagtaaatggtaaagtcaaacttagcccagaccctctggtttcaagcccactccaccctaacacattctcacaggggaagaaatgtgaacttaggagtcattcagcacgttgccccagggacacagcaaggcagaagcctgaatgccagagactctatggggtccttgatctcatcccagccaggactctccccaccaaacctgtactcgcctgtcatggtggcttcccggggtggcatggagtttaatccagacatgatactccctgtgccattatcttatttctccctccagtgagtctggagtccaggtcctcagtggccaagtttccagtgaccatccgccatcctgtcatacccaagctatacgaccctggaccaggtaaggcccttgtccttggggctctgtggtggcaaccctgtgaagctattggtgaaattcagaagggatcacctctgagacggaggagaattgatcaaaatgacagctctgatatgctccctgacaagcttcgtttggaggaaaaaaactctaagacacaatcccctaaaattgcttaattatatttaacttattatgtggttgtgtgctaattttggggaaaaaagctaaaaaattataacattttagtaagtaataataataaaaagaatggtattgaatcaaattggaaatcctgatataaacccaatacatgttggaatttcactgtgtgataaagacatcttgtctggccgggcgcagtgactcatgcctgtaatctcaacactttgggaggcctaggtgggcagatcacctgaggtcaggagttcaagactagtctagccaatatggtgaaaccccatctctactaaaaatacacaaattagctgggcgtggtggcaggcacctgtaatccctgctactctggaggctgaggcaggagaatcactggaacccaggaggtggaggtttcagtgagccaagattgcgccactgcactccagcctgggcaacagagcaagactctgtcttgaaaaaaaaaaaaaagagagaggcagcttgtcaaattaaaggaggacaaatgaacaaattaaaaattggcttttcaaaaaatcacgtgagataatggtgtagctatatgaaagataaaaagttggatccaagtgtgatggcctgcacctgtaatccagctcacacctctaatctcagctactcaggaggcggagatgggaggatcgcttgagcctgggaggtcaaagctgcagtgagccaggatcaccactatactccagcctgtgcaacagagcaagaccctgtctcaaaaaaaattaacaatgaaaaataacttttaaattagaagtaaaacttgaatatatgccacagttcataccaagataaattcaaattgatcagatatctaaatacattttaaagtactagaaaaaaaaacctgtagttaatttttaattagctgggtatggtggcatgcacctgtaatcccagctactggggaggctgaggcaggagtatcatttgaaccctgaaggcggaggttgcagtgagccgagatcctgccactgcactccagcctgagcaacagggcaagactccgtctcaaaaacaaaaaaacaaaaaaacttgtagtttcaaaaaacattcttagggtataaggcatgacacaaaactcagagaccataaagaaaaaattaaaaatataaaatatataaaattttatatattaaaattagcaaatttttttctttttgagacagagtcttgctctgttgcccaggctggagtgcagtggcacgatctccgctcactgcaagctccacctcccgggctcacaccattctcctgcgtcagcctcccaagtagctgggactacaggcgcccgccaccatgcccggctaatcaaattagcaaattttaattaagtaaagtcaaataacaaaggacaaattgggaaaaaaatcttcgattcacattaaannnnnnnnnnnnnnnnnnnnggagagagagagagagagtgagcgagcaaagggggaagtgccagacacttttaaaccatcagatctcgtgagaactcattcactatcatgagaacagtaagggagaagtcagcccaatgatttaatcacctcccaccaggcccctcctccaaaacgtggggactgcaattcggcatgagatttgggtggggacacagagccaaaccatattagacctcattgcttgtggtaggcaggacagcaaagctcctgagtgccacagcagcacaactgcaaaccctcacctgtggtagatgggatgagaaacaggtggaaggagaaactgggtcatgcaatatctccagcactggaaagatacaggggcaaagtaaaatttttttttcttttttttcttttttttttgagatggagtcttgctctgttgcccaggctggagtgcagtggcacgatctccgctcactgcaagctccacctcccgggctcacaccattctcctgcgtcagcctcccaagtagctgggactacaggcgcccgccaccatgcccggctaatcaaattagcaaattttaataagtaaagtcaaataacaaaggacaaattgggaaaaaaatcttcgattcacattaaagacaaaggtctaattttacttaagagcatctatgactcaataagaaaagaacacccaataatggaaaaatgcacagttcagaaaaaattaaattcagtaacacttttagccattaaaatatatgcccactctcacactgagaaaagtgcatatgaaaactactttcacatcaaaaggttttggacagggctggaaaaacagcatatcaactgtggttaggaatgtaaattggcacctctcgggaggcaatttggcagttcctatcaacattttaaatgtgtatatcctttaggccagcaattccacttctagaaattatcctacagatatttatatctgtgtgaaatgacatttgttcgattgcagcgctgtttgcaatgacaaaaaacagaatgggctgggctcagtggctcacacctgtaatcccagcactttgggaggccgaggtgagcagatcacttgaggtcaggagttcaagatcagcctggccaacatggtgaaaacccatctctactaaaaatccaaaaaatccaaaatcaggcatggtggtgcacgtctgtagtccctgctacttgggaggctgaggcaggagaatcgcttgaacctgggaggtggaggttgcagtgagccgagatcatgccattgcactccagtctgggtgacagagccagaaactgtctcaaaaaaaaaaaaaaaaaaaaaaaagggcaagagggtggcacagggggagggttctggaacaacttctgtccaaacgacttctgatttttgtcattctgggaaagtggctctgtgcactcacccacaaacaggtagggttgtggcttccagcatgcattaactccagctggccccatgccatgcagacatggcaactgcacagtcagatgccagttctccgtttagtggctgaatcccaaacacatctgcagctccagttgtggcatcacggggtcttttccttaggaaagctgtcccctctccagtctcttatacgtcacatgccttaagatggacaattctgtccaggccttgtgatctccaagtatttggagacatttctaaccatgtcttcctgaggatagagatcaggtaagcttttctctaggagttgcagatgatggtagaagcaagtctcaagatttgtagatattttctcctcttcctgggcttcatgaccctccatattgaacccttagatgggcaaagctctgtgcatttcaactctaatattaagatgaaggccagaagcagtggctcatgcccataatcccagcactttaggaggccgaggcaggtggatcacctgaggtcaggagtttgagaccagcctggccaacatagtgaaaccccatctctactaaaaatacaaaaattagctgggtgtgatggtgcatgcctataatcccagctacttgggaggctgaggcaggagaatcacttgaacctgggaggcggaggttgcagtgagccgacattgcaccattgcactccagcctgggcaacagaggcaaaactccgtatcaaaaaaaaaaaaaaaaaaaaaaggaagaaagcaggacataagcaaagtgctaacaggcaggaggtgtaaaatgaagcattcagacagacagttgggaaatgacatagtggagccaacagaaccaggaaatgcaacaaattgggtatgttgtaaatgtctttattttctaatgcaactaacaaactcttattaagcacctcctgggtacaagaggcatgagacccacagacactgacaggttatggcagaaagaagccatcagatcaaagcaggaaaagacagtgaagcttcctacaggacagagctctgacacccactgttttctgcccagagaggaagctcagaaacctggttaccattgctaccaagactttcctccgcccccacaagctcatgatcatgctccggagtattcgagagtattacccagacttgaccgtaatagtggctgatgacagccagaagcccctggaaattaaagacaaccacgtggagtattacactatgccctttgggaaggtatgtccctctcagattgggtggcacctgcattccaggacaagagggccccagggtcaggttctaccctggatggggccgcttcctcaagggtcttcccaagaaagcagagtccaggagtgggagtgggtgagggctgtcctctgagtcccattgctgattcacagagaaattggtcaccctcacttctctgcattcatgaggtggttattccacctttcctcatttttttttttttttttgagatggagtcttgctctgtcgctcaggctggagtgccgtggcatgatctcagctcactgcaacctccacctcctgggttcaagtgattctcctgccttagcctcctgagtaggtgggattaccagcatgcaccaccacacccggctattttttgtatttttagtagaggcagggttcaccgtgttgggcaggttggtctcaaactcttgtccttaggtgatccgcctatcttggcctcccaaagtttacagatgtgagccatcacacccagcctctcatttctatttttttatttttcattttttttgagatggagtcttgctctgtcacctaggctggagtgcagtggtgcaatcacagtgatcatggcagcctcaaccttaaaggctcaagtgattctctcacctctgcctccctagtagctgggactacaggcatgcaccataatgccaggctaattttttaaatttttttgtagagatggggtctcactgtgttggccaggttggtctcgaactcctgggctcaagagatcctttcacctaggcttcccaaagtgctgggattacaggcgtgagccactgtacactgctcccatctttcctcatttccgatgtggaaatcgattggggtccttataagcgacttgaggtctctgacatctcaaagattcctgacatgtagagaaatctgtcatctccatgattctaccagagctagggtcttggtctctctctcctctttccctctctccctctttctccttgactctctctccctccccactctctctttctctctccttctccctctcttcttcccaccttccctctctcccctacctttcttcctctccactctctctttctctcttcttcccaccctccctctctcccccacctctctctctcctcccacctctctctcactccccactctctctttctctccctctcttcttcccaccctccctcttccccccactgtctctctcactccccactctctccttctctctccctctcttcttcccaccctccttctctcccctcacctttctctctccctccccactctctctttctctctccctctcttcttcccacccttcctctctctttccccccacctctctctctccttgctactctttccctctctcattttcttcctccctctctctcccccttccttcctccaaggacaaaggaggaaacgaatattatacataccagatgtccttcaaacttgacatcttacaggagacaaaaggagagccatagaaactgtcaggtgaaaagggacttcagccaatttatataggccacagagccaaggaatgactttctagcctttctttgtctcagtctttgatccacacagtcactgtcccttccagactttctctgagacatggacttccttcaaccctgtggttcacagccttggctgcacactggattcgctcgcaccaattctaatggaatttgtctggagtgcatgcagcctggctgttgggaatttagaaagctccccaggtgattctaatatgtaatatgggcaaccactcctttaacctcatttcatctacagggttggtttgctggtaggaacctggccatatctcaggtcaccaccaaatacgttctctgggtggacgatgattttctcttcaacgaggagaccaagattgaggtgctggtggatgtcctggagaaaacagaactggacgtggtaagggacagttgccagtttcacccagccacaatctgtagagatggagaagaggggagaagagagcgggaagaaatatataagagaagaggagggggagggaggggagggaggggagggagaggggctggtgcaggaggtgaataggccagtgcaacccaggtggagagtgctgcaccagctcacgcctccatactgacttttctttgagtaaattacacctcctccctcatttgcaattgttttcttttaaaattgtgtgtttatgcagcatttctaactccctccgttgactagtatgagattaaagacaggagcattctggttctatcacacaacattaaaaacagtataaatggtacaaagctttaaaagcacacacggcactaatgacattctaaaaaagaataagaagagaataataaaaacagcctaggtgtgatggcttacacctgtagtcccagcactttgggaggctgaagcaggaggatcgcttgagcccaggagttcaagaccagcctgggcaacatggcaaaacctcatctgtataaagaaatacaaaaaattagccagggatggtggtgtgcatctgtagtccaagctactcaggaggctgaggtgggaggatcacctgagcccaggaggtcaaggatgcagtgagctgagattatgtcactgcactccagcctggacgacagagtgacacctgtctcaaaaaaagaaaataataaaaacatcaaaagtaaattcactgtagaaaagaaaaaggggcatggatgagaaggtaagtggtgtcgtgatcacagttaactctactgcaagtggacaatccccaaaacacctagatcagcaaagacatctcttggcaactcttacagagaccagatcacgataacttaagagagaagatgttccagctcatgtaacaaccacactggcagctgagttggctccaggattatcctggatcagcttctttttcttgttgctcctcaatcctttggtccctggctgcatggccaggaggaagaggggaagaggaagtgaagggagagcaggtttcttttaaggatgtgatgtaaacgtttctcgcatcggttctaaatcataccccttcagccaaaactttgtcacacagtgaaacgttgctgcaagggaggtggggaaatgcaatcttttttttctttaaataataaatgggctttgttttttatttttatagattgagggggcccaagtgcagatagcttatacacatgtattacgtagtggtgaagtctgggcttttagtgtacccattacccgcataacgaacattgtaccccacaggtaatttttcaaccctcacctactctttttttttttttttttttgagacagagtctcgctctgtcacttaggctggagtgcagtggcgcaatcctggctcactgcagcctctgtctcccaggttcaagggattctcttgcctcagcctcctgagtaactgggaccataggcacatgccaccatgcccggctgatttttgtatttttagtagagacagggtctcaccatattggccaggctgctctcgaactcctgacctcaggtgatccacccacctcagcctcccaaagtgctgggattactggtgtgagccaccacgcccagcctaaccctcaaccactcttaacctcctaccttttgtattctccagtgtctattattccacaccgtatgcctgcatgtacccattgtttagctcccagaaatgcagtctttagctgactagttgactatgtcgtgaaactcagaagggtcatttattaaaaggaagagggaaagaacgggtgatgggggacaatgagcagactttaccacatcacccttagaggattatgattctttcagaaatagatgtacttgctcatctgttgtgctcaggctcaaacatgaaaatgcacatctcttccatgagtgcatggataggcagctccaagaggtaagccaggagcagaaaatactaggaagacagctcgagacaaacagctccctgcaagaaatctagcaagtggaaactccgcaaatggaccagtgcacacaggctgcctcttacctgtactgcagtactcctctcccagtggaagggagtgagttatcttcttctggaaagataaccttctttggtcttgggtaagggttactcacgccaaggagattttctggggtaggcaggaaatgaaagagcccagggacccaacagtggtatagtgaaagccatggccacagcagcaacgagggagtaactgagggataatttgaaggatagacagagaaataacaattcttgttataaccgaggtgcagtccagcgagtcttcctggaagaggcaggatgaatattgatctgcactctaacatggatttctctgcctgctggctaggtaggcggcagtgtgctgggaaatgtgttccagtttaagttgttgctggaacagagtgagaatggggcctgccttcacaagaggatgggatttttccaacccctggatggcttccccagctgcgtggtgaccagtggcgtggtcaacttcttcctggcccacacggagcgactccaaagagttggctttgatccccgcctgcaacgagtggctcactcaggtgggaaggctgaaagagtgagggagggagctgggctgggaattagctgcagaagtttgttctttccaagggctgtacccggctggctgatcatagtcgcttgcccagtagcagtacatccctttcccctttcccctttctccccagactagggagctcttgatctctcttacctccctcctcacgtctctttgacttctgtgtctcctgtaggctgcccttcttttccttccccttcctttccctacagctctgtcttcttcctcctttcccatgctgcttcatattctattttttcagaaatcctttcctattaactgctctctctttccctcttactccatcagccctggagtccgcagttctgtccagtttgaaagccaatctgtgccactctgcctctgtgcccatatctctgcctgagaaatgagcttatttatttccttccaactcatcagcagggacaggctcctagagttaagggtgtggcttcacgtggggctgaacctccccagtgtatgaactgtgtcctctccctgggactctcccccaccagacctagaatagtgcccacttttctgaccgcagctcccacttccttctgctctccctctctttgcagaattcttcattgatgggctagggaccctactcgtggggtcatgcccagaagtgattataggtcaccagtctcggtctccagtggtggactcagaactggctgccctagagaagacctacaatacataccggtccaacaccctcacccgggtccagttcaagctggccctccactacttcaagaaccatctccaatgtgccgcataaaggtgtgagggcataggagaaacactaggctggctggttatggtatctatagcaggccaccaaaaactggactcctgataggtgaacgttgtaccaaaccagctggtgggtagggaaaagggaaatggctcagttactggaagtaccaatcaaaggtgaagggtcactggaaatgaaccagtcactgaccagggcaatggagactgtattaatagcaatgatgatttgtacaatgccctgccttttttgaagcatttgcatgggcagtatctcacatcatctcatctgatatcacacaaagatgacattggttggtgtcctcagtcaaaagaacagctgcctggtccttgatagttgtttggtggaaattctgtcacagtcagaagcatcggatccagcatcactgtcatccctacatttttattaggttctatcttgtagactcaaaaaatgtgaacattccagggtccttgccttgaggaggtttgcagcctggttcagttcagtccaatcacagaattaggcagccggggtcagaggatcagagaagggaaggggtcaccaggtcccaggtggtggaggaagactccgtggagtgaacttgttaggagcctgaaagcagacattcaggcatcagagagggtaggagggccctggggccatcccactgtccaccagaacaaaggctgccctggcatcagactcactccagacctgttccagaatgccagggattgaactcagagcccatgccaaggcatgatggtgaacagacagtgtgagtgtggtgacaagccactaaactccagggacctgaggccagttgctggtcactcaaaactcatgtcatttacagagtggttccatcactctgttgttggataagcctctttctgttgcctgggggttggcagattgccgagaccagcttggtcatggagaccctaacccagtggtgctagaggaattaaagacacacacatagaaatatagagtgtggagtgggaaatcaggggactcacagacttcagagctgagagccctgaacggagtttgacccacatatttattgacagcaagccagtgataagcattgtttctatagattatagataaactaaaagtattccttacaggaaacaaagggatgggccgaaacaaagggatgggctctggctagttatctgcagcaggaacatgtccttaaagcacagatagctcatactattatttgtggcttaggaatgctttaagcggttttccaccctgggtgggccaggtgttccttgcccttattctgataaacccacaaccttcagtttgggcatcatggccatcatgaacatgtcacagtactgcagagattttgtttatggccagttttggggccagtttatggccagatttgggggcctgttcccaacacgttcccctttttgttttccaaagtgataaaagcaaaggcagctttgtcatggtgagctaattctcacaggagtcaggatccgcacctgcagactatacaaagacaaacaacacagattaaaagcacaatcatcattgaaatcacagagcttccaagtgtctttatccactttaatgggttaatatctgctaatctgtctgcagctccttcaagcactccagttcctggcattaaggtcaagtgtgcctgggatgctttaaatatttgttcttttaattttgcaatatgcaaagacaagtttgtagagtgtccttctagatgcttttttattctttcccaaattttgatcttattaacagacattaatagtttccacaaatccttatgtttagcttctacagtggaccatatcatttgaggttgaggtgccactataccgccacgtttccagataatgggaactcttgctgtatttcttaccatttctaccatctgactgttttgtttagaccagctgaacatagtgtggctgtggcacacagactgagaggtgtaatttaagctaaacatccccttaggggaccaatcaataatgattccataggaatcgttgcgcagcacctctacctgttctgcaatgcaatcttcccaaacaagtacattcattatttctggccaggtctaattctatttacaaataggttttgagctgcctttgctttgcctcaattataggagcagatttattatggtaaatattaagagcagaaagcatgtgtaactgtgtcacacagtgattacatccaggcattattgccagccaagattgataaatatgcccaataagtataactgttctctgtgttgttccttgttgaaggaatactcatggcaatggtgatcaccactatcatatctatcattaaattactcattgtgactggttgtcccactttcctcaggttttcttccaccatctgtgacagcttcttgatctgtccccaggtaggtggctgtgttcgacagctgttgctcatgatagttggggtcctcctcagcatcagtcttgacatggctgcaaccaggggatcctcgggatcctcctggaatctcttcctcagcatctggctcgtggcaaggtttcaggtgtcttgatggcacccaaattggctattgattcggtcctggagaaacacaagcataacctctaccccaagttattattttacctatttcccaactttttgttattggatctctccaccaaaccagttgttctgcttctgtctttgcagctggtttctgtagatgctgttcagctgctggcctttaagcaggctcaaaaaatttaaagtcaataatgctagaatcaattgcatatggggtgtcccgtagtccctgcttctccccttttgcttttgcaactgctgtttcagggagagattcattctttctactatggcttgtccttgagaattatatgggatgccagtaatgtgtttaatattccatatagagaaaaatgtagctagagcttggctagtatagcctggggcattatctgttttaatagaagctggaatgcccatcaccgcaaaacactgcaaaaggtgacgtttaacacaggcagaagactctcctgattggcatgtagcccagacaaagtgagaaaaggtgtccacacatacatgtacataagctagtctcccaaacgagggaacatgtgtgacatccatttgccaaagagaattaggttccaatccttgaggattaactcctcctgtaaaagatgaggaatgcaccatttggcaagttgggcatcgctggataatagctttagcttctttccaggtaatgccgtatctgtgtttgagaccagaggcattaacataggttaaattgtgaaagtgtctagcgttagatattgcattagcaactaggtgatcagccatttgattcccttcagttaaaggtcctggaagaggtgtatgagccctaatgtgagtgatgtaaaaaggatgcattctactcctgactgctgtttgcaattgggtaaataaagccatcagttgctcatctgtgtggaatcgtagttgagcattttcaattaattgtgtggaatgaatcatgtatgaagaatcagaaatcacattgataggcctattaaaagcagtcaatacctcaattacagctataagctctgctttttgaactgaagtatagggcatctgaagcccttacttttcaagccagagttagaagctttaccattactagacccatctgtgaagacattttcagcaccttcaagtggtttgaatttagttattttagggagaatccaattagttaatttcaaaaattgaaacaattttgttttgggaaaatgattatcaagaatacccacaaagtcagctaaatgggtttgccaggtaagactatttataaaagcttgctctatttgtgccttcatgagagggacaataatttttccaggaccatatccatgtaatttaacaatctgagttctcccatttcctatcatagtagcgatttgatccaaataaggagttagagtccgtgaattagtatgtggaagaaaaagccgctctacaagatcttgctcttgaacaataacaccagtaggtgaatgccgagttgaaaaaattagcaaatctagagtcttttctggatctattatatttatttgacttgctttttgatgagctgcagctctgcatcagcttcttttgttaattgccgagggctatgagactagcatctcctctaaggttagaaaatggcataggtaggaatgcctagagtaggtcatatccaattaatgtcccctggtaatttttgaaagtcatttaatgttttcagttgatccctacatatggttactttctgtggcacaatgatagtgtcatttactgaagtctccaagtaggagtaaggagtagcagtctgaattttgtcaggagctataattaaaccagcatgagaaatcaaattttgcaagtgatcataacattggagtaatatttctcgagtggggggcagcacaaagtatatcgtccatataatgaataatgtaacactgtgaaaattttttatgagtaggttcaattgtttgccctacataagtctggcaaattgttggactgtttaacatgccttgtggcaacagtttccagtgaaaatgcttagcaggctgcaggttgtttactgcaggaattgtaaatgcaaaccattcacagtcctgctcagctaaggggatagtaaagaaacagtcttttaaatctatgactattaaaggccaattctttggaatcatagcaggagaaggcagtcctggctgcaatgtccccataggttgtataactgaattaatggctcttaagtcagttaacagtctccatgtacctgattttttcttaattataaaaactggagagttccaaggggaaaatgttggagctatgtgtcctttttctaattgttcagtaactaagtcctcttagcctccagtttctctttacttagcagtcattgttctatccaaattggctcatctgttaaccattttaaaggtataggttctggaagcttaacaatggctgccatcaaaaatgatatcctaaaccttggcaggaactttgtctttccgcttgaagtggttccttcaaatcttgcaaattttttcctagtcccataccagggacataccccatttcatgcaccatacgttgactttgagggctatacaattgctctagaattagaacttgtgctatccattgttgtaacaaatctctttcccataaatgtataggtacagaagttataattggttgaatagtcccaggttgtccatcgggcccctcacaatgcaaaatataattactttgatatacttcaggggctttaccaactccaactatgttaaattgagtgggttgaatttgccacgtggacagccagtgctgtagagaaatgattgaaatgtctgctcctgtatctaccaaacctttaaatttctttccctgaatagttatttcacaggtaggatgtttatcagtaatttgattcacccaataagctgctttgtcttgtttatttgtgcttccaaattctcctattcgtttaatttcacttttccccatttccacatacggcacaatcagaagttgtgctatacgctttcctggctctgctttccaaggaaaagaagtaaatataacaatttgaatttccccattgtaatctgaatcaatgactcctgtatgtacttgcactccttttaaatttaaactagatctacctagaagtaatcctatcatccccccggcaagcatccacagacccctattggaactttttgtggggattccccaagcataaggctcacagcttttgtgcagtataaatctactgtggcactactggctgtcgtgggggacagacattgtacaggggtgagggagtgagctataatatttccctgttgatctggggggtatatcctaacagggaactgccaagcctctatatcaccctctcgtctagctggctcaattcctgcctgaatagaactgagagcagtcactcgaggcactgctagaacagtcactggggcaactacttttcacccagtgtcctctggaaaagaaagatctgtagggtcaggtcactctttttcttcaaaataatgagggggtgaagaagagtagggacaaacctcttcctcatttgccgctttagcttcagccagcaaacaaacctgctgtgtcatctcttctgttactttgttatactttccttccttctcatcattagtgtgaaaaggttctaaggtggaacgcaccagagcccacacttgtcccattgttaccctgatgtttccgagctccccttcttactcaccatggggattgcttaagggtactcgggtgtcctccagcttagttccacattctccaaccataactccagcgacccttcaactggggttcaagccccacgttgggcgccacttgccgacaccagctcggtcttggagaccctaacccagcggcgctagaggaattaaagacacacacacagaaatatagagtgtggagtgggaaatcaggggactcacagccttcagagctgaaagccccgaacagagtttgactcacatgtttattgacagcaagccagtgataagcattgtttctaaagattatagattaactaaaagtattccttatgggaaacaaagggatggactgaaacaaagggatgggctctggctagttatctgccacgtccttaaggcacagctcgctcatgctattgtttgtggcttaggaacaccttaagaggttttcccccctgggtgggacaggtgttccttgccctcattccagtaaatccacaaccttcagtgtgtgcatcatggccatcatgaacatgtcacagtgctgcagagattttatttatggccagtttatggccagatttgggggcctgttcccaacagcagattctatgaccacttcagccctgcctttacagtttctgtttacctgtaaactttttcttcctgtggcctagggtagttcaggatcactaaaaatgtgttctgtgatatattaataaaaattcctgaaaaatggacttacagcaaaattgattttggtactcaaataattttgaaaaatattgcatgctatgtctccttcttgtaaggttgcagttcacattagtgtagtaaagcctctgagaagacctgaagtaaggaaatctctttaactttgtttaattcagcatttctgaagtacagttagagacaagcagtcattttttattctcccaaaacagaactgagcacacacctcattcattgtatgtcataaagattatattgctataactttttttgtatagtaacatagctataggccaggcatggcggttcacacctgtaatcccagcacttttggaagccatggcaggaaacttgcttgagcctcaggagtttgaggccagcccaggcaacatagcaagaccccatctctagtaaaaaaaaaaaaaaaagacgaacataggcagcctttgattggaagaaaaaaataagataaacaagcatagatatataggaaaacaacattgcattgtcccatcccaatgcagtcccatatgactccccttagttccaagcaagaagagcacctacctggaccttgtgctctagagtaccttgcatgtcacaaacgtgcacttactgacaaagcccagggcatctctgtcacttaggatccagtgcttggcactagtacagcgtgactggtaaccctaaacatccgttcttgggactaatgctattcaggccccaggaaaatacttctatacttctccacatctcttgccttgtgtcatcaaaagacaattgcatccaaatgcaacgaaagtttgtggacagcgctttggagtactgataggattttggctgcaacgtgcttaggtaaaaggaaaagacaaattttaaaatttgccagattctgccgggcacagtggctcaagcctgtaatcccagcactttgggaggctgaggtgggtggatcatttgaattcaggagtttgagaccaggctggccaacatggttaaaaccctgtctctactaaaaatacaaaaattagtcgggtgtggtagcacatgcttgtaatccccagcgacttgggaggctgagacaggagaattgcttgaacccagaggcggaggttgcagtgagctgtgatcatgccacggctctccagcagcctgggcaacagagtgagaccctgtctcagaaaaaaagaaagaaaagaaagtgttggtcaggcacagtgggtcatgcctataatcccagcactttgggaggcagaggcgggaggatcacttaaacccaggagttcaagaccagcattggcaacatagtgagaccctgtctctatatttaaaactttttttaagtaaaaaaaaaaaaaaaaattaaagtcttgccatgaaaaaacgtcagctcaactaaaaccttgtgcttaggaattctgacacaagcccttatctcattgcaggctgacaacaaagagctcccagaccaggcctcagagcacactttgaatagaattgctttagattagtgatcagcaaacatttttgtaaaggactagatagtaaatatcttaagttttgtaatccacataaggtctctgttacatattcttttaaaaagataactctttaaaactgtaaaagccatactgagggcttaaggggccattcaaaaacaagccataggctgcatttagcccttggctgtagtttgctgctttacttaaaactgttcttagagtacaaattatgtgaacaatcttgattataaaagcataattagtgattttgttgaaataaaagcaagaaaattaaattatgtgggataaatatacgataatttacaaattatatatatgtgtatgtgtctttgtttttttgtttgtttttgagacagagtctcactctgttgcccaggctggagtgcagtgttgtgatcttggctcactgcaacatccgcctcccaagttcaagcaattctcatgcctcagtctctctagtagctgagattacaggcacccactaccatgcccagccaatttttgtattttttgtagaaaggaagtttcaccatgttgaccaggctcatcttgaactcctgatctcaagtgatctgcccaccttggcctcccaaagtgctggaattatagccgtgagccactgcacccagtcaagtggtggtttttttgaacaactaagagtaggcaacatatcaaagcaatggaatttatttatttgtttattattattattattattttgagacagagttttgctcttgtcacccagactggagtgcaatggcgcgatctcgactcactacaacctccgcctccgacattcaagcgattctcttgcctcagcctcctgagtagctgggattacaggcatgtgccaccacacccggctaattttgtatttttagtagagacagggtttctccatgttggtctcaaactcccgacctcaggtgatccgcccacctcagcctctcaaagtgctgggattacaggaatgagccaccatgcccagccaatttaattattattattatacataccttggtgttcagttgatggattgttgatgtttggacgagtaagaacaaatggctcagtgcggtggctcacacctgtaatcccagcagtttgggaggctgaggcgggctgatcacctgaggtcaggagttggaaaccagcctggccaacatggtga

SEQ ID NO: 670 - DNA, 1538 bp, Homo sapiens
gggcggcgggattcgggatgacttcgggcggctcgagatttctgtggctcctcaagatattggtcataatcctggtacttggcattgttggatttatgttcggaagcatgttccttcaagcagtgttcagcagccccaagccagaactcccaagtcctgccccgggtgtccagaagctgaagcttctgcctgaggaacgtctcaggaacctcttttcctacgatggaatctggctgttcccgaaaaatcagtgcaaatgtgaagccaacaaagagcagggaggttacaactttcaggatgcctatggccagagcgacctcccagcggtgaaagcgaggagacaggctgaatttgaacactttcagaggagagaagggctgccccgcccactgcccctgctggtccagcccaacctcccctttgggtacccagtccacggagtggaggtgatgcccctgcacacggttcccatcccaggcctccagtttgaaggacccgatgcccccgtctatgaggtcaccctgacagcttctctggggacactgaacacccttgctgatgtcccagacagtgtggtgcagggcagaggccagaagcagctgatcatttctaccagtgaccggaagctgttgaagttcattcttcagcacgtgacatacaccagcacggggtaccagcaccagaaggtagacatagtgagtctggagtccaggtcctcagtggccaagtttccagtgaccatccgccatcctgtcatacccaagctatacgaccctggaccagagaggaagctcagaaacctggttaccattgctaccaagactttcctccgcccccacaagctcatgatcatgctccggagtattcgagagtattacccagacttgaccgtaatagtggctgatgacagccagaagcccctggaaattaaagacaaccacgtggagtattacactatgccctttgggaagggttggtttgctggtaggaacctggccatatctcaggtcaccaccaaatacgttctctgggtggacgatgattttctcttcaacgaggagaccaagattgaggtgctggtggatgtcctggagaaaacagaactggacgtggtaggcggcagtgtgctgggaaatgtgttccagtttaagttgttgctggaacagagtgagaatggggcctgccttcacaagaggatgggatttttccaacccctggatggcttccccagctgcgtggtgaccagtggcgtggtcaacttcttcctggcccacacggagcgactccaaagagttggctttgatccccgcctgcaacgagtggctcactcagaattcttcattgatgggctagggaccctactcgtggggtcatgcccagaagtgattataggtcaccagtctcggtctccagtggtggactcagaactggctgccctagagaagacctacaatacataccggtccaacaccctcacccgggtccagttcaagctggccctccactacttcaagaaccatctccaatgtgccgcataa

SEQ ID NO: 671 - protein, 504 aa, Homo sapiens
MTSGGSRFLWLLKILVIILVLGIVGFMFGSMFLQAVFSSPKPELPSPAPGVQKLKLLPEERLRNLFSYDGIWLFPKNQCKCEANKEQGGYNFQDAYGQSDLPAVKARRQAEFEHFQRREGLPRPLPLLVQPNLPFGYPVHGVEVMPLHTVPIPGLQFEGPDAPVYEVTLTASLGTLNTLADVPDSVVQGRGQKQLIISTSDRKLLKFILQHVTYTSTGYQHQKVDIVSLESRSSVAKFPVTIRHPVIPKLYDPGPERKLRNLVTIATKTFLRPHKLMIMLRSIREYYPDLTVIVADDSQKPLEIKDNHVEYYTMPFGKGWFAGRNLAISQVTTKYVLWVDDDFLFNEETKIEVLVDVLEKTELDVVGGSVLGNVFQFKLLLEQSENGACLHKRMGFFQPLDGFPSCVVTSGVVNFFLAHTERLQRVGFDPRLQRVAHSEFFIDGLGTLLVGSCPEVIIGHQSRSPVVDSELAALEKTYNYSNTLTRVQFKLALHYFKNHLQCAA

SEQ ID NO: 672 - DNA, 1284 bp, Homo sapiens
ggcggggcagtcggcggcctggctgctaggctccgtgacatccggcagtctgagggcggcgggattcgggatgacttcgggcggatattggtcataatcctggtacttggcattgttggatttatgttcggaagcatgttccttcaagcagtgttcagcagccccaagccagaactcccaagtcctgccccgggtgtccagaagctgaagcttctgcctgaggaacgtctcaggaacctcttttcctacgatggaatctggctgttcccgaaaaatcagtgcaaatgtgaagccaacaaagagcagggaggttacaactttcaggatgcctatggccagagcgacctcccagcggtgaaagcgaggagacaggctgaatttgaacactttcagaggagagaagggctgccccgcccactgcccctgctggtccagcccaacctcccctttgggtacccagtccacggagtggaggtgatgcccctgcacacggttcccatcccaggcctccagtttgaaggacccgatgcccccgtctatgagcccctctttgcacttggtgtcctgtcctcattccctcaactgtggctgctctcagcctttgacggagcccctgtccagattcaagccttgggagtggctggagttccagagaggacttcccagaccacactgaagaatgggacccactggctgctgctgcttctggtgcaagaggaagcggccactacagccatgggctctggcactgcgtggcctctgtcagggttagggctggcaggacagacggtgcttgtgccctgccttcctttccccactttatgcagctccacatcaagatcttatggtgctatatctgatcagtgggatgcaaattgtgcccagaaccctaaccaagaggaatctgggaagtgtggttttagttttcccacctttacatgttggtcagaggtcaccctgacagcttctctggggacactgaacacccttgctgatgtcccagacagtgtggtgcagggcagaggccagaagcagctgatcatttctaccagtgaccggaagctgttgaagttcattcttcagcacgtgacatacaccagcacggggtaccagcaccagaagtactatccccacattgccattgaccccatagagccactcgaggagagaacaaatcatgctgtgcgctttgcacctgtgagtctggagtccaggtcctcagtggccaagtttccagtgaccatccgccatcctgtcatacccaagctatacgaccctggacca

SEQ ID NO: 673 - protein, 387 aa, Homo sapiens
MFGSMFLQAVFSSPKPELPSPAPGVQKLKLLPEERLRNLFSYDGIWLFPKNQCKCEANKEQGGYNFQDAYGQSDLPAVKARRQAEFEHFQRREGLPRPLPLLVQPNLPFGYPVHGVEVMPLHTVPIPGLQFEGPDAPVYEPLFALGVLSSFPQLWLLSAFDGAPVQIQALGVAGVPERTSQTTLKNGTHWLLLLLVQEEAATTAMGSGTAWPLSGLGLAGQTVLVPCLPFPTLCSSTSRSYGAISDQWDANCAQNPNQEESGKCGFSFPTFTCWSEVTLTASLGTLNTLADVPDSVVQGRGQKQLIISTSDRKLLKFILQHVTYTSTGYQHQKYYPHIAIDPIEPLEERTNHAVRFAPVSLESRSSVAKFPVTIRHPVIPKLYDPGP

SEQ ID NO: 674 - DNA, 971 bp, Homo sapiens
gggcggcgggattcgggatgacttcgggcggctcgagatttctgtggctcctcaagatattggtcataatcctggtacttggcattgttggatttatgttcggaagcatgttccttcaagcagtgttcagcagccccaagccagaactcccaagtcctgccccgggtgtccagaagctgaagcttctgcctgaggaacgtctcaggaacctcttttcctacgatggaatctggctgttcccgaaaaatcagtgcaaatgtgaagccaacaaagagcagggaggttacaactttcaggatgcctatggccagagcgacctcccagcggtgaaagcgaggagacaggctgaatttgaacactttcagaggagagaagggctgccccgcccactgcccctgctggtccagcccaacctcccctttgggtacccagtccacggagtggaggtgatgcccctgcacacggttcccatcccaggcctccagtttgaaggacccgatgcccccgtctatgaggtcaccctgacagcttctctggggacactgaacacccttgctgatgtcccagacagtgtggtgcagggcagaggccagaagcagctgatcatttctaccagtgaccggaagctgttgaagttcattcttcagcacgtgacatacaccagcacggggtaccagcaccagaaggtagacatagtgagtctggagtccaggtcctcagtggccaagtttccagtgaccatccgccatcctgtcatacccaagctatacgaccctggaccagagaggaagctcagaaacctggttaccattgctaccaagactttcctccgcccccacaagctcatgatcatgctccggagtattcgagagtattacccagacttgaccgtaatagtggctgatgacagccagaagcccctggaaattaaagacaaccacgtggagtattacactatgccctttgggaag

SEQ ID NO: 675 - protein, 318 aa, Homo sapiens
MTSGGSRFLWLLKILVIILVLGIVGFMFGSMFLQAVFSSPKPELPSPAPGVQKLKLLPEERLRNLFSYDGIWLFPKNQCKCEANKEQGGYNFQDAYGQSDLPAVKARRQAEFEHFQRREGLPRPLPLLVQPNLPFGYPVHGVEVMPLHTVPIPGLQFEGPDAPVYEVTLTASLGTLNTLADVPDSVVQGRGQKQLIISTSDRKLLKFILQHVTYTSTGYQHQKVDIVSLESRSSVAKFPVTIRHPVIPKLYDPGPERKLRNLVTIATKTFLRPHKLMIMLRSIREYYPDLTVIVADDSQKPLEIKDNHVEYYTMPFGK

SEQ ID NO: 676 - DNA, 1566 bp, Homo sapiens
ggcggggcagtcggcggcctggctgctaggctccgtgacatccggcagtctgagggcggcgggattcgggatgacttcgggcggatattggtcataatcctggtacttggcattgttggatttatgttcggaagcatgttccttcaagcagtgttcagcagccccaagccagaactcccaagtcctgccccgggtgtccagaagctgaagcttctgcctgaggaacgtctcaggaacctcttttcctacgatggaatctggctgttcccgaaaaatcagtgcaaatgtgaagccaacaaagagcagggaggttacaactttcaggatgcctatggccagagcgacctcccagcggtgaaagcgaggagacaggctgaatttgaacactttcagaggagagaagggctgccccgcccactgcccctgctggtccagcccaacctcccctttgggtacccagtccacggagtggaggtgatgcccctgcacacggttcccatcccaggcctccagtttgaaggacccgatgcccccgtctatgaggtcaccctgacagcttctctggggacactgaacacccttgctgatgtcccagacagtgtggtgcagggcagaggccagaagcagctgatcatttctaccagtgaccggaagctgttgaagttcattcttcagcacgtgacatacaccagcacggggtaccagcaccagaaggtagacatagtgagtctggagtccaggtcctcagtggccaagtttccagtgaccatccgccatcctgtcatacccaagctatacgaccctggaccagagaggaagctcagaaacctggttaccattgctaccaagactttcctccgcccccacaagctcatgatcatgctccggagtattcgagagtattacccagacttgaccgtaatagtggctgatgacagccagaagcccctggaaattaaagacaaccacgtggagtattacactatgccctttgggaagggttggtttgctggtaggaacctggccatatctcaggtcaccaccaaatacgttctctgggtggacgatgattttctcttcaacgaggagaccaagattgaggtgctggtggatgtcctggagaaaacagaactggacgtggtaggcggcagtgtgctgggaaatgtgttccagtttaagttgttgctggaacagagtgagaatggggcctgccttcacaagaggatgggatttttccaacccctggatggcttccccagctgcgtggtgaccagtggcgtggtcaacttcttcctggcccacacggagcgactccaaagagttggctttgatccccgcctgcaacgagtggctcactcagaattcttcattgatgggctagggaccctactcgtggggtcatgcccagaagtgattataggtcaccagtctcggtctccagtggtggactcagaactggctgccctagagaagacctacaatacataccggtccaacaccctcacccgggtccagttcaagctggccctccactacttcaagaaccatctccaatgtgccgcataa

SEQ ID NO: 677 - protein, 478 aa, Homo sapiens
MFGSMFLQAVFSSPKPELPSPAPGVQKLKLLPEERLRNLFSYDGIWLFPKNQCKCEANKEQGGYNFQDAYGQSDLPAVKARRQAEFEHFQRREGLPRPLPLLVQPNLPFGYPVHGVEVMPLHTVPIPGLQFEGPDAPVYEVTLTASLGTLNTLADVPDSVVQGRGQKQLIISTSDRKLLKFILQHVTYTSTGYQHQKVDIVSLESRSSVAKFPVTIRHPVIPKLYDPGPERKLRNLVTIATKTFLRPHKLMIMLRSIREYYPDLTVIVADDSQKPLEIKDNHVEYYTMPFGKGWFAGRNLAISQVTTKYVLWVDDDFLFNEETKIEVLVDVLEKTELDVVGGSVLGNVFQFKLLLEQSENGACLHKRMGFFQPLDGFPSCVVTSGVVNFFLAHTERLQRVGFDPRLQRVAHSEFFIDGLGTLLVGSCPEVIIGHQSRSPVVDSELAALEKTYNYSNTLTRVQFKLALHYFKNHLQCAA

SEQ ID NO: 678 - DNA, 71646 bp, Mus musculus
  misc_feature (1)...(71646): n = A,T,C or G
acacaacacacacacacacacacacacacacacacatacacacacacgtttctgaatgttaaggcattttagcacagtcttccaaatccatgccgctggtgaagagacctttttcctcatatgtctatcttgggttaccccatcaagatccatgccaattccttcagcaaaaataaatagatccactctcttgatggatcagaacaccacctgagccactttatttatgggcaggagtcactttgaaaaccaccagtcaaccaagggactgccactcaaatagagacctgttgctcacccagatctgggctctgccaactctcctgctcttccctggagcctccacttcctcggcctcatccccatctcatcatctggcagaacctgtctggtttttaccataagtaacaggctgtcttctcacctccacaggctgatgaggtctacaaagagctgagctgcaggaagcctaaatgcagcagggatgtctgggtgctgagatctgatgatccccattcaaggggctccatgatagtcttggatacatcattagaacctcggaaggcaacacgagcttttctgaaccctgacacacttgctcaacttgttcctggcagagccagtgttcaaaccgagggctatctgctgaaaccatggtgttcttgccaccagcgctagtgatgaaccaagcgtgaccgtactcctcttggcaaaggctctgctgggggtggggtggagcagttagatctgggaacaaggaggatttgatcgtggcagagtagggttggcaaggctctgtaagtggctctgaaatgggctgtcagactgtggaaagtaccggctaacaactctgcaggcagctcctgtcaggagtaagcactgagattcactgggtcaaattaagtgagccgccattgccggttgcttaaacttagaagtgggcgcatgcctttaatcccagcacttgggaggcagaggcaggtgaatttctgagtttgaggccagtctggtctatggagtgagttccaggacagccagggctacacagagaaaccctgtctccaaaaacaaaacaaaacaaacttagaagtgaccttccaatatggtaagccaccaaaatctgcctgccatctaccttccgacgatcttagttcagagttgctctctgagatttctagcgaagaggcactcctgcgggctctaagctcagcctgcacagggagcagggccatatccgcctctccatttacccttggtatctggcctcggggaatactagtgtggcgtaaggaacacaggtttcaggcacttagtcagttttgttctctagctctgcagccttaggaaggtggttgtgctgtcgtcatcagcttccatttcttctgctacaacgtaaagatggtcctacgtctaccatagtagttattttctgtcgctgtgattaaataccatgagcaaagtaatggatagaaggaagggtttactgtggcttgcagttccagtggataagtcaccatcactgtggtgaagggagagcagggggcaggcaggcatggtggctggagcagcagaggacaagtcaccagcactgtggtgaagcaatggcacatggctttcgaaagcccactgctttcctcccagatcggtggtacattcccgcaggtctctatgtaaacgcttctgcatcagggtggcccactctaatccttcactccacaactctgcattactctggatgctgctggcctgttctgtgtgcttctgttctgagaccctcttagcatgtgagctcccagatctagccctttagagagtgccttaatcagggtttctattcctgcacaaatatcatgaccaagaagcaagttggagaggaaagggtttattcagcttatacttccatactgctgttcatcaccaagggaaataaggactggaactcaagcaggtcaggaagcaggagctgatgcagaggccatggagggatgttctttactggcttgcctcctctggcttgctcagcctgctctcttatagaacccaagactaccagcccagagatggtcccacccaccaggggcctttcctccttgatcactaattgagaaaatgccttacagttggatctcatggaggcatctccccaactgaagctcctttctctgtgataactccagcctgtgtcaagttgacaccccaaaccagctagtacagagagagtgtattgttaaattaattactaaagaacaggttaataaacgaagcctatgacctctaatctcttactttatgcctttttccccattttcaacttagtctactcctgactggaaggatttttgttttgttttgcctatcttaatgcacacatatgctgccggtgtgcaggtagtaggtggcgtcagccgcccagagctggagttagaatcagttgtgagccagaaccccacctccccactgtgggttctggaaatagaaccccactaagtggtgctttaaaaatatcagttacttagaataattctgtatgcaaggaaacaagttattgcacaatctgtgtaattaaatggaattttttcatcaatccaaagttttcaaaaagggcatctgcttctcttgctccagatttgtgtgtgtgtgtgtgcatatttgtgtgtgtgtgcgtatttgtgtgtgtgtgtatatttgtgtgtgtgtgcatatttgtgtgtgtgtattttgtgtgtgtgtatttgtgtgtgtgtgtatttgtgtgtgtgtgcgtatttgtgtgtgtgtgtgtgtgtgtgtgtgtgtgtattatcattggggagaaactttgccctgtaggctacgtgttctcaaacacttcaaagcctaaaacaacggatgaaatgctggccatattgagcctgaggtttgcagactcattccaccagagtctacagggtgggagccccagggattacagaacccctggaaaggcagcatgggctgacaggtttatgacattttctgtgtcttcagtgactgtttctcagtgttggtcaggctctcctttctcacagccaggatcacagtatgtgaaattacaggtgacaagggcaggcagggccctttaccgttctgccttgtggggtctggatcaccatcaaactttccatggtttaggaacagaagttctaaggctttgccaaatgcaaccacatgctcttgagctacgatttgaaagtgaccttgggacaagttaaactaaatggattttccctacatcacccagtcgcttgaaacacaaggggaatgagctcttggaaggagagactggagtggggagaaagttggggtaaagcaggggtcaaaggtcagaatcatcagtcccagatgttataaaccattcaggatctcctgtgacattcctacatccctacccggatgcagtcctccatctccagaacagaaccattcctgggctctcagcacttctgaatctggtttctagtaaaggtttatccatgtttcatggctccaacgtgtacttcagaagaccggaaagcaaggctgtattaggcagacctcaggagctaggctctccagaatcgctgtgcctgccacacacagacttgactctcagccgccattgctggggtttttctggcttacacagtgaaggtccagtccatcatggtagtgaaggcatagaactaaataaaaacgggtttgagtgacagatacatttagaggtataggtggtcagaaggcatctttactgcaggagttctccttctgagggcataggacaggcagcgattctcaatgtgagaacgcctctgcttttttactttattatcattttaaagtttttatgattgtgtagtacatgatgtataggtaggtagatacatatccacgtacatatacaccagtgcaacacaatatataggtgtctgcaggtcacgggtgcacgtggaggtcagaggacacattcttggtggcgctgattctctccttccacttctctgtggagtttgaggaacttggggattgcgtttgtgtaacaaatgcttaacttgctgagccatcttgctggccctcctctgcctcttaaacggcatcttttagaatgagttcccacccagcacagcctaggaaatacagtactggggaagagcgttggtactgttgtgactgagctccggtggtgtgaatcttccccccggggggggnnnnnnnnnnnnnnnnnnnnnnnnnnnnnnnnnnnnnnnnnnnnnnnnnnnnnnnnnnnnnnnnnnnnnnnnnnnnnnnnnnnnnnnnnnnnnnnnnnnnnnnnnnnnnnnnnnnnnnnnnnnnnnnnnnnnnnnnnnnnnnnnnnnnnnnnncccttctcctcctcctcagctgtaactgcaggcggcagcggcctgcatgtgtttgattttgtctgagctcccgggctttccaaccaaacagccctttatgttaggaggctccatcctatatagttctggacttgatttaagatgaagtttccagaggacagactgaggcttcctgaggcttctcactgcccagttccgtgtcttgcctgctggtgcactgacagaggtcgctgggacctctgtggaactgaaccgctgttaattgtgagccagaaagactagccttggagctgtgtgtatatgccagtgccgatcactaactttgtctgtccctgtggcgtgtagacgaacgacttgagacatgcagaagaaatgctgtttttctttcttctttactcctcagttggatagactttaattgcttaatttaaaatggaagtttaaaattttgtaagactttgggctggagagttgactcagtggtctcgcaagggacctggcttccattcccagcacccacatgcagaggctcactacttccttaggcaccaggcatgcatgtggtgcacagacatacattcaggcaaagcacacaaatgcacaaataaaataatgtcaaaaaacaaacaaaaaacaaaaacaaacaaacaaacaaaaacaaaaaaccaccaggtagtggagcctttaatcccagcattctggaggtagaggcaggtggatatttgtaagttcaaggctagtctgatctacagagtgagttccaggatagccagtgctattacacagagaaaccctatcccaaaaaactgaaacaaaaatttttttttgtaaaaactttacataatacaactgtttataagattaaaaaggaagtctctagtgagatgtgtaacattctagatctttctatttgcatatataaataataaagttttcccgactgttcagtagttgaaggaatggctgaaaagagtgtatggcatatggagaagagagtaaggcatgctgctacaacctgttagactccacaacggtccacggacggcctctcatgtcagcactcggatctgaactagattcttaaaaatatgtattgacttacctaggtatttattctgtgtgcatgtgtgtgagtatgtctgtgcatgagtatatgcacatgtatgagtgtgcgtgcatgtgtgtgaatatgtgcacatgtatgtgaatgtgcatgtatgtgcatgtgtgtgtacacatgtgtgtgagtgtgcatgtgtgtgagagtgcatgtatgtgagtgtgcatgtatgtgcatgtgtgtgtgtgagtgggtacacatgtgtgtgagcgtgcatgtgtgtgagcatgcatgtatgtgagtgtgcatgtatgtgcatgtgtgtgtgtgagagtgggtacacatgtgtgtgagcgtgcatgtgtgtgagcgtgcatgtatgtgagtgtgcatgtatgtgcatgtgtgtgtgtgagtgggtacacatgtgtgtgagcgtgcatgtgagtgtgcatgtatgtgcatgtgtgtgtttgagtgggtacacatgtgtgtgagcatgcatgtgtgtgagcgtgcatgtgtgtgagcatgcatgtatgtgagtgtgcatgtatgtgcatgtgtgtgtgtgtgtgtgtgagtgggtgcacatgtgtgtgagcgtgcatgtgtgtgagcatgcatgtgtgtgagcgtgcattgtgtgagcgtgcatgtatgtgagtgtgcatgtatgtgcatgtgtgtgcgtgtgtgtgagtgggtgcatatgtgtgtgagtgtgcatgtgtgtgaatatgtacacatgtatgtgagtgtgcatgtatgtgcatgtatgtgtgtgagtgggtgcacatgtgtttgagcgtgcatgtatgtgagtgtgcatgtatgtgcatgtgtgtgcgcgtgtgtgtgagtgggtggacatgtgtgtgagcatgcatgtgtgtgggcacgtgcatgagtgtgggtgtgccacagcacacataaggaagtgagagaacaaccttttgggagatggttgtctcctttcaccctgtggatcctaggaatcaaactcaggtcatcaggcttggtggcaagagaccttacccacctagccatctcatggctgcaacatgtcttcctgtctgttgttatgcatgatttgtgcttctaatcataatttaaggttaatcttaattgttaattgatgggatttagagtcaactaagagatacatctctgaacgtgtttatgagagtagttccagggtgtttagttcctcaccttgtgagggcctccatgcactggctggggtcctgcactgaatataaaggagaaacccctagaggaccagcatccatctctctctgcttcctgacagccgatgccgtgtgacctcatgctccaactgccgtgccttccccatggtgaactgtaccatcaaatggtgagccacaatgagcctctttaagctgcttctgtcaagtatttatcacagcaacaaggaaagcaggaaagtaatgcactaaggttcgtctcgataacgactttaattcctatatttatgtctgtagtttattttgaactgatattttaatattagtcttgctaaccatagcctgtgatcctcctgtccagccttccaagaactgtgattataggcatgtccacttgaactaattattttttattatagttagttattcatttattttttaaagatctatttatttattttattatacatgtgagtacactaccactctcttcaaacgtatcagaagagggcatcagatcccattacagatggttgtgagccaccatgtggttgctgggactctggaagggcagtcaatactcttaaccagtataccatctctccaacccctatttattcatttattgtgtgtgttatttgtgtatgtgtgcatgtgtctggtgggaacatggcagggtgtacacaggcacatgtggagtcagaggttgacactgtcttcctcacctttccatcttagtctttttagaaagagtctctcactgaacccagatctcatcgcattggctacactgttggcttgcaagcccctgagatccaccactcccagccctagatttacatgtgtgtgtcacccggtctggtttttacataggttctgaggattcacgttagagcaccttactgagccttctgtctatctccttgtcttagttagggttttactgttgtgagcagacacaataaccaaggcaagtcttataagaacaacatttaattggggctgacttacaagttcagaggttcagtccattatcatcaaggtgggagcatggtagcatccaggcaggcatggtgcaggaggaactgagagttctacatcttcatctgaaggctgctaggagaatactggcttccaggcagctaggatgagggtcttaagcccatgcccacagtgacacacctactccaacaaggtcacacatcctaatcgtgccactcctcgggccaagcatattcaaaccccaaactcctgaactaattcttatgagtaggataaagtaagaaagggttcatctttgtttctgttttgtatgttgaagttccatcttttttctagcaccacttggtacaaagactttcacaatttttttttctatgctagagtgctctgccactgaggtatatttccatcctagattctttttcaatgattgcataccatgggctattgtttccattctgaggaacaatgtatattcttgaacctagaccactgagcagttggctgtttctgacagttcctcagtcaggtgatacctgtgtttaacaggagttattctccagccaacattcctacctgaaacctataagaggcaggctctgattggcttcgttgatgtgagcctttctcaaatgctaggtgacttccttatggacacagagcctcaattcctagattctgcaggagtccgtccttctaggagggtctgaataagatgattatttctgccttggttagttgggatatcaccattaaaaagaggctcataaaatacactggaaattccctaagaattccttaaagagttcaggcttgtaggcacgtctctgtggggccccaaagggcagctgttctggtggtgactgcatcatctttttatcaatcatatcagttagctatttctgcatctttttctggcacatgagtgacacacacacctggcggtgtaaggtatttgggtgggtatctttgtacccaccatccacagctctgtggattccatgatgctgtctctaagttcaagtttgagtacaattcattccacactatctcttttaacctttccaacaaccctgcagagggaattctctctgtctctcagatgatacagcaaaggcgtacgggggtcagacaatttgtcttctgccacttggagctggatcagggccaagtctaattctgagctgcagagtgtggtatcgtcatactctctgccccagcctcaattcaccttgcctaagaggagcaccaggactcaccagatctgtgaaaccttcccaatgagtctcttacataaattaaagctaatcaaacaactctatggagtagaattttaattgcctgatttttttaaagctaatgatcactataagagtctttacaaactcttttaagaatatttttgggtttttaacttaattttacaattatgtctatggggggctagggtatgggggtggggtacgttcacatgagtgcaggtgctctggagaccagacacatcagatcttctgagcgggagccacaggcagttgtgagctacacagcacgggtgctgggactaaacttttgcctggacatgctcctaactgccaagacatctccagcccctggaattatttttgtctcaggagattttgtctaacggagattaagttgatgatgctgttgctccgagaaaaatcccatattgaatggtccactcgaatgtgcttttactgctcccatctgctttcttttgcatgaggttaaagggttgcagtttctgggggtgggggtggaggtgggggtgggggctggaagtaggggatcttttcatagcaacagctgtttggaattgcaagttccccagcagaaagtcccagctcgacttgcacttttttctggtgggtgagactgtcccaagccaggagcttgtcctccgggagggcagtttataccagagacttgattagtgctagggcaggacacctgtgttccaagtctactgctgatggtgggtaatagagcaagagacccatctgcccttgagggtggtgacaggtaaacttcggagacttggctgtcctctttctcatctgttccatagctgcttaccttagtctcaaaaaaaaaaaaaattctgacatcttaattttaatgtgggcatttgacccagtgcctgagataaatataaccctgtggagtacagagaaggtttaatgggacatggctggcattctttcttgataaaggcatggagaaaagagagggagggagagagggagggaggcaagcaaggaggaagtcgaggagagagagagggagagagagagagagagagagagagagagagagagagagagagagagagagagagagagctggcagtcaggacaaagctgagctaggagaggctcccagcagccttgccctctgacttgatattaaccagacctggccagcatggtggtcctgaatccaatgactttgggaatttatctccaactcttcttctgctccatcgtgtctcagccaactttcatcaacagtgtggtcccaatctcagcaggtaactgatgaccgagactttcctcgcttccgtctgcaggggcagaaggggggtgggggactcaagatggtcttgcaatatgtcctgatctttttgccaatctgctgttagcagaggaaggctctggggcgatggtctgtcccccaaggtgcttcctgtcacccgagcttgtctccaaaggcccttctgtcctccttccaaccgtcactactcagctgctcaaagccagactctgagccgttgcttctgtgtccctgtctctgctgctcatttactgcatgaatcattttggtcagggaattgggagctggggatggaaaagtctaagttctagagaagtgagaacttctgtaaggtgtttctataaatctgtctctaacctcctccctgtgtggcgtacctcaggatgctgtgaagcaaatattgctctgtcaaccttgctgaagggcaggggattctgcctggccactgtcagcagggcttgctgtttcctcagccctggttgctctcgtgttgggctctcttctcttcagctctgacaacccatctagaggtgctaaaggaatgatgagggcttccagagggtcagtggacctggaaccagatgtgtcttgcttgctgagtgcagggctgggagattgaagaagccttgcctagttggccagccaggcaacattttctgcaggcaccaccgggctgttgcccttgtcctgcctgacctggtacaggggaagtattgggttactgacatagccttttcaaacctttctgaggaaatctaaatatctccagagggtctgaggaagcaagcagaccccagggcttgctacttccttcacaccctcctcagttcatctcagcccctgctctaaggcacccttagtccttattttctaagcaccgaagctgattctgtgtctttgcctatgaaacccagagagagcatttctccagactcaccacccacctctctccattcataaaaaacagctcccgggcaagccgtgctgccaaactgcaggccctaagggagtggcagggagattgctgtgaggctaattataaaagtgtgagaaacagaagaagcagggaagagacatgaagaagagagagccagagagagtaccaggggaggcagaagaagcaggtggttgtatcgccaagagtgtgtgtcagcagcacgtctctcacgaggtcatctagtctgagggtcattattctctgacccactgggaagtttggtagccgagcacggtgtcacccgcctgggactgttcttgggacgctgaggcagggtggtgtgtttaagactgacctgggttacatagtgagcccctgtttcaaaaatcccaacaggacttggtagctaatttggtctgacctagtgtatgcttctgtgttatatttgggttatagatttctttgggaatctgctgaagactcgaaagaattagggaaacttgcttctctggtttcagctctgcctctaatgagcagtccgacttcctggagaccattgggtatagaccgtgcgtgcaccatgggggcagggatcgtgtcatcttgtgtgcctgtcactctagatgtttccagtgtcagacagtgctggatctgtagatgctcagtagctacttcttgagtaaaagaacaaaaaaaacctttgcatctgtagagtgtgtgtgggtgggcggggcatccacatgctcgctcaggagagaacctgcacgatgtagacctctcttagagaagggtttttgaaggtcgtactggtctgggcaccacagtgacaggatgcagcttagatgtgcccaatgtaaagacttgagtgaagggctcactttcagaggcgcggggtcaaggacaactgtgatgtcgagggacacagggatttctgactggagaaagactttacccctctatgcttgagaaggcgggaaaaggaagtgggggaaaatagatcccccgagccttggtggcctgcaggagaggactgcaagcataagtgatgtcacacagggacccagagcagggaggcgggaactctccgacctctttcctcccatcacaaccacctattgtagagcctcccactggccaaacccaaccccaagccaaagccttgtagtatggagctccttgaagcagaccgtgggatcgatgggtaggcctcccgtgtactggggtttcctgttcatgggactagggccttgaacaagtcatgcaagtacttcatcacagagctacaccccagccacacaaggccctctagatgcatcactaaccctggatctggtgattgggaatgtaggctttgggcatttggccaaacagtggggtcaaccagagaaaccattaccagtctggggtttcctgtgggagtcacttcactttgtccccacatccaaaagcatcatctgaaatgaattcaggccttggaatgaagctgttccctgagtcaggaccataggggtcctttaaatacttaccaacaatctgattccatctgacctcctctactctaagctttgtggattctcaccattttgaagaaggtaagccgtgcagatgccgaaacacagccaccaggaaaaccatttctcacagcctactggaccttaagagagtctgctgtgtgcctgactgtgtgtgcctggcggggtataaagtgcttcagggtttcgctggggcaagtaggatgcagcccctgttctggaggattgtgctggctgggagtcctccaggattttggtggagcaaggtctctaaaaggcatgcaggaagagcttgcccacatggggggtgggcacaacatggaacaggggggaacagatgtgggggatggcccttccttttcttcaggaaggaccccactcctgaaccaccagtagcccccacctctgactcaggtgtatattacctgacagcctccagggcagcagaggagagagcctggcagggagcagaaagcaccaaagaggccaaacttgtgacgtaatatggtaaagaactgtggaatgattttgagaccacaaagagtggctgaggggaatgagaggaactgtttctcgccatgatgatcactaacggtccagtgaacactgaagaactgttgagcttccaaaggtagcaaagtgacagatacaactcagaacggtttctggtaaaagtgccaggagcttagagtgcctcgccgtagccgttcgctggggaataaacttaccctccaacacttaaagctagaatcatttattgctgaagttcatgttctgtgggtcacctaaaggtcacctcatctgatatgctatgggctgaccctgtctgcgctctgtctgggtctatagcccgacttggtgctggtgtccacttatggttagaattcaatagttgcggcttctagaaggataaaacatagacccataggcaatatttctggaggaacagatgtatgtgatgtatgtgatagtcacacacctggggtgggagtggagcaacactcttgcttctttgaaaaagattcctaggcacagagagattagttagataactcacccaaggccacatagctgggttgtgggagatctggagactggaatcctggctctaagtccagggcttctagcaatgtaaacggaatctgcttcaggcctggataaatgtataagtggacttttcagaactgcaaggccgccctccatctatggaaactctcctctatgttcttcatcgtcccttccctcccaccttgtcctctagtggtcagtacccagagttgcaacaaacaattgaatactgacttaggtggttattactgctgttggcttttgatctccttaaattgtccatgcagccttgaactcactacccagcacagagtggcctaggtatgtcaccaccctatcttagccttcttgcccatgtgctaggattccagacacacccctctatgctcagctcggcattgctgcataagtgtgtgcatgacttccccagccacggcttgatctcgctgatatttttgttactgggaacctaaaagtcagaatgagtcagggtgttttggaggatgggaacctccttgtaaccaaggcaacttccacaaaccttttcaggcccgtgagccatcctaccctctgcctacatggacatatgttcctcttccataaagcgtttcccagccaggcaggaaggcaagcaggaactctccagagcaattgtggatccaaatttcagaatccagatcaggaatagacacaaatctgtcacagtagagtgtggccacacggaaggatgtgattctgtgtgggtgctggaatcctcgctgttacttctgtggtctatacaatgtccagctatatacaccctgctgcctggaagtcagccagaccaccatttggggaccgtccagatttttggcactagatcacaggtcatttatctgtgtctgatgctgatcagctattgtttaatgtcccataatgcacttgcaagccatctcctctcatttagcttcccatatttcctctcgataataatatcagagagcgttcttaagttacagggctctctaggaggtctcaggcatctgccacccccatcccaaacctctatagaagcaggggccttctcactccccagctctataaaaacatgtctgccctgggaggtggaaggctctcctttggctatcctgacctccccctctacccctctccattacctttcgggatacccaggcctgccttcctctggtgcataatcacacaaagcaacagaactgctttggagactgagagtctctgacttccatgtgacacacaagatgctggtgactggccttccttaagtgcttctaatgcccatgagtactgcccatgactgttaccaatgcccatgtcccagacctctctattacagagttctccgagagctacaacagtacctgctctttacagcatcccccacagtgaagggtcctgggtttgagctctgaccatcatggttatgaactgagctgtgatgggagtggacttcactggggtgagcctcaaattcctgtctgtaaaatgggcagagcagtctctgtcccacagacatactctgggagaatgtattcattcaactaaattccagtgagagtcaaccatgtgcctacacagacacaattatcccacccaaaggaagcttctgtcagccatctgtgagaacttctcctggatgacttgctggtcactgctcgtcactgctggtgactgccttcatgctttggaccatggagagaacagggttaaattgctttaattgataatgattaaaatgtggatggttttatattttaatatatgtctggcatcttttcaaaacaaatctcttgggatgctgaccgacctggtagtcctgatccctccttttgggatggcacatcgaccatgtgtagaatctgctcccgatcatccagagtctccatttcctcctgcctcacacctgcctcacacctgccttgcacctgcctcacacctgcctcttacctgcctcacacctgcctcgcacctgcctcacacctgcttcattcttttaattatatctgcttctttgggcccctctgggcatgtgactgtaagccccggagctagaagcccagctggcctttccctccctttgcagcctccagcttttctaggtttccaaaggtctgcacagctgaactggagggcagcagtccacagcagtaacccccataacatagtctaggctgggttctaggtgctaagtcccctagcatgggcagcatttcaagttcccctggtgatcagaaggtttagctgttgctaaccattgtactatacccaaaatcagaatcagtgaggggctcgctaaaacaaaggccccggaaccctctaagaggtccttattctgagggttctagagtgggcctaagcacctgcatctctgcaatgcttcaggtgcctccaggctccaggcccacagtccacactttgaaaaccactgctgtagctcactgcaaagttacttcattatcttcctgtgaacatgaaccacctccaactttccaacagttccagaggaccacagtctgaaataatttcccctgggtgggggccaagggcccaagggagacttagttccctcatcttttctagatctaagctgtgcttctcagattctttggttcccagctttctctcctgtgtccacacacagccatgctacatatcgcttctcaagcccccttatcagtctgttgtgtttgtttgtggtgtgaatccaggggcttgtacattttaggcaagcactttaacatggagcgacatccccagcctctgcctggctcttagaaggacacttgcgattacatttaggaacccagataagccaggattgtttcctcattttaagtgtcttagttacccacaatgccccattcacacagaagatagcatttacaaccaccaaagctcagctctagataccaataggagccgtttggtggaccacacttacctcatgctttgtttagatgctatgggatttgaagcagacaggagtgtggctaccagcagttcatcagatctcaaaaaaccccaaagagaccaccaggaaccacaactctgatgcaagtacatgagagtctttattcaggctgttgagcctgggccacaaacctttctgatgatggagcaagataggagggcagcccccaggtctaggggaaaggggtttacacaggaaaaaaacacaggtgggggtttccaagcctcggtgttacatgagagggtaaaggagcactggcctttaagctaactggtttacagcacctggttaaatggcagggagggagcacacatcaaaagggagcacctggacctgggaacgacttaggttttcttagcccactctggtgttatcagccagctgcagatgcttgtctattttgcaactgccagggacatttcatgctttttctcagacctcaagggtggggcccatgcctctctcagggcaagttaacttagaatggagtcttaaaagcaaaatggagtttattctgctacctcagtctcttcaccgtgaagaaaatgaaacttgatgtccctgtgaggtgttttcctgaactagtcaccacatgggtcactgggtttcaatactactgggcatcccaggaagacagggatctgggatagttacaagccaagtcttggggaccaagctttctcttctcctgtgacatcaggagtaacacttccaacactctgctccctggggtttcggtttttatagtggtgtgactataggctaattgctctcatggggctaaaaggatctaagccacaaacacttggtcaggattgaggaggattgttgtgaacatttcagtgccggtcactaccatttgttgcacccaaccaaaaactgaaataactttttgcttaaaacacttagtgaattaaagcaagaagttcatatttctaccactttttgtttgcaaactaggccttaaggaaagctggtgctgggcagctaatcaggcaagaaggctctccttccctagtgacgggcttcccctgatgtcttaaaaatataccctggcacttgtccatgtgtgagccccaggcatttcccgattcacatccatgctcatctccccatggcaaccaatgaaaacatggggggagctgcttgtttgagagctgggaacagctgaaggaagctggtggctggtgtggtctttcagtcaactgctgggataaggactgaaaagaggaaagagcatgaatgaaccgcgcaagcccctccctttccggcctcccccttctgcctccccgtttggacttccctgcaccctcctctgctcatccctcagctgtcttcttttgaagagtttgggaacccccccccccatcagctgtcttcttgcttcagggacttccctctgggactcgtgctcctgggaggcctgcccaacttcaggcagagggtaaaactcagagataggtgaccacagccatcctacttacagaaacctgcgtactcaactggagcacccctgttgggtctaccctagttcagaccagcggtgaacgtgtgccttatgtgaagagcctgcagggtttcactgtcgggagaggtcaaagctggttggtgtaccactttgtgtccatacagggccaatcttccaccagcatctttattagggtagatctcatggcggtccctagaagcttccagatgccccatgatcagacagaaaccaaagtctcaacatggagagctaatgtttggaggggtaaagactccgggatctggaaggcagcagggccttgtgagaaccatattgggttggctgacatactccctcactagtgggatttctgtgggaagcagcagtaaactgcctgagttggctcaaggagagagtcaggcccagtggatgaagtaatggacagttctcagaggaggcaagaatggccaatgaatatatggaaaaatgttccacatccttagccatcagggacaagctaatcaaagctgcgctgattctttcatcctagtcagaatggctgtcctgggataacaagctgggcatggtgacctgcccctgtgatccagcaccagggaggctgaggcaggaggactgcaatgaattggaggccaacctgggctacagactgagaccttacctcaaagaactgaaaaggaaaaggaagcaaatgctgccacgggtcgggcggggggggggggggtggaatcctacatacaggtggcagcaaagcaaaactcatgaagctttggacagtgtggagagcttcagcaaacaggagagagccactgtgcggcccggctgcaccactcctgagcccacccagaaggactccgtgtcagcgctcttcagagatgccagcacacccgtgtttattatagccctagtcacagaggccaagatatggaagctggctagatgtccatctacagatgcaaggataaggaaaaggtggcgggtaaacacagtggggtgtttcctcagctgcaaagaacaaaattacaccattttcaggaaaccgcaactggagatcatcgtgtgaagcaaaataaactagatttagacaaatatcatgtttctctcataaaaggactctagacactatttataaatgcagagatatatctatttataattatgtgtataattattaaaacatttattgtacacatatgtctatatatatgaaataggaaggaacctatatggagggaggaaatacctaatggagggaaaaataagacagggtagcaaggaagaaagacagaagataatctctcatatgctgagtctctatttatgtgcagtgtggttgtgtgcaggttctcatagctgcagcgagcttaggagtgcagcagccatgtcaactccacagcacccccagccaccaactcttccatggtttccctgatatttgtgcgggtgtgcaaatggcccgattatggctgacagtcacttactctcagcactttggccagttttgagcctctgcattaaccgctaggagagacagctcctccaaacctgtggatacaaacggaaacattcaagggcagtttgctgcatgaccatttagcaaaacaacagtacaaggctccccgctagggcctgtgccctcccagcttataggaatagagttctgtgtattctctcactcatgtgtggaacacacacacacacacacacacacactcacataagaccaagcaggaaaccaacaagagtaagaagggggacaaggaatggcaagggcaggcacatatgagtaaaattaattatatatatacatatatatgtcaaacatgttaaaaccccattattttgtatactaacttaaaaattaataaaaaagaaaaatttatcctctaaaaagtaaacaaatttacatcttataattaattacaaactagttaaatataaaatataaggataaatgtattttaaatataaaataggaactgtaaaattgctaaaagaaagctttggagttttctttataaataactgaagtggtggggtagagcaaaaattagaaaagaaatggttaaattccactccactaaaaatgtgtttgggggctggagaaatgactcagtggttaagagcacttgtcactcttcccaaggacccaggttcaattcctggcacccccatggtaactcacaagtgcccatgactccagttccagggctcttgcaccctcatacatgcagtccaaacactatgaacacaaaataaaaaaattatagctgggcagtagtggcacatgccttttatcgcaacacgctggaggcagaggcagggattcaaagttcctggttcaaagacagcctggtctaaagaggagttctaggacagccaagactacacagtgaaaccctgtctcgaaaaactaaaaaagaaaaagaaaaaaaagttttaggcctaaacaaactgggagaaaaggaaggaaggagacaaagaggaaaaggaggaagaggaagaggaggagaatagtcatataatgggcataactctccttattgataagaagaaagaattagtccagcagcccccctgaagaaggcctgagagctctgcagcatgtgacagtgtcatccactataacagagacataaatgagagccataggagcatgctatgcctcacctctcatagctatggcagtgggctgtctgtgacagcatcaagacagacagacagacagacacttccatcccctgctcctaggtaagaggattggctgctgaggctgtgtggagtgaagcagacagcatatgtaaaacccatgccctgagtgatgtaaattctctcatacagagcaagtgaagaagcagagggtgggtctgtggcatcaggtacacgccatgagtgtttgccagccaccccattgcacatcaaaaggaaaagagcaaacatattttggttcttcagactgaagaagtattatgaagctgtataaaagaatgcaggtgcattttatactgtgtgggagcctctgcaatcctcagccagcagcgtagtgatccacaggcggggagaaggtagtgtggttcaacgtcactagccagtgtttgctcagacttctggagtctgacctcgagccgctcattttaggtatacttaagcactgcacaatttagtgaaaacttatcctggtgttaattaactcaatcctgtgtgcacaacaaagcatacataaatctctcagagatacaaaataagctaaatacagatcggatgtgactacatcaaacctccttgtaaagttcgtaaagatcggtgctacagattgcctgggggagggggaagctggcttataataaggtctgggggagggtccagtgtggtctctgtcacacagatgatgtaaaggtcaccaggctacttattaaccatgtctgctcacagctttctggacagataacaggttacacattccttcccttgaaggagcaacactgtgtttaacattccaggctcccctagtgctgactgtgagcacagagacctcagtgccccctacaacacaaggagagagaataatcctctggatatctataaaggggctaaaagaacggacatggtgacatacaaaagtgatctcaatcattaagaagctaaggcaggaggatttctgcaattacaaggttacaaaaagccttggctttattttgacaacttgctccattgaaccattgttgctcagcagagtccaaagaggcagccctgtgtccccccaatttctggagaacagggatttggtgagttggcaagataactctctgggccttgggcagccagaggctcccaagaatccagcttctctccttcctccttgttgtgaaactccagacaattcacacagcaagtggagacagaaaaagcatttaggggaaggggttaagggagccacagagttttgtatttcaagtttccatagtgcagtgtcactgctgaaaaaacaaggcatggaagtgcagggtctttccagcgggccgcagctgtcagcaggtgttggaaatagctcgccctgtaggcccagagcagctgacctgtggccagatttcctgaataattccacaaacttggccttccctgtcaagcccagccgaagatttaatagtgcctgttgattgatgccggctgctgtaatccaattctgagccaaggcgcagccagcctccaggaggccacttgatgttccctggtctcctaataacattgtctctcctcctccctccccatccaccataggccatttggtcaaattagaagatgaactcaaagaagcagatgccttcctttagataagatccaaaacaattcccctgtggagggaagggggaggggtttgttttcttttgttcttgtggcaaagaaggcactgttaatgtgtggcttgactaaaatcatggcaaccaggaggtggctctcttctatccttgtagctcctctcaaggtgtctctgtgagtgtttgtgtgtttggggcaggggtgtgtctggggtgtggggttttgtcctcatgatgagtggctgcaagctccccaaagcattgacacctaagttctatgtagcctcaggttccccagattggtcaacagaggctcaggctgacctgcctcaacctttatattgtggttctaagtagcttgttttctctttttattattataaatattttcaaacattcaaaagaaattgtgaaaagaatcattcgagagccactaggattcagctcattgctctgggctaaatggtaccccctcaagattcctcaccctggccctgcccccatacattggaatggaactgttgaggccatggggtctttaaagaagcaactgagttaaacaaggccctagggtgaaccctaatccattctgaccagtggccttatgaaagactaggcttggacatacaaagagagaccaggggcacagccacaaaggagaggcatggaggggcacacccagttgcccctgagccaatgaggaagggcacaggaaaatctaagccatcagcatgttgactttggacttctggtgaccagacctgtgaggaatgagtgagtgtcaatgaagccacctggtctgaggtacctcaggacacaactgattcttgtcagtcagcacttggccatggtcactctattgtccgttcagccatctgccttcttcatgttaactgttttggtagatttttaaagtgacctgaaaacttggtctactttgaagagtagcctagagaaggtaaatgtgtttgataaagcttaccagccaacatgttcaattgagctctggctgtaactggagtcagaaggacaatcaagatgtctgcccaaggatgaaggatcataaaacttcattacaaagacaggattggggatggagagacagctcagcaggtagggcacatgctgccaagcctgatttcttgagttcaatgcctgtgacacacctggtaggagagaaccactcctacaagttgttctgacctccacatacatgcatggcatgtgggcacacatgatgcacataaataagataaataataaaaaagactttaaaaaaaagaaaggtagaattttataaataggataatcacatatgtaactattatatatataatatacatataatacattatatatactatacatataaaactatatgtgtgtgtatgtatgtatatatatatatatatatatatggaagtagaacatagcctataaagggagagaaaggaatataaaggaagtggggagaggagaacaagagaagttaatgatggggtaaaaagaatatattcatgtctttttatatgtagaatatatatatgtatacatatatacatatattatatgtatatatatgtatacatatatacatatattatatatatatgtatatatataatggatgcataagaaaattgttgaagtgatagagagaggggagggtcaaataagagcaaggagtgatgacatatatgtgagatgtgatcacatgacacctattattttatacactaactaaaaataaaataaaagtaggcagatctctagtattggcaaatagctatagctccggtcagattttgcggtacaacctctggcctctttgggtgttcattctttgggtagcactgagcactatgtccccagtctggtctacgtagtaagttccaggtcagccactgctacgtagaccttatctagagaataaaaaaatctgattacagtgcagtatcgctggtagggcatgactcatccccaggctgtcactcaggctatgggtcttttccatattatgtctctgccatccctcagggctgaaatcccctgcactcagaactattggcaagaatggtcacatgtcccagttctcccagggttgctctggcctgtggagtggttgaacacatctttgtggtaaataccaaccatctctgtacagcacaactcctagacaatcctgagatggatagacagtggctgagagagagatagccagctggctagagattgatcagaatggagggaagctgtgagccccacagaagcagtgggaagaacaggaagggtgcaagtggctggggtcaaatgagatgtcccccaagcctggctaagatggctatgggaggccacctccacacaaggctctgcaaagttccttacacacttcttttccaagtcggttctagctctgtagcccagacctagtaacatggcttcaacaagagtcattttcccctttgtcaaatggagacggttagccaagaggacgaacaaaatgtgtgcaaagcgctaatccagaccaccattatcttagtatagaaaagacacagacattcaagaaatatttgcagacttcagtagaatgtagggctatcccaagacagcaaaggcagtggatctggagagaataatataactcaaagcttttgccgttgccattgctcagagggaagcaaaggtctagatcagctacaaggacgagtagggacatacagccacggaaccagtgaatgggtggacggaaaggtgctaagaagagacgagggttggggggattccggcagaaccagctcatgggattttgtcaaaagcaggccagagccatccgatgtcacgggtggccatgaggacttgacctgatgtcaaggattaggaattcctttagagtgattaactgggggaatcaggggcagctacaactgtgagatgcagaaatccaaattcaagctggagtcttagtcaagaaagggaggcagtaaagtttgaccaaactttggtcaaggggagggggcagtctttgctggtatgcttcttcggtccacccatcaaagtctgaagatgggactatagatttgaagtgctctaggactggtgggatcctacactctgctccctaatatgtagacttttgaaaatgtgtgtgtgtgtgtgtgtgtgtgtgtgtgtgtgtatgaatgctcacacgtgcatgtgtgtgacatgcatgtagagatcaagggtcagcttgtaggagttctcttccaccatgtggtgtcctgggactgaacttacatcgtcagtgttggtgacaagtgcctaaatcactgagacatctcactgcctcttttccctgaactgtgaaatagggtctcattatgtagcccaggctgactcacaatgctccttcctcggtctctggagtgctaggattacagaatcatagtttttcaccaccatatctggctcaagtatagacagctttgcctcatgtaagaactctgggtccctggggtcaggtgctagaagtagctgggtcacagatatcaatctctctgtgcagcagtggcaggagagccagtggaggcagacgctgtgacagaatccatctgggctgtgcaacagtggggactggaaggtctggaatcgtgcccaaggaggcaacgttccagaagtggtcttctggcctggttgataaatcccagagccacaagcactgtgaatgtgacacctgttgacagcggcagggtggcccagaaactgattaggaatgtggctttgctggcagctcatcaggagtaagccgggcctgggcccacacaaaggagtgaagctaagggcaaggcttgatatcagggaggagggcctcacctctagctatctagaaccctagagagggttcccttgtccaggaagcacagcctctgtagagggaagctggagagagctcagagctcacctggcagatgccctttcacatgcaggggaaataagtccttcacatttaaacagcaatttcctgtcagggatactgaccagggagcctaagtcccaggctggctaggagcttgtcgagcagcagaaatgtgggttatatgcataggtgtttgacttcaggaaatgccactgttggtgccaggaagacagaggccaaaggcagtagggtaaagtgcaaaaagacagaagaaaaggagctgccgaaagacatatacacagaaagatgcaggtcacagactcacagctggttattaagatcaaatagaactttggagttggccagggcccgttgattgtagaagccacttgccttgctttcacaggagtgactgagctgagctggctacatgagtaaatctttttttttttaaagtctgatgtcgaggtctggagagacagctcagcagttaaaagcacatgttgtttttgcaggggacccaggttctattccctgcacccacatggtggttcacaaccatccataactccagttcaaggagatctgaggctttcttcttagctttgagggcaccaattacacacgtggtatgcataaacatatgcaagcaaaacactcatacataaaataaaataaaatgaatactttccttttttaagtgtgatgctacatggttaagaaaaacagaaaggttttgctgtgaaagtggcaaaacatccaagggctgagaaacacccatgatgctggggagtaagggggtgggggatgaagacctgatcagctgtggtggcacatgcctgttatcccagcaccagggagcacgggacaggggaattacttgaaatagtaaactacacagtgagtcttaggataccctgggttacagaatgagacttcttcaaaaaaatgaagatgactaggaggagaaggaggaggagaaagaggaggaggaggaggaagaggaggaggaggagggnnnnnnnnnnnnnnnnnnnnagggggaggaggaggaggaggaggaaggaccacaatgggactgtcttagttacttttctgttgctgtgacaaaacaccatgaccttacagaagaaagcatttaatttgcccttggtttcagagggttagatccacgctggcagagcagagaggtggtggcaggaccagctgggaactcacatcagggaaagcaagaggcagaaggaacacactggggatggtgaaggtcttttggaacctcaaagcctgcccacctaaccccagtgatgcacctcctccaacaaagctaatctaatcctccccaaaccaacccatcaactggggaccaagcagatgagcctgggggtagggggagtggagtggagtcgcattctcattcaaaccaccacgggagctttgaccacacaggaaaactgggggagatggtgtgggtgctattgtccaactgttgacctctgaactaagcgtgccgtttccttgcagctgctggctctgatgtcttagacctagttcccagaggaacagagcccaagccttcctttctccctcctccccactttgtgcagaaaaatctcagcttttaaggcttatctcaaatgccacctcttccaggaagcctgttctaactactcatttcattctctctccaactatctcttcctcccgtaattctctccagacatccttaagcctacactcttctctttcatcctgaccaatttatctgaaaataggttgataaagagccctcttctgtgccagaaatggaaaagccttggctctaatccttccagctgagtagcaaagtaacttatgcaacacccattttacaggtgagaaagctgaggctcagacaaaaggatccggttcacaggcaatagctattgagtggctaggtctgctcactgagctttccttgggtgctttagtgttggtagactacatcctgggggccaaatccagcacccctcgtatttttataaatacagttttatcagaacctggtcacacttatatttaggtattgtccatgactgcctttatgctttagagcaaagctctttgacacagactatgtagctcatgaatcctaaaacatttcctaccggtcctgtgtagactgagtctgctactcttgttattgaagctcctcaccgagctgcttaagtcagtgcttattgctaagtaccaataaccttatcttttatggtttagaatattatgtgtgttcatgctttgggcatatagtaaggtctcaggcagattgcagtgtgtatctggcacgggccactttgttcttttatagacaaggttcctgtaaaaaagatttgagactgtggatgcagctccgtggtagactacatgcttagcatgcatgaggtctgggttcaaccctcatggtctttggaaatatacacatctatgtatgtgtatatgcatatgtatatttacatatgtagaagactacatagctacacacacacaatatgtagagtttgtgttttgttattttgagtgtgactttattggcagcaatatagcaaacactgagccacgcagatcttccctgaagcagaagagggcagaggctccttggacaccctctgtggggtgtgactctgatgcatgccggaacagtattgatgaggccgttttgaggcaaatgaaaagcctcctggttgatagattgtgctgtctcctccttgtggcgtctgaggtgatcattgtacagagctcccagcctccctgggtagagagggtcctgtgtcttcatggctgccctacagaagcatctgtgagtagctagagctgcctacccatcccagctccctggagctctggactggcccctgaaagcctggcatctagggcagaagcaacatcaaagcagggattggccgactcccaccacaaatgccaagcaggccaggcgcgggcagcactcgggggcgtgacaaatctcagcctgtctctagcttgtgttcccgggccagtctgccttgggctttgccacatgatgacgggtccatcattcactcatcttctcctcatcatttcgggacttctctgtcactcagctggctacttgggtaagtgtgtgtgtgtgtgtgtgtgtgtgtgtgtgtgtgtgagagagagagagagagagagagagagagaatatatgtgtatgcattattttttaaataaaacttgaaaagtaggcttgtcctgggagcatcagcagaatttgaaacttctcagtcagtgttaagatggcagggtgaagggagggaagaactcactgggggccttgcacgcatgcttacccctgtgaagttgtttgtagtccctcttgtgaccttgactccagagtggctggcagctgctgtccctttgactctgcagtaaaaccgtgctctgtggtccacagatccccgtggcatcaggtggccgggatgctcgccatcattccgggccaactggcttgggtaacgaggctcaaagacagcagccaccaaaccaccagatcactttcttggcaggtgtgtcctcccttgctgcccaagcacactcaggtgcaccttcaccgtggccttttttcaaagactgtcaagctgctgttaccttgaggatcagaacttgcttttcaaggctgtatggtttgtgcatggggctgatgtaaagttccaaaaggcaggcttctttggaactgtgaagtgtggacaactttggtcaaactgtagccagctagtgtgtgaatgtcatggatactgggcattgcagcctaccatgggggcacccggagacaccatggaacatacgtctttcactgtgtcacttcctctggggtttccttctaatgccaccccaacagggtggggagacgtgaaagctcccaccctaagcgcaggcaggaacggggctattagcatatggctgctctaggtgtttcccaggctaaggcgggatgctttgttcccttgcttcttcctttgctggcttttggtacacactggctcaccctgaggggcgccacttgttgtgggaagctggagcagggacccggtggtctgctgatggacttgtagggaaaaagaaagacccagtggtgataatggggtcatacttaccttaaaacctgtcattgggggtgtgtgggccaaactcttggtgacacagccgaggaaactgagtgcttgggttgaggaagtgactgtactgtatcatggggccacatgcacctcagactcaaactcttagatgcaagttcctgtaatcccaagggtccactggcatggatcactttccaagaatgtacctcagtttcccaaaacaaagcagggagaagtttcctttcccatgaggggaaaaaaaaccaaacgcttgccaaaaccttcatcagacagctgactatacttctgtagagaaacacccacagatacaatggcattagtgtcatcacgtgaaggctggtggtcctggagtcccttggcagtgccaaggcagctgcctggggccgagccattgcatgtggtacaccgggccacgacaggcaccacgtgctacacacccaacagtttccattacaacggagccttctgggactcttccaggctgggccctgagcttaggtactgttccagtggagacagcaccagcctgggagagatgcacggggccattcagccccaaaatagacccgagaagccctggcttagctgacggggagagtgctgaggggaagctgctcgcagacccatccacctgatggaaatactcagtgctggaatgagctgtaaataaaccagactgtgctaaaaacaaacagcccctggggctgggggaggggtggaaaccgacggcccacacctgctggcataaagtaggtcaagggggaggaaggggtgcaggcgagggggtagcgtaaaggcagccgctttggcagcaaaagcagctgataatttatgttccctgaagatgtctccagtttccaggaagaagtgagagaagtgattgccttgggacatccaagatctttcactagggatgcttacagggtgccggacaggcaacgttggagactgtagagggctttgaaaaccatggtgcaaactagccacatggcctgccaagctcccaggtataccttcgaggagggctttggattgttgttgtctcctgaggcaaaaggaagacaagggaaaaatggatctggagggcagtctaacaggcttcggcggctagtgcggacctgccaccctcttcaataggccagcatagcatggagaagccaaagttgtccactcctgacttctcaacgctggccaagagctggtgacactttaatcccagcacttgggaggcagaggcaggcggatttctgagttcgaggccagcctggtctacagagtgagttccaggacagccagggctacacagagaaaccctgtctcgaaaaaccaaaaccaaaaccaaacaaacaaacaaaaaaaaagctggtgacagagtaaagcttgaaaacgtaactatcaaaccaagaaagagaacagcggagactgaagagatggctctgtagttaggagtgctggctgctcttccagagaggaccagggttcaaatcccagcacctatgtggaggttccaggagacgccctcttcgggccatctcaaacactgcatgcacgtcatgcacagatggagctcaggggtgagaggtgtagggaggccccacccaggccccactctgcttgtgagagcagagatccaggaatctgaggcccaagctaggaaccggaaaaacactgctttccttgatatcagtgctacaagcatcctagtgcacccgccccttctgttggtggattcctagaaatgaaattgctgagctgtgccgtatgtctacactcagcttcattagcaaacaccacacaatttcccaaagaccacaccagcctgttagaacaggataacagttctggttgtccccgctccttgtcgtatttttctcctgtcctttttatttatttatttatttatttatttattaaagatttatttattgattatatgtaagtacactgtagctgtcttcagacactccagaagagggagtcagatctcattacggatggttgtgagccaccatgtggttgctgggatttgaactctggaccttcggaagagcagtcgggtgctcttacccactgagccatctcaccagccctcctgtcctttttatagtagtcactctggtatgtgtgcatctatatcacctcatgcacacccatgatgctcgcagagtggctaagaacattatggtccagccacacagcagaactctgtacgaactggtattacagcctgtcccattcccccaaatgctgtgttaagaaagagaagccagacataggaattcatgttgtgagattcaatttgcataaaatagaaatgtcctcatcatgcatccctggtgttaggacccagtggtgtgtggggagcacggagactagagtttaccggcctctgcggccagtaggtgttttctagctcttaggtgctgtcatctagggtctgttctctttgtagaactctattgtgctgtagtgtgggatctgtatcattttacataacttaacactggccatgtattaaggccaaacatagataagactgtgaaaatcaaagccatagaagtccagtggtccattcacctctccatgctgtggatctggtcacctacacactgagccatttaagtgggacttgttagcaggctgaacaaccacatgagtacatagggtcatttcaaaccatggccacacctacagaggtagtctctgaaggaggaaaggacacacacagcgtctgggccatttcccttcagcagaggcaagagagggtctccgtgtgtcttcgttgcctcaaggcaacacacaggggcctgctccaatctcaggtgaccgtgtccgcatcccttgggcacagtgggcatgtcacagatcgtcatcctaactccatgctaaggaacagcagttttctctgaacagcccttcctggcctggatcagaagaagcggggcagccacaaagcatgctgcctactcatgcccccaccgcccccactcttcccaccgccgttcttcagaggcagccggagcccggtgagtactccggacttgggtgagtgaaaaatctccagactcttccatgccagctccatacctggcccagcatggccacctcaggatcccattgaagaggggcagctctaatgtcactcaaggacagaggcctggagtgggcattgggccacctgtgccacctgtgccaatccattcacacatctgctcccttgccgtgctcggtctgtgaagaagggaggttttccttgtcagggagttaagtggggtcagctttggcagcaagatggctcacctttttgaaaacactaaggtgctctcatagcttccaaatccccaccagctacagaattccctattttatttttgttttttgttttaatcaagtattcatgaaatccctgcagtgggggcaagggtggaagaaaggaagagggaaatgggatgtggaggatggagagagagaagcaggctagagagatgctaggtaacagataccaaaatacggttaaatgtgaggcctttggatgcctacagtctcttacaacatgttgtcgatttaaaagaaaagaaaagaaaaggaaaggaaagaaaagaaaagaaaagaaaagaaaagaaaagaaaagaaaagaaaagaaaagaaaagaaaagaaaacctagggggaaaagagcgcagaagttcccactgcatagaaacagagcaggggtgagccaaggaggcagctatttcattggtctgacctctaacccattgtcactgtcatccgaagcttctctccccagacatgaagaaccttctggaacttgaggcgtcaccatcaccctgcattcaaggctcgctcggctctcctgggccccctgggccccaggtgagttcacccttccaggtcccctcctgtgtcctcccataaaccaatggacagagccttacagtgcctgccctcccatgtgctgtgtggctggttttctttctgtagcttctctccagcctcagcatcctgaagagtctctgggtgaactggcctcgcctgtgcaacccctgacacgacagatttgaaggtttcatatcgcatttgaggatgctgcttgtatggtagtgggctgttgttattgccagcaaataggaccatgaccatccaccccacctgtggaccagacggcttgtgctcaattcaggaacgtggccgtcagaggaaccacttaccttaggtttcctgggctctgggttactacaagcataagcagcccccaagcgaggtataagagaagatcgaggaataggcaagcagctagagaaagagcttttgcactccagagacccccatcccaggctgatctgctgccatgagggcttttcaactgctctggggctccatagggaggaggaagagggtgccaggagcttgtaggtcccgagtgccatcctagacaggaggcactgaagtcaccactcagctatgtgaacctcttatcatgtcatagtgttagggagctaaaagccaaacttcctgacctggaaggcaaagtcccatgagtggtttggagtgctcatcagcttgtaaacctccaccttgaacttagctacgatgtctgcctctctttttcacgtacagcaagcttgcctcagccttgggctggtgcactccagggccctgcttaagttttgacttgctcctcctggtctctcagaggctggtttccatgtcccctccctagagatacctttctcagctaagcatggtgacacatagcactgacgccagcactcagaggaggctgagacaggaggattactataagtttgagaccagtctggaactcactgtatgagttccaagactgctcaggatacagaatgaaaccctatctcggagagcagaggaggggaagaaaggggagaggaagagaaaggagaagaggggccggggggcggggggaggaatgcctttcacgattaccaagtctaagactatggctttgaatccagcctcacctgtttttgtaactacagttttactgtctgtggctttttgcagaccatcgaggtgaggagtctgacagatgtggtcctccaagtgattcttttaaatcactctctggctttgtagaggaaaagtcctgctcccttgtacaggaacagggatagtgtccacttcctagtctaggaacctgtgggctataactagcctgttctccatacatatttattgacccaggtgtataattacataattgtaatcccagcacttgggaggctgaagcaggagggctctgaatttaagactagcctggactgcctaataagagaccctatctcaaaaataaataaataaataaataaataaataaggaaacaaacaataaaatcatctattagatgttataatgaatatgggaccttgagctcagaagtcagacaccgtcataaagaggctgggatgtctgcagaaaggccaggtgagagtactctaaggtgggctcccccattcagcactctcccctgatgggtcttgatgtggatgagaaccaactgagcacatggaaggaggggatcctctggtcacctcagaatggcagttccattcatactagtgtacctctgagctcctgcaagtctgagtcacacagaggctccgctgcgcacccatggagtctgtgcaatgtgagatctctaagtagcatcatatgggaactggttagacatgcagtctcactgggtgcattgatttaggcctatgatcccagcactcagcgggtggaggcaagaagactgccttgagttagtcatgagtaccaggccaaccagggtaagacttctatcacaggaagggagaaaagaaggaaggaaggaaggacggaaggaaggaaggaaggaagggagggatacacacacacacacacacacacacacacacacctccattcgatcagaatctatatttgcttggtgtgtgctaagctcaatgatcttgtaaaaacagttgtaaccatttcaagaaagaaaaggcttggaaatagaaagcaacttcccagcctttacctcctaaatcagaaggcagataacccaaggtggttcctcccaactgtatcttcacctgaggatcgctggggaactcaaacactctcaaagctctctgactcccacctccccagatggtcatgtgattggtctgggtgtggcctgagctttggtttttttttggtttttgtttttttgttttttccaaaaatcctggggatcctggagtcatttggacaagttttggagaaaccacacttccaacaggctgtcatgttgatcacttgcagacagtagaggtatggaggccaagggatttgggtggatccctctctgctaacctcaggaatttggaagtcatgagctttccagagatatgtgagcagaaggcaggcacttctagcagtgaatgtacaaaactggaggttttcttttacaatgtctgctggagtctctcaatgagatccattgtaaacattcgtttttttttccttccattaatgaaagtttctgggaggagagtattccccacctgaaacccacagatcatttgtgggacatcttttttttttttcttttgttttgtttgttatctataagacaggatctcatgtagtccaggctagccatgaagttgctgggcagccaaggctggccttgaattcctgatcctcctgcctatagttcctgagttctgagattacaggagtgggccaccatgcccagctcctccctggggacatcagaatcagctgctctccgtgcagaactcaactctccttcctgccagggcctcagagaactgtagccagcgtagtgaaggatccctgaggccaagaaacatcacggtctcagtagtggggcttctccaggactctgaggctgctcttattaaacactgaaggttctagggagaaaatgaaagtccagtgagtgacaccaatggtgccaagatacagtgctgagaaacgaggaagagggatggtgaggagagtgggccgcagggccgagaggcccctgcaggcatccctggagccctccccccagctcccagcccccagctcccccaccaccaccaccacacacgcacacgcacgcgcacacacacacagacacacacacacacacagagtcagcccgctctgtaaaggtccagttctgcagtctcccactaaacccctcccctgcagtctctccttgtttaggtatgttttcttcaccttttctctccattgtgtagggtccacctgggcttcctggcaagacaggaccaaagggagaaaaggtatgagccgctgctttcttactcctgcctcatcttgacagtcactgcttgctttctggccgtgcccctgagaatgttctggttgggacttcaaaatacgtgctcattctgtcttagcagatgaagcagggagtgatgcaatgaatagatgcagctatagtagtgggtgctattggtgtgtcctgcttcggtccactggcatggcaggcgtgctataactggtcaagtgaccaactgagagccacagcatgcctaggcctcagccctattaagttctctgatcctagaacttctctttcaaacaagctttttctgttttctctatgcacagggggaccttggccgcccaggaaggaaggtaggacccatgctgttctgtcgggtaactgcgctgcatgtacatgcaagtgtgtttggtgggcaccaattccctggcagaactctggtgctggcaccccgctgatgatgccagcatgtttgccctttctgccaacactttggttaagagctggatcctgtggctgctagcatctggctgactccttccagaggctgctgagcctggccacactttcccaacttcatcctgccacccaatggggactcttcaggtccccagccagtgacacaaaatgaccttcattaaactggaataaagtgctcaagtagacaggagtgaatagttttgctttggacattacagtggctctgagtaaaccagccacacgccatcattagtgtcagagaaagagccagcaggcaacattgctgaagtcagagtgggtggtggctcttaagttctaggacttgactgggattgaagacagagcaaatccatcctaaaggatgctagtggctttattagcaacagaagccacaaacagacctttgtatggtccaaatagcaagaccagacacagctcagtgactgtgttgaatgctgtcctggagaaaggcctgtggtggtcccatgctctgaagcatcaaggtctgggtcaattagtaatgtctgccatgagcatggaaggcaaaagtagagtgtacacgccagcatctggcatctttgggctcttggctgagtcttttgagtccccagctaactctgaagtgagccaccgagtgtagagctcaagagagatcccccaccctcacccccaagtctatgttctcacccttgttcacaaaggccattcttctataacccatagctgagatggggttctctggaagcagagacatgtgcaagtgaatagattatgaaggaacactggcaggaggaacctgtaaagaggggagaagaatgtcatgagagtgtgcacaggggaagtccaactccagcagcctgaactgggatgtgtggagagcctgtctgtttgtccttccttgatgccttgaagtaagagatctgggatgttgggtatagaaagggaaggttcataagttactgggaagccccagtgccccatagtgagtttcatggatgcaggcttttatagaagccaatagtatagcctctgagggatagtgcagcaggcaggcaaaatgcccttgagggagttccaacagcatcagctgctgctcccagcatagtctcagctcatgccacaaaacaacctgtagagagcccacaggaagcaagggacagtgggtacactcaatagaggtaatgaaatttgagagatcaagaagtttagaatccctaatctgccaatgttctctatttcttaagtaaaataaagcgttgtttggtagcataacactaaaaatctaactcatgtctgcttgacatgggtttttaaaccctcattctttgtagggtagggatgaaggtacaggggcccatgtacagcagcctcatactcttatcaagaccccagatattcttgggtggagggaagcataccgaggtatcttgacttttgttcttggtctttgaagggtagacctggacccccaggtgttcctggcatgcctgggcccgttggctggccaggccctgaaggacccagggtaagtgtcatatgtgtttggggctcatgtagtattagaatacaagggggaagatggctaccctgggtcctggagcagtggagcacatcacttccttcagagggaaatagctggaatgcagcttttagcccccaggtgcttctccttcatgtggcctgcagaccgtggtcagtgctctgactctgctcctgtggataagtgggggctgctcccttcttccctaggatgcccatttccccttggtcctgagaatgagtgttctagtctctgagatgacccagaggaaacttgggtctgggaagctctcagctgtgccgataatctggcgtggaaagtccaggactataggcaggctggaaggatgcagattcaactcctcagagagtacacaaagcaaacgcacccctgtcctcttttgtcttatgttcctgccgcctgtcacagactgcagggtgccgaggccatgacttgaagatttgaccagcaggagccagggcaaggcaagcgactaccccctgctgctctgccttactggctgcactggcaatacaaaaaaagtcccaaggaaatttcccttcaaagaaccaccataacttgggctggagagatggctcacagtcagcagcgattgttgtttttgcagaggacttgtggtcagttcccagcacctccactgtggctcacaaccatctgtatctccacttccagggcatccagtgccctcttccatcctctgtggatgccaggtgtgcacatgcgcacatgcaggcaattttcaatttactgtattgccaggcatggcatctcatactcacaaatccagttctcagaaggctaaagtaggatcgctgtgagttagaggccagcctgggctacaaagtgcattccaggtcagcctgcgcttaagatcctgattcaaacaaaacaaaattcccgctacagagagctaagctgtccatcatggcgaaccacacatagttgtgaaacccttgaaatgcgactaatataactgaatgtcaactgttcagggctggggagatatcagtcagtaaagctgtttgccaccaagcctgacagcctgagttccatccctggaacccacatgtgaaaggagagaactgactcccacaagttgtcctctgacctccgcatgtgtattgtgggttgcacgcatgcacgtgagtgctctcacatacgcacacacacacagagtaaataaaatgtaattttaaaatcttattgtatcatgattatgtgttgaagtgacaattgactaaatgaaagtaaaacactggcaaaattaatttcactagcttagttttacatttaacgtaatttctttttaaatatttattcatgtatgtgctttatgtatatgagtgatctgtcttcatggacaccagaagagggactcagatcccatagcaggtggttatgagctaccatgtgaatgctgggaattgaactcaggacctctggaaccactgagccatctctccagccccgtttgatatacttataaaagaacttgcaattcagaatgaatgtgaagacaggtgtagtgataatatttcctacaatcctcgagctcagaggcagagaggaacataatcagttgaagggcattgtcatcacctgagttctcatgtaacgtcaagggctacatgagactctgcctaaaaatcaaaacaaaacaaacaagcaaacacccaaaccaaccaaacaaacaaaagccaaagccaaaataaacaccacaaattaatccccccaatagcatacagttgactttatatttctacaagttggaggtggcatacaattttgtaatagagacaataagtacaccctacacagcaaccactttcctctgctgtatatgccccgaggctgattttccctctacttgccttccgactgagggtgagagtgtaatgagatgtctgaaagaccctccctgtgcacaaagcaaagcaggtaaagaatttacttgtgggataccatatcttctgaggccctcatgctgtctcccctggcctctcacaaccctttccaggaaaagaccaaacatcaccatttacaacatcttagtgagtatttagtttggtggtctgtccaccgtgggcattttttttctctatttaatctcaaggaccacagtgacaggtggaaagtagaaccctgggaggaggcaaaggggcagatggaactcacgttcccaacccagccccaataccctggttccgtcccagcttcccccacaactcctgcttctgcttctctgagaaacatcactgtgggtcttcttttccttcttctaattgccacagggtgaaaaaggtgacctgggtatgatgggcctgccggggtcaagaggaccgatgggctctaaggtcagtgcatggtgcagacagccatccctgggtctcttcactaacactgaagagcagcagctgtctacagagatggggagggtggctctgggacactgtcgctgtgctggggaaatcatgccctgaggtgcggggacactggggtcatgttcccgttctcttccgctactgggggtaacggcatccggattaggcatctgggagcctgctataagcacacgcctcttggatatctttgtgtttactgatgtgtgtcccttaggactcacagtacagtgccgagcctcagcaccacatcagggacccctcccatcccctcagccccggctgtcctcgaggctcactgtaaacatctgcctgctttcttttagggtttccctggatccagaggggaaaaggtcagtccctctctccagccatcccgatcctgggctggatgccgctctgggtgggtggtgggtggcacacaagtccagccttctgtcagtcatcagctgcagctcttcttcccagctatccctctgtcctcgtcctgtgtaggctgagggaggataaagacctcccgagacaggacacttctggtaaagctcccagtgacctcacgccctgcctcacgcagggagcaggggaacagatgagagctagcaggcaggcaagtctttggtcagtcagcgagcaaaggggcagtagaagaggatttgtcctcgggccaggtttttactacacgccttctcacccgcccaaaccaaacaccagccggcacctgccagatgagaggactggaggcccagaactttctgtgagtttccctgtactaatgttaggaggtctctgcgggtctaaacagaaagcatttctttactgggcaagccacctaatataagagcctagagctttacaaaagtgagggtgtttgcttagggagtttttcagtttgaaatgttcctatcactacccgccacaccccaaaccccaacacaatgcgatatgagaccattgaccctctcttttgtttttctcctagggatccagaggtgaaaggggtgacttgggtcccaaaggagaaaaggtaatggcaaatctgtacaactgataggcttcaatagaagtgtcagatccggctcccttggcctatggaccgatgggcagccatcttggaaatggctgatcaaatctacccacagctcttccaagtggtatttcaggacagtcatgatatttgttctcttcacagggtttccctgggtttcctggaatgctggggcagaaagtgagtatctagaagtagagagactggacctcaagccctccagacatagcaaacagagcccctcctctttgcccttcaggcagagaaactgattttaattgtgggaagttccagtttgagatgaggaatactggggagaaggcagcaggaagatctgaagtcaacccccacctgggagagaggcccacattgcttctcctacttcttgaagctccagggcagaattaaatagctgaaagttctgtaaggatcaactcctatctcctatcggagccacaatggtcaatgaccctcttatccctcagaccctgacggatgagtttagtttagtgtcactgcttcctaaacactcaacaccatcttcaagggtggcagacactgttggaggaacacggcattattttaaatggatggcaacaattttattgaaatagtgagatatttattttcacacttgggacaggcctaattttaaaaggagacaggtttagttattaaagaaaaattattcagtaaataaccatggggtgatgaattgatataacaaaaaatgcgaagatggcaatagacagggagatttgggaaagtttttacttagattgaggatatggagtaaggttaggtgttagacaagggaagatgtcacagcataaaggaagacttgcataaatgaccatgtaggacagtccctaagctgacatggaatgctgggtcctcaatgctataagatactgatcatgccaagacagctcctgagataacatggttgcttttctattgctgttaaaagatatcatgaccaagacaagtttcgtgtgtgtgtgtgtgtgtgtgtgtgtgtgtgtttcagaagcttagagtccatgacagaggaggaaaggcacaacatcaggaagagctaagagcttccatctagatccacactttggagggagggagggagggagggagggagggannnnnnnnnnnnnnnnnnnnnnnnnnnnnnnnnnnnnnnnnnnnnnnnnnnnnnnnnnnnnnnnnnnnnnnnnnnnnnnnnnnnnnnnnnnnnntgagacctcaaagcccacccccattgacacacctcctccaagagcacaactcctaatccttcccaaacagtcccaccaagtggtgaccaaccaatcaaatacatgagcccatgggggttgttctcactcaagccaccacacacgctaacatggccaatgctggatcctcgtgttgtaagtctttgacactggaaattgttatctctacctaggtcataaactggaatgcttcaaatatgcaaacaaacgttttctcaatgtctataatttttaaacccattcactttaaagtgttactttctaaagtaaagcatttttatccggtggtatacagccatgggtctttatgcaagtcactataacttatccttaccttagcctgtcagaaactcagttcctgctaccctaggtaggatgctacattttaaaaatagatgaatcatataaacaaattaaggcaaacttcaaaagagaagaaagtaccttaagatgttttgtctagattctcattccctgcaacagtaatcatcaaagactcattggtcactataaaattaaatttgacaggttctctggcttgtgcgccatttaccaggcttggcatagagagcgccgtcttccccctttcgtggcaggctgctttgggaccgggctgatgtgataactgtaattaggtcttaggagaggaattagatcaagaaatccctagctgcttccagctggtaaagagaagagccacacttccttccaaagacctcttttttaaaattcatattttttatgttgatgctttctcctggctaaacaagatattccctgggcccctctaaacagcccaggggtgtgtgtgtgtgtgtgtgtgtgtgtgtgaaaaccaggttaatggttcctccattgccatgtggaatcattgaccctaacatggacttaaggaaaatgctttcttaaaggtttcatttttaagtgtgtgtgtgtgtgcccgagtatgtgtgtatgtgtgtgtgtcttcatgtatgtgtgcctgtgaaggtgggaggtcttagatcctcccggggttaaaattttgtgatcattcacaactgcctggagttacaggccatgtgagccacctgatatagtgctgggaactgagcttggatcctctggaaagccagtaaacgctcttaactgctgagtgagttggagggggacaggttcatcctgttgctaagctgacaggtcagcttggccctggtcctcaccagctactggtctctggaattccccattgtgttagagaaaatcacatgacaaggagcctgggtatctattgctctctctgagtggctaggatggcccttcatgagcactagcaattgataaacagaaacttccctggtagcaactgctacactggctatgttgggggcacagtttgggatgcagggcaactgtttaaagtacaagtgttgtgcccgtgggtccataatccccagaggtacacgcacacggaatgcatgtgtgtgtgtgcatgtgtgtgcgtgtgtatgtgtgtgtacatgcacatagaagtgcatgtgtgtgtgtgtacatgcacacaggagtgtgtgtgtgagtgagtgtgtgtgagtgtgtgtgtgtacatgaacatgggtgtgtgtgagtgtgtgtgtaaatgtgtatgtgtgtgtgtgtgtgtgtgtgtgtgtgtatgagtgctatacatgccaaagtgcaagtgtggatgtcagagttcaactgatggcgctgcttctcttctacccggtctttaggctcagcagggagtggcttttcccacaaagcccttttgatagtctgaaaaataccttttgcaaaaggttggctttgaactatgaaagagttatttttaattaggaatgtaatttacattgttttccatattttaataatatttctgtggtgactatttgaacaaatacttgaagcatcttttctcacaaaaagggttttcatgtgagttggacagagtggcacatatctgtaactcctgcacttgggagacagaggcaaggggatttcgggggcatcctcagctatgtagatgggtagaggccagcctgggctacagaagatcctagctcagaaagatttttagggagaagtgagctgaaactcaaaataatacttaccggtttgtgaagaagtgatgaacccaactacgctttaatcccagtaagcaggggggcagaggcaggtggatgtctaggaaggctagcctggcctacatatcaaatttcaggccagccagagctatgtagtgagacactatctacaaaaaaaaaaaaaaaaaaaaaaagtggggagttatacaatctcaacaagaatcagaagcatgcccgaagcatacccagcattacatcagaaaagacggttcccaaacatcaaaaacacccaactcacacctgtgagcttgtactaaaaatgtaattgttcaattagacaagaaagtcttttccccagtcaggagtgacacgggctcacgtgcaactgagaggcaggagtcaccctgaccactgtggaccaggttgtctcttccgtttgaccaccagagcacctatggctctagagcactaagtcacactcgggttgccttccttctttctttcctattaatatgagctcatcagtctcccacactcccagggacagccctacctggggagggtacagtatgaagaggaggcgctggcagccagtgataggagagacccacatagatgtgtctactctgtctctcacttgcctctcttctccccagggtgaaatgggtccaaagggagagtctgggctggcaggacaccgaggccccacaggaagaccaggaaaacgaggcaagcaggtaagagcctcagggtttactcccaccgaggtcacaccccatggtttgggagtggagcagcatgcaggagtcaactggagccatcccacagccctggatcccggcatcctcagggctggtggacagagcagcctcactactgacggaccttcaggcttctcgaagccaaaatggttcaaggttgcaggctctgctcaaggtcagaagtgggagtggcccgagttcaccttgttcagaggaatgcatacatcttaactgaagcaactgagaatgggaggaggccaaggccattttgcagaaacttgccttctgcccagcgtgctgggtatagacggagttctccagaacagcctaggcccttccctgatgacagttctcactgcacaagcccctaatttagaagtgatcctcttcactggtgttgttaggagtttagggaagttgttcgctttgtcagcagggcaagccaggttatgcagttgggaaattgaattccagggctggcttgaggactgtgctaagtgcccgcaggaaaactagccccttgactcatggacagatgcctctgagagatgagctctgtcacctttttttgattggtggcggtgggggaggttctttggtttgtttgttttaagacagggtctcactgtgtaacataggacggccttggacttcactaaccctgcattatttttcttcttattattatcataactcagctgcctatttcttttttgtcgtcgttgttttgttttgaattttgagacagggtttctttttgtagccctggctatcctggaacatactctatagaccaggctggtcttgccctcagcaatctgcctgcctctgactcccaaatgcatgtattaccactgcccaactgcctttttcttcttcttctttttttttttttttccaaatagatattgaaatccagctttatttaggggctggggcaatgagttgggtaaagttctttccgtgtaagcacgagagctgagcttggtcccagcgttcatgtgagagggccagcgtggcagctcgctcctataagccaagcaccagggaagtagagccccaaccactctggccaatcccacaatcccacgagctgtgggttcagtgagagaccctgccttaaaataaggtgtggaacctttgacctctgcttgcacactcagatacaagccagcttatgtaaataatcttagttgctgaaaattgatacttacatttgtgatatgcgtacttgtaatatgtatactttttaatttaatgattctgagtatgttagaagaaaaatgttattttgagcacctatataaaacatttcttatttttaattgttaccatattttatggggtagacagtgatataattatgtacatacctacactgtagagtgaccaaattcagttattagacatacttatcacttccgatttttacaatttctttgtaatgagaatatttcaactctacccatctcattggctttttatctccatcctgttgttggttatgacctgatctgggtattatagccttccataattctttcttctttcattttaagatctgtttatccatttattatgttctcgttgctttgaggcagtgtctcacgtagcccaagatggcttcaaactctgccctcaaccatgctggggttgcatgtagttcagaactatttcttttcttttatgtccaatatgtagttttttttttccttacaacttaaaatcatgatgtgtacagcttattgtagaaattaatgaatttttaaacgtcttctaaaaatactattctgcatcatattctaatagacaagaaagcaataggttgtgtggagccccatccccacccccgaccgtagggaggacatgctttttccactctgttggctgtttccccaaggccaaagtgaggatccccaaacttcagttcacaccagacttgtccccatgaaagctgctgttgacttgaaaaaaccatcatggcgtggggatttagctcagtggtagagtttttaccctgagttccagcatcacaaaaaaggaaaaaaaaaatctcctgttaaggatacagaaccacttcctcaagagaaacctcctcggctcagggaaacctcccataaagacatggcactttccacacagtgaccaatgaagcagaagattcctctgctggccgctggtgtcagagtcaaggagtgtttccagttccttcaagctgtgtacttcctgagctcagagccagctggcatagctgttagaaaaacaagcctgactggctatattaagctggtgtgacttcctttgccattctgggacccatcttggttaccattcggaatacttcaccctggcctgcggattaacagcctcctccgtgagggtgggattggaaacaaaccaacctcatgggtcccctgggacgagtataggaaaatctttagaggccacgttggcaggacagcatctcactgaatcagtgtggagattggaaacagaatagctacaggtgtgactctctttaagaaatcaggacgtcttgggtgtgagggacatttggctgggacatctgtcatccagttgatcgttatggttggtttaactggtctggctgttgaggagggaactcactggtccacgagtttcttccaaagctgcacgattggataaggaagatgacttctccaatagagggcgattgtttggccaggagtacggaggtagttgtgcttccatactaggatctccaaagggctgtaggaaatcagagttccttctcccatgagagaagatgaagcctggccagccactagggcttgtttccccatcacccttcattcttcacaagccgtatcttcacttctgccatctttgttaacctcttagaacctaggtgggtgcctatttcctggccccgctttagagaagctaaaaccaaggcacaaagcaataccatgagttacccagggcctcacagtcaagggagaatatcttgactgacagattgtcaaaaatccctccacattcactgccaacttcattctcccccttcctttggtctggggagagaagatgaacatggtagattctagcctacatggaatttatgtctcctggggagacagatgaaatgatcacacaataacttatgaccagtgatctgaaataaatgctagaagaaccatgcatggtgtgtgtgtgtgtgtgtgtgtgtgtgtgtgtgtatgcctgtgcatgtccatgtgtgcatgcatgcatgcatgtgtgcatgggtatgctcatgcctgtgtgtatgtttgtctctctctctctctctctctctctctctgtgtgtgtgtgtgtgtgtgtgtgtgtgttctgagactgagtttcacactgtagctctgggtggcttataattagaactcatgtatatctcaggctgcctttaaactgtagccattcctctgcccttagcctgttgagtgtggtaatgacaggcatgcacctcaccactcagcttgaagaagaaagctttaagagaacttggtgggagacatcagtgttgcctggggagattttgcagctgagacaacagaacttaaaactaaaggtagaggggcataaggaagagcttagagtttgaagagagaggattttgggttaagaatcatggtgtttttgacaaaaaaaaaaaaaaaaaatcaccaccaacaacaaaccctctgactcaggccatgaccagcttcttgcactcagtaaagagtggggtctctaccaagatagtaacaggaagtctgtgggtagaaacaactcttctgatagaatgaaaataacatgtaggtaaacgcttaaatgataggtccaacttggccacctgaacattaggcactgcgcagatcctggtctgaaactccactccctaactcatgcagataatgaacttagtgaggtcatcaaacttgcaaatgttgcttgctctgtttgtcgcaggagcagggtgctggagaccaccatgaaagcttttgcttttctaagcaaggtggtctctgacttagaggcaatgtggaggaagaactttgttatgtcatgatatcacaatgggttctatctttctctctgttagggtcagaagggagacagtggaattatgggcccaccaggcaagcctgggccttctggtcaacctggccgtcaaggtcctccagggcccccaggcccaccatctgcaggtaagacttatgcaacttcacttgatctacacagtagcactcccaactctgtctcccaggaaagccacaaggagatgccaacagagttctacattgtatttcttgctagaaaccgccagagtctcctttgcatatatgttcctaatttgtctatgatttggctaactgaactttgttttaacattctggaaaacacacaatggaagtcaagagagggtaaattacattggtgatgtcatttatattttcagtgaaaagggtacctatttcatcaactacaatctttttcactttaaaaaaccatatatttattttatgtatgtgagtacactgtagctatacagatggttatgagccttcatgtggttgttaggaattgaatttttaggatctctgctcgatccagttggcccctgctcgctcaggcccaaagatttatttatgattatacataagtacactgtagctgacttcagatgcaccagaagagggcgtcagatctcattacgggtggttgtgagccaccatatggttgctgggatttgaactcaggaccattcagaagagtagtcagtgctcttacccgctgagccatctcaccagcccctccaaacattatcttaaacccagaaagcattatagatttttctgtcttacacagtgtggtaaaagagtgtgtatttgctttgggtatatagggtatattggaaggaattgttaaaaagaaattaagagtcaatcgctgaagatgaaatatgtatgtttctaccttgttttatccatttaatttgattagctaaatcctttattttattcccttgttggctcaatgtaaggccttttaaagcacctcacctgtataaagatgacattactaggtcaatcttcagctatacaaaaggaatcacaactgtaattacattttttctcttaataaatagagattttagaattccacaatgcctttcttctactgtattctactgtggttgtggttcttctacaaccacacagtgaggttgtcatggaatgtcctgctctgttagatcccttaaaccaaaggacagttaactctgagactctatcttgtcaagacaccatgaagtctcactcaaaactctcgagtttttttctttcctgcctttctaattgccacatacaggttaggtgaagagccaggtggtgttggtgcatatccttaatcccagcacttggaaggcagaggcagaaagatctctgtgagttcaaggccagtctggtctacagcatgagttccaagacagccagggctgttatactgaaaaaccctatgaaacaaacaaaaccaaaagcggttagatgaagatcctggtaagctgtagcaggagcacactggggacgggtccttctgctttggcctactctttcccacctcttatttagttaggtgtccatggatacctagggacaattgtctcaagctgtgcttgagcatcacagcatctcaagacagggaacccttggagccaccagatatcagtctaggactgacagcatgatggaagcctggttttgcctgtgggaagaactttattgggccttggagtgattagggctaaaaccctgaggattggagacgggcatatgcatatgaaggtggagggcaaactaagactttactgatcctgtttgtgctattgtgtatttgcaaacatggccccatcaggttccttcctgggcctggggactgtgagcgggttctcagaaagccatgtttgtacagtcagttgagaatggtaacccagagatttagcagccagcagttttgttttccttccctgggtccctagttccttctctcccggattgggggcggggcggtatgcccatttccctctctatcaccaaatcctctcccaacaagaggcactgttctttctcatatagctctcaccattggtgacttccttttctctctccctcttcccttccttccttccttccttccttccttccttctccctttcctttttattccatgtgtgtgtgtgtgtgtgtgtgtgtgtgtgtgtgtgtgtgtgagactaggtgttgagcacaggccagggcttcatatacaaactctctaatgctaagctacccctgctgactcacagcagatgtgcctcaccttcccgcgggatgccagccaccctgaagactgagtcagtatcacattccctatggcatctggtggctgcaaccacacagggactggtccctacagagactcactctgtccctcctgagttacacctgcagactagcaggactgttggccatctcttcagactgatgttccctccctaatccttcctctcaaatgacttcctttctgaggagctacccagaagaaggggtgaagaggacaaaggggcagagtgggtcagtctccctgctctttgtgaaaatcaggggacagggagtgtgagtaggggtttagaagagacatccccgtgcctaacttggataataatacagagcttgagcaggcctctggagtgactccccacattttaacctgataaagccccaaacttgcaggtattgtgatgtaccccagtatccctttaagagtataggaagttccaaggctggcctgggcggggagggtcaaaccaaaagccacaaagcaactccagaagaaactgtgccctctgccctttcctcaaagcctcctcctttacgagaacacaagttagagtgagctctgtccaatgctctatcccagtccttccttttatgtctaagaaccttggacttcctcaaagccacagagcttgctggaggtccagattccatctgtggttcctgaagccccacgtgggcctttgggttttgttctggttcctctgtcttctcatgctctcctcttcacctgcttcccacaggcagttcctgggagagagagagatcgaggtccttggacaacgggccatggccataaggctggaatgtagtaagattttaggagttttggtttctttgaaaaaaaaaaaaaaactatgggaacatgttttcattttaaccccaggtgtgggatatggggctgcttcagactgtccacagcagccgactatgatgtgtcttgtgctctagcaggggcatggttttgccagctgcaactagtttctgtgatttcatggtgtttggaattctgggaacttttcaaagggcatatatgtattagagctccgctaggttgcagtttgttaagtagtcttgtgtaaagaagaagaaattagatatccaaacagccaagatcaaacttgctccagggaacttgatgcctcatatcagcaggaagtagtctaacaataacgtcggcccctctttccaacccctaactttaatcagggatctctctcctttcctctctgtcctttttcctcttttatctaggattaggggttaaaagggtggaagaaagggggtggcgaaggatgtaagaaagaagaacccacaaagtagtaaagacagctacactgggggaagaaattcaggctgtgccgttcagagcatcatggcaggaagctggcaggatgctggatgtcctctgacacctgggaggaagcggaagcagtggggactgcggtgggggcagcaggctccctgccacatcctgtccggaggccacctcaagtctgtctcagcaccatggaaccagctggtgttggagagggcaggaacgttttaattactcaggttacaggggaagggggaatgggagtgaggaaggaatacaggcaaaatctaagatgtaatttgcagtaatacgattataactttgaacacttctttcctgtattcagacaggatacgaatgaatcaacacggcacctgggagtacccgtgttcttgggcctgtcatctgaatggggcagagttattcaaatatcagccacaccactaattagctgaatatctgaaaagccctgactctttccggagctacggttctggtggagctctgaggtcatagaacattccagaaggctgctccagtgcctctctcaagttcctccttgtctctttggagtctctgaaaatatcaaaacccaaggctatgctttcccacagaattcttttcctattctttgttagaactgaagcttggcgtgctgttggaccagcctgtaagccagctaagggaggcttaaggcaggtggggtgggtcttcattgggtccttctattatgtggcatcttccctatggccctgaccagacatcacactctgggttcactttatttgccacccttctaggatctacagactcagttcccatttcctggctgccccagctgaactgcctaccacccagggtaggctggtctccagtggtccctaatggtccctactgttcccggtattcctgaaggaggggcaggcaatcgctctatccagatctctctctctctctttctctctcttctgtcaaatgactccagtttcagcgtctttctgtcaaacagaagtgacttctacaaagacctttgctctctaactagttactcaatcaccagatactctgtttccaacatgtgtcaagccatggcctgctcttgtcaaacttcctgtgggaagagagaccttaatagaataatctcagaatgtgtaggcttgtaagcggaggggaagtacctggaaggcaaagagtctggatatgatggcttaggcctgtgattccagtacctgggtgacagacagaattgccaccagttggagaccagcttgggctatatagcaagttcgtggccagcctgtgctaccaggccagactgtttcaggagaacactgtattaaaaaaaaaaaagtcaaggcaaaactgggtagagaggtgcatgcctgaagttccagccactttggagactgaggcaggaggattgcttaaatccaagagttcaagaccaggctaggcaatttagtcagacttcatatcaaaaaaaataaatgatggttataggtcaaagtgaagccaggtggtggcacacgcctttaatcccagcactcgggaagcagatctctgagttcgagaccagcgtggtgtacgaagtgagttccaggacagtcagagctacacagagaatccctgtcacagggcaggaggtggggcggggacagagttaatgtgagaactatagacagggaccttgctacagagtgaatttcttaaccacactcttccaggatgtatcttgacttttcttagtacccagatggagacagggttggaggagaaaatgttctattttcttccaggagaaataaaagaaacgcacactcagacattcctctgtaaatatgtaagatacttaaaagacagagtcagttggactggcaagatggctcgatgggcaaaggcacttgtcgctacacctgatggcccgagttccatctacaggtcctgtatggtgggaggagagacctaactccccaagctcgtcctctgacgacctcatttgccctggtgtgtacaacttccctcctcccccaaataaatagcaatcattaaaaaaaaaatacaataaaagttttccatccactgcacatccatctacaagatgaccttttcaataatggccacaaataagacatgtcctccaacaaggaaatctagagctaatcaacagatgaactattagcttggttcagcctctaggtgctgctctcggggctgtagggcccgcaaacccctcatctttcttacaggttgtttcttagtggtcaaactaagggtactatgggatccgatagtaggttgaggaggaggccccattcctcgctgattggttctcccttatactgccacatcttggctgggagcctctccctctgcctgtcctgcctccagctctcaacttctcttccttacacaggttgctcgtatcacctgacctgcttggctctagttacacaacagtctgttgcttcctaggacaacttgtaatgggactcaaaggggaaagaggatttccagggcctccaggaagatgcctttgcggaccccctgtgaatgtgaataacccctcctacggggactccatgtatgggcgtggctcccctcgagttcctgcggtaaggctcttcggggcgtggtctgggtgggtgccttggatgctctcaacctgctcctggaccttcatgatgtactttgggaaaattccctttgctttgttacaatggctacccactcactatgggaaattgcaaagtgaggacaaaatcaaaggaaaacaggcaaactgtcactttgaatgtgaggtcattaagggacattttccacacgctttactttcaagcctaactttgatgtggttgagattatattgtgcttggcctgaggatggagctcagtggttgagtgcttgctcgtgtgctctgagctcaacacacagtactggatgtaatgatcatcactgtgtgattcgatcactgtcgaagagtcatctccagacaaattgcttacctatgtctgtcgcatcgtcttctaagccttggtagcctgattttaaaaaacattttaaatatgttaaatcaaggcggatagctgtggtttcaactcagacattctgaactggctcgacattcctccttgagaagcaggcagggagtcggtttctctggctttccctgtcctgcagggaagcatccttggaccctgaccactatgttctctggcagatttttgtggtcaacaaccaggaagagcttgagaggctgaacactcagaatgccattgcctttcgaagagaccagcgatctttgtacttcaaagatagccttggctggctccccatccaggtactctggggctggacacttaggctgtgatccccctgtccttagccaggagagagatgctcccactagaaggaagaaaagctagacaatcgaagcaggacggagcttttgctgtgtgtctgtaggagagggccgaacatcctccctccttcatcttctgggcagccctccacagtcccatgcccaaacagaagctcaccctgagccaggaccccctttgggaaagatgatctctctcacgcccctccccgaaggaagatgagagacgcctcctagacccagagcatctgctccaggaccagagactctcctaccttgtggctgcctaggcatgccaccatccttaacgtttttgtgttcctttggccagctcacccctttctaccctgtgggttacaccgtgaagcagcctggcacctgcggggatggagtcctgcagcctggggaagagtgtgatgatggtaatcccgatgtgagtgatggctgcatcggtgagtgggcccagcctgggaggcctggccagaggaggggggcggggaaggagggggagagggaggggtagagggagggggagggaaggggaataagcccataagccctggctactagctgtgatagttttaggcaaaggcaagggacaatatacccggggcagagggtggagaccctggccacctgttaattcttaccccatccaagcatgtcaacaggagaggtgttcagggtcatgtctccagagaggcctcccttgcccttggctctctttcgtccaagcctgacttcttggcaaacccataatgcaagctcaggaggaggaagtaatagcccccactttgtacactagggagaaaggcaggagaagccaaggctgaatcagaactccttgtctaaggaacactaggtgcaagccctgtcagctgtcagcggagcagtgggtcggctaacactgcctccagactcttggacagtgctaagacctggctctggaggatttgcaatgatctgggagttttgctgttttgtgtcgtgttgtattgttgtgtgttttttacataagggcaggaggtgagatggaagtagttttcagagtcaggacggagttcaacagctggctcccagttcatgtctctcttgaccgtaagagaggttttatatagcaatggttcatgtcttcagagatccctccagctgatgtataaagaggaggctgcttggggtcagtatgtccatccatgactctgtttgctgaggtcggaactggaagtgtgtggacaccattgctgtccttgctttctaggagctcaggggacagatggcagacactgagaggaagatccaactagagtaggattgaaaggcagggggagattgttactctctcagtgtagctgcatcagacctcttgacgacttttggatggccatctatggggtgctgactttcctaaggatcccttccacaggcatcatcataatcaaaagaaagtagtggggtctccttgccctttaaaaatgaggatgggtcaggcattgtagcatatacctataatcccagcttttggaaagctgaggcaggaagatcgccaaaannnnnnnnnnnnnnnnnnnngaggagcagcctccagcctggccacagtgttgactgggttgtggcctggggggacaaggcgagtatgacagcaggaagcataagggcatttcacagcctctatctgtctacccagctgtattcccagagcacactacccacctccacaaatctagataagatcaaaccagaattagacaaatagacacatacacataattttttccttttcttctcttgagagctggggacatcctacctctgactcattctgtcaaatcttcctctgatttgtcactttgtctgccactcaattagacatcatttccaagcatgggtgcttccttctacaaactaactttactcccattgtttgggattaaaagtgtgtattaagggcgtgtctgtattctagccaaagggattaaaggtgtgtgctaagggctgagccacactacaactagaaacaggtttttccagtaaacaactcaatttcggggcttcacggtgtgatcaaatatcctgcagcagctgaacatttacctctcttagtctcccatgagtgctacatcctcagccttagcagctctggcaagccttcagcaggccaggaagtagacatcacctttcccgcagttacctctatctggtaatgctgcctgaactaaggaagtctcctcccagccacctacccgatctacccagactgagctgtttaatagctgcatagagtcctgcagtgtcctctgacagggagctaacagctgaatagaacctggggctcgttcactatctcaccagagctgttactttgatctctagaaaacaccagagaccgttgtgaaagtgcgtgggtaagacactgtttaagggttatcatttggatttgcagatgtgtagactacactgtctgacttggcggcctcgattccatgtagctattcagttttaaaaatcattagactttttaaattcagttcttcagtcacactagacaaatttcaagagttcgtgagcttgtaccaagccgatgcagtccatgcgcacaagaagacatttgcattagtagagagcgatatcataaacagcatgggacacccttggaccttgagaagggggtgggtgtctcctagaggatgtgttaacatcagggctaatcattcctcccaccttagtccctctgctagagcttaaagtggaaaactccagagatccacaccccaaatagcaaagacttcctcgactttggcccttgtgagggctgtggtagtccaatgcagttggatcattgtttagactgtgctttcccctgcccactgtgctgtctgctgcccctgccctgagcagtatctttgcctcctgcagatcatacggagaccttcggtgcacccagtactgctccatcgactccacaccctgccgctacttcacgtgagaggctgcaggaacaggtgggctgccgcccatggaaccggtggctgtttctctacccttcacatcaagctggccttgccctctcccgggacagtgcctgttaaccttcatgtgacaaaacaaggatatattcttgctgctacgacatgcttttgactcagtatgactggaagagttttggaccactgaatcctgtcttaattaaaagaaccagaaaccttctatatgcccaccctggaaactgttccccctccccgaatctggctaaacagctggctgtaatgccttatctcttctggaaagacgctggctcagaccgtggatttggcttagcactgttaagcatacaggtatctacaggcctggtgtggtttgttctggtctcattcaggtttaggggtgctcctgcacaggcttctgcacctccaagcacagctgatctgatccaaggctgttgggcctctcaagatttgagaaccacaaagcaggaggtgagcatattctcttggtgcagctcccagcttcagacctgctgagggacccttcaactggccagagcctggatcaatttcatgttgatcagtcagaggaactgagaaagccactagatccaagcttagtcccaagaagagggtgaagactcggctgagtcacttgtgtgtgacccctaccagaacagagactttcctcctcttgaagttctctgaggggcgccatcttgaccttgtggttctctctgcatcttgacctctgtcttgacagtgccctccacaactgtgtcctgtgtgggagactcaccccacacgccctccccagggcacgtgctggtgtttcctcacgctggtttctctggtttggggctccacggccaagtccttgttggctgagggcaggaccttgtaaccctcttccatgcacaacttgcacaccccctgttccctcactgtgtgcccaacctcttcctttttcctgggattctttatcctaaaccctgcatatctgagaaccgcctttctcatatttcctgaatggggtttgactctatttggggaaaacattgcttttggtccccctccccaatatgcacacctgcctttgccactacataggctgcctctgggctgttggaagctcttcagtgagcctaagtcttgggaactcagcaggcggcaccttctcacacagcaagtccgagctgtgaactgtagttcgtgagagaaatcagcctgaggctgtcttcacaggcagacatctatcctgcttcctcttccggggcttctgggtgggcaaacaaggaataaaggtgattcttggctgtggcccactctcccttgggtgctgtggcgagtacttactaatcctggatggagtggaaagactgggttcagttctacttctcaggttcagatgtctggattcacagagcacccagcttccttgagggtacaggaggaaactgatgtccactagggtagtaaggcttgccagcacagtcctggctctaaccctgcttgagggcctatttgagatgggtggagacttagtgccacctgtagatctaactcagaggtcttctgtcctaaatcccaccccttggggagcagcacttgaggtcttgggtggcctgaccctcttcacaagcaaccacagagtacacatgtgccaggtaaatgtcccctgagaagcagggcgtggtggcacacgcctttaatcccagcacttgggaggcagaggcaggcggatttctgagttcaaggccagcctggtctacaaagtgagttccagggcagccagggctatacagagaaatcctgtctcgaaaaaccaaaaataaaaaataaaaaaaattttaaaatatcccctgaggtaacttgatggccagaatggagatagataaggagctacagtgtggtgagaacatgggtggacactccctaagttcacacctcctgaagcacccctcctagcctcagtaggaagagttagccaagggctgcactagcttgtctgtgtagatgatgctctgtaactctgtcagggcactccccagagatggcaagggattccctcagctgcccctgaggctgtcccatgagtggccgagattatgagtaggtcttcagagatgcgattagccaccaaacgaggttatgccagccgcagggtggtatttattgagtcacaaatgaaatgtcctgtggtgggtgggcagagttcagggaagggctctgcttcatttctccatatcctctctgtggccagggtctcttctgctagtgtgagctgactacagtgtggcttcaagctctatctgctcaaagaaatagaaaactaccattcacaggttctcaacctcaaagcctccagttaaatcttgcctttagactacttggcctgttttgggtcctcggcctgtttttaaacagtcagaaacatgatgtctgctgagtcaattagaactgggttcctaaacacgtgctggcaaagcacataatattacatttagtctatctgagaattctctagaaacataatggctacctggatgatcactgtgtggggggtggggggagaagaaggaggaggaagaggaggagaagaagaaggagaagaacagcacccaccagaggttgtcctctaacatgcatacacatgtacctgcacacacacatacatgtagagagaagaaggaaaatgaaacaggaaagaagggaaaggggagagaggagagaaaaagtggggagagagaggaggagaagaagaagaagagaaagaggagagagaggctcttctgtgtttaggctagaagttgaaactgctttccagagaggagaggccactttaaactgcagtgacaacagccagctggttgatgtcgctttaagctggctttgtggtgtctactaaggcagtctggtaaatggcaggggcatccgtgcctttgattccttcttggctaaggttttacacttccattactaaactgccttttttgatggtttcatcagtaagagaggtctgtgttctacccaatttactcccagagacacaatctgtcagaggtcaggctagggctcctcactatccagctgtgaagttacatgatgtacgtgtaaacaaaatatgacctctggagaatgcctagaaccaatacttagggaccatggtggaacagagtatttcctgcaacacacaagtatctatcaccctaagagcaacacagagagcacactggacatatcgatggagaacttccttccaaagcttatcatgattgctgggtcagcctatgcctcagtgactgaatctaactccttccatcttgtgtagtagagaaagccagtttaaatcatcagtgaaattcggttctcccacttgtgtggtgagatcagctcctgggtcaaggcccttgaccactgaccaaggatctcacttcaacattaattatatgtgtacaagaggtctcaggagcaaaagttccttggcaaatgtcatagagtgaagctgggcgtggtagttgtcacctatgatcccaggacttggaggctaacacaagaggaccatgagttcaggccagctgatgctacataacaagttcaaagccacccagatcaacacagtgagaccttgtttcataaatgaaaaaataaaaaaggacatgactacttctaggtatgcagagaagaaggtttttttttgttgttttgttttgttttatttcgtagataaaagggagagcatagccagaggcagacacatctgggacaatccagagtgaatgtggccaaactgagctgggccagattggggggagggggaaggatagggaagccacccaccaatagccctggccttggccaggagactggccgaaggggtaaagggtagaccaaagaccaggcaaccaaaatgactgcattacctaggaaagggttgctgggggaagtttagggtaaggggtagggtatgctaagtatacctggggatgctgggagaacctatcagccaggtatgctttgatatgttaaatagtcaacacagcagcttgtcctaggcttgagacctaacacccactccactgagctacggagggagtgagtccactttgcctttatcttagcggctcccatctgagggtccactcaagggaaatagcaatggttctgtcccacctctcctaacttttgtggagtcatttatgacactttgtcttgcaaggccctgatgtctccaatttcccaaggtgcaactgggaacagtaggtgaggcaggagtgagtgaaaagtgggggttggggcagggctttaaatatgcatccattacatctctgaagtctaggcttcctccttttgaatggaagagggcctgccttgaccaatagaatactatgacttcctcaggtaaggtcataggtcataaataggtcatagataggtcatgggtcagaatatatccagagggagccacttcttccctctgtgcaaagatggctgtgcaaagccatgtcggcccagtgcctgatggtcccagatattcaccaatgcctcctagccttttcatccaggtgccagacaggtgaatgacgccacaaaagaagacctgcccagccaaatgtgatcccaaaccttagtcaaagaattccatggtataaagtggttgtttcatctactaaattttgggtggcttgttaaggtaattggaatctggaataccattgggataaggaagatgtcatagcttcaattatcaacttgacacacctggaaagagggagcctcaattaaggaattggctctatcagattggcctgtgggcatgtctgtgagggaattttcttgattgctaactagcatgggaggacccagcccactgtaggtaatggttctcctgagcagctggccctcacccatgtgagaagtcagctgaggcaaccagagggagggagaagtgttcctccgtgcttactgcttcaagctcctgctgtgagtttctctcctggcttccctgggtgatggactttaacccataagccaaacaatccttttcctgcatcaagtttcttttagaaaagaggagggaaaggaagcaaactacagatcagaggggtgtgtgtgtgtggaaatgaccaacaggagctgctcacttgcagttggtgccctctgcaggaaccagaagttagtatcttggaaactttgctcctactgggatttcctatctgagagtccgatacacaacggcaaatccccacaggctttggagacctattatcctctattttcaaccatagtggagaaatggggtctgtagccatggcagacggatccttttaacagtcctctccatgtctgcactctttccaagagtagactgtaaaagccagcgttaacctgcaagccccacttgtccaaggacaggtaacaggaacgctgggggatgtggtgctttggaaataacaagccagatgcttttgctcgcctagataagtttgtttgcactagatgtgcttgattggctgtgaatggtgaatgtaaagaagaaaggaaaggaaaggacatgactgcccctaggtatggtggaagagaaagttcattgaagatataagggagagcatagccacaagcaggcatatctgggagagttcactgtggtcatagctctgagctaggagagggggagggggaaggagaggggagagagggcaatcagtacaacatccaagaggccggaagagggtgggtaaccagaataattggattataagggaagggcagctgagggaagggaagcctctggcctggaggagtttaaggtagggggcagagtatgccagtcataatctgtaacaggtcaggactgaaaaatactgggagcacctggcagccaggtccactttgatctgttaaataggcacacctcagccatttatcctcgggtttgagagttaaaaggcgggaaatatgtcaggatatatgcctgtccctgattggacctaatgggaaatgcactggccctattgcctttttagacctcttcaaaatatgactcctcaccttttcctgggaaccccagaatggacttggccagagtccattaattaaagttcgattcaaaatttttctcaaaattgagaaactgttttttcctctcactattttcaggtttaacaattggaggccccacggagatggaccacccaaatttggttgaaactgggctcttcattgtgggtctatgcttttattctgtaaacatcccaggtgaacagctggacttgaaaggaaaacagcaagcatttttctttcccccacccccaggaagtttctaaattttgcttctgggggatcctgctctggaaacataagggctctaatgaggccctacaatcttttgtccagggcaaagggagacacactttggtccactggttgtttcaggttaactgagagctcatccagagccacaggtgtttttctcttctgacctaccttggagccctgaggacaccccggtgaggtgaggatctgaagaacttggaaaggccaggcacctgggcacccattaacagggtttcaccgtctaggcagcacaacagagttagggaaccataaggacatcccacaacactgggggccgagcctagagtttggaaaggcccagccttggatgtcaggcattccacgagctgaagagaactcagagaggcccgatctctggtgggttcctagatctaggttgttcagggaggcaacttttttaaaaaaaaagagtagcctattatttgttaagagactttctcttggtaaggacctctgaaggacaattcctgatgtcattgccttttgttttctgttgttatttttgctgtgtgtcttgccttgtgtctgaacctgtcttttcctgagctgacttggagctcaacgggctcaagccagagacaagctctgatgaagcagttgtgtgaaccgatgcaggagggcgaactcactgccagctgactgtcgagtggatgtctcagatgtgtgaagatgtgtggcaggcatttcaggtggaagtgggcgagttaaagtggccggatgacacatacagggatccagcttaaccctcaggtccgatgctaagcctcttgccacaccaagatcatgggctcaggtgcctgtgtacattttggactccagaattttattctttgccatgtgatacctgtacaaattttatttctgacagagtcttcctatgcaagccaggctggccttgaacctttaatacccgtctctacctcctgggtgctggagtcagtagtgctggtgtgttggaataccaccttgcctggaacttgtatatttaaattagaattaatttaaattgaatatttaaacatgtatgtcctcaaatattcaccatttcttcacagcgaaaatttcgaaatactctgtaagaaatgatgttgattttaatggctgaatattattctattgtgtgtatacacatttcctttatcagttgataaacacttaggccctctctggttcttagctcttgagaatagtgttggaatgagaaagcagatgtcccttgaacacactgacttcctttccttcagacacatacagtactaggatccttgctcatgtggcaggtctaagtttaaacttttgatgggtctccatactgttttcaaaaattatttcattttattttatgtacattggtgcgagggtgtcagatctcctggaactagaattacagacaattgtgagctgccttgtaggtgctaggaatcgaacccaggacttctggaaaattggccagtgctcttaactgctgagccatctctccagcccccatattgttttttttttttatatatatagtgaatgtattatatttccatcattaaagtgcaaggatttttttctccatgttcttgctaacaattgttttttcagtcttttggcattagtcattcataatagggtgaagagagatctctttgtggctcttggattgtgatttcttgatagtaacgttgaacatattttcatgtacccatcttaatatctttgtctggtgtgtgcacgcatggtaggcatgcattatgcatatctgttcacatgtgcatgaacacatgtatgtgggggcctaaagttaacatcctctattgctctctaccctatttattgaggcagactctctcagtgaacctggcgctcaccaatcctggctcatctatatagccagcttgcccctgggatcccagcattgcctccttcccactgggattacaagcagggtgtgtgcacacactcttgtatatgtgcactatactcctgccttgcttgttttgaaataggtgctggagatcttatctcaggtcttcatacttgcactgcaagtctttcttactgagccacctccccagctcctaactgtatgtcttcttttgagaactgtccgtttagataatattttaaaataaaatgttctcagagttctttgtgtattctgcatatattgccaatattctctcatattctgctagtattgattgttccctttgctatttagaagccttttagctttgtgacacagtaaattattaatcagctctgtgctccaggcaggtgcgcacctgtctctgcacttgcccaagagctctggattcacgaatgaaagacacacacgatgcacacgcacaatacacacacacacatgacctttataatatgatatgccttagctagctcaatggttgggccactcttgaaccttcctccatgcggctaacacattcacctctcaaattcctgagttaatacttgctaaatctatatttcatctctgctaccccagacccaatgggggagtggcccctaggtccactttccccaatttttacacttctctccctcctgcaccttttccttatatttttggttgtgagcctagcctttaacggctgagccatctctccagcccaatcctgcaccttttcctgtgttctcctaatggtggaatctctcttccggtctgcatttcttgcctaggaatcctaaaagtcccacctctatcccccagcccagccattggccactggctctttattgaccagtcaaaaaaccaactgacctgtagcagacatctaaattcccatgtaagcacaaatcaaatccctaacagctttgcatagtcctgtttgattactctgctttcatttcctatgcctttggggtattgtcaaaatgaacaaacaaacaaacaaacaaacaagcaccatccaccccatttgagattacaggctttaccaccaagctagctccttgatgttttcttctagtacttccaggtcttacatttcagtctttaatacattctgttgtcattgatgattttgtaactagtgagagatggggaacctagcttcattcttacatgtgtggagacccagttttctcaacagtatttattaaaaattcttccccttctccaaagcatgttttcagcccttctgttgaaatcaatcatatgtcgaaggctgggtttccttgtaggctctctattctggtcttacttatgcatctattttatactgatatattctggtgagggttggttttgggggtgggggagggaatattgtttagtttttgagacaagttctcactatgtttttgaacttgtggttgtcctgcctcaagctccctagggtggaagctgccaggctgttttgattactatagctttgtcatatattttgaagttttctaatctgttcgttttgttcacggtttcttaggctgtttagggatttttgtgatgccatttacattttagaattttgctttagttctatgaagaggctgtgatagtttataattgatcatcaacttgacaggattcagaaccactttggagacaactggccatgtctgtgagggattttccagattatgttaaactgaggtgggaagacccaccctaaatggggacagtaccacagatcccatgggcaggtctcctgtggtatgtaactatgagaaagctagttgaacaccggcatcatctggttgtggtaaatctccaacccaaatatgcccggcattgaaa

SEQ ID NO: 679 - DNA, 1351 bp, Mus musculus
acaaagctgagctaggagaggctcccagcagccttgccctctgacttgatattaaccagacctggccagcatggtggtcctgaatccaatgactttgggaatttatctccaactcttcttctgctccatcgtgtctcagccaactttcatcaacagtgtggtcccaatctcagcagcccttcctggcctggatcagaagaagcggggcagccacaaagcatgctgcctactcatgcccccaccgcccccactcttcccaccgccgttcttcagaggcagccggagcccggtgagtactccggacttggacatgaagaaccttctggaacttgaggcgtcaccatcaccctgcattcaaggctcgctcggctctcctgggccccctgggccccagggtagacctggacccccaggtgttcctggcatgcctgggcccgttggctggccaggccctgaaggacccaggggtgaaaaaggtgacctgggtatgatgggcctgccggggtcaagaggaccgatgggctctaagggatccagaggtgaaaggggtgacttgggtcccaaaggagaaaagggtttccctgggtttcctggaatgctggggcagaaaggtgaaatgggtccaaagggagagtctgggctggcaggacaccgaggccccacaggaagaccaggaaaacgaggcaagcagggtcagaagggagacagtggaattatgggcccaccaggcaagcctgggccttctggtcaacctggccgtcaaggtcctccagggcccccaggcccaccatctgcaggacaacttgtaatgggactcaaaggggaaagaggatttccagggcctccaggaagatgcctttgcggaccccctgtgaatgtgaataacccctcctacggggactccatgtatgggcgtggctcccctcgagttcctgcgatttttgtggtcaacaaccaggaagagcttgagaggctgaacactcagaatgccattgcctttcgaagagaccagcgatctttgtacttcaaagatagccttggctggctccccatccagctcacccctttctaccctgtgggttacaccgtgaagcagcctggcacctgcggggatggagtcctgcagcctggggaagagtgtgatgatggtaatcccgatgtgagtgatggctgcatcgatcatacggagaccttcggtgcacccagtactgctccatcgactccacaccctgccgctacttcacgtgagaggctgcaggaacaggtgggctgccgcccatggaaccggtggctgtttctctacccttcacatcaagctggccttgccctctcccgggacagtgcctgttaa

SEQ ID NO: 680 - protein, 429 aa, Mus musculus
PDLASMVVLNPMTLGIYLQLFFCSIVSQPTFINSVVPISAALPGLDQKKRGSHKACCLLMPPPPPLFPPPFFRGSRSPVSTPDLDMKNLLELEDSPCIQGSLGSPGPPGPQGRPGPPGVPGMPGPVGWPGPEGPRGEKGDLGMMGLPGSRGPMGSKGSRGERGDLGPKGEKGFPGFPGMLGQKGEMGPKGESGLAGHRGPTGRPGKRGKQGQKGDSGIMGPPGKPGPSGQPGRQGPPGPPGPPSAGQLVMGLKGERGFPGPPGRCLCGPPVNVNNPSYGDSMYGRGSPRVPAIFVVNNQEELERLNTQNAIAFRRDQRSLYFKDSLGWLPIQLTPFYPVGYTVKQPGTCGDGVLQPGEECDDGNPDVSDGCIDHTETFGAPSTAPSTPHPAATSRERLQEQVGCRPWNRWLFLYPSHQAGLALSRDSAC

SEQ ID NO: 681 - DNA, 91617 bp, Homo sapiens
aggaagaaaagcagagcatgaactaggcaagttcccagagggaacacatttctcctggcaaaggctttgttgagggggaaacatttaaatttgggagagctgggaggatttggacatgaagggatggggacaggaggctttccaggtggagaaagtgcagggattctggaataggatgtcaggccagggaaaacacagggcaagctgtccttgctagcagttcccagcaggagcaggagctggagtgcaataagcccaaataaaatgttcccccactgtccagccgtccaaatttggaagtggtcttctgctatgctgagccaccagaatctgtcagcagtctatcatccaagcatacctcattctatttctcttcaagggctcccagccaagaggccctgccactgcccccaaaagggccatgatcatgcccacactgtgccctggggtggggcagttcactcacctgtctccccatttccctactgtgtctggtcctggagctgggtagtgtggtgtaaagaatacaggctttgaggtatgtgggccagctttgtgttctagctctgtggccttgagcagattacctaagctacctttgtcaacctctatccatagagagagtaatacccatctcatagagttagctcaaaagcctagaggcttccaagaaatcacatctgtaggaatatcataggtatttaatgattggtggttgtagttggtattttcatcccttaaggtcagaaatgactattccgtgaatacttcccagagaactacaattaaagttcatctcttaccttcctcatcgactctggcactccttccaaattcctgtaactcagatggcagtcaagcctcccagatcaccactgaccccagttccatagctctgatcacgctaagtcctctccagatttctgcagcgtctcaggaaagacttttctccccgtcccatccctgtgttgtcgtacgctagcctagaagccaagcctggcacctgcacctgtgtctgtgagaaggctgctcactgcaagccctttctgtgttctggtaactttaataaaggcctggaggctggggagaaggaggtgtcaggttggggtgagtgtgacctggaaaacaatagaggtgcagagaattgggaggggaaggagccagggttcagagaaggaaaacacacaccacctctcaaggagaagcaacaacattccatcagaagaagacaggggagggtggggtatttggtggcgctgcagactttggaaaatacaatctgctacacgaccttaaatatctatccaatctgatcattactcaccacctccattgtcacttcttggaaaaccaaccatcatctccaccttcagtgtcctcctgttaggcctcctacttccccctacaatctactgtggtgaagccaggggtgatcctgttacaacacaaatcagagctgccactcctgttcaaaaccctccactgacttccatcttaaaacaaagtccaaactccatgcgtggcctacaaatgccacatgacctgaccccagtggcttcttggatcctatttccttcactctccctcttgcttactctgctcgagccacgtgtaactccattctgctcctcctggaaaaaccaagcttgttggtgccttaggatgtttgcacctgatgccttagaatgctttcctcccagatatctgcatggctcgttttctcaggtctctgctccgatgtcacctcctcagggaggctctccatgatcaattatttctctccattattctacattacactgaacaccagtgtgcttctgtcttgagacctccttagaatgtaagttcccaagggcagggacttttgtacactctgtgcatgctgaatctacagcttgtagatcttggcctgtgttgtgataggaacacagtaaatatttattgaatgaaaaaataatgggccaggcatggtggctcacgcctataatcccagcactttgggaagccgaggcaggtggatcacatgaggccaggagttcagtaccagctggccaacatggtgaaaccccgtctctcctaaatacacaaaaaaatgtgccgggcatggaggtgcacatttgtaatcccagctactcggaaagtgaggcacaagaatgtcttgaacatgggaggcagaggttgcagtgagttgagattgtgccactgcactccagcctgggtggcaaagtgagactctgtctccaaaataaataaataaataaataacaggaaaacagaaaaataatgagtgaatgaattctctgacctctctcttaccttcctgaatcattgcttttctgtttctgtcttctctagtttaaccttgttcatctacttcctgaggacactcttgtggttttaaaacttcacagttacatttagtaactctttatataaggaaacagattgccacataatccatgataactgggtggaaaatttttaatctctcttgtacttaaaaaaaaatcacctgttcctcttacctgagattgcatatgtttacattttggccttggagataaccctttccctgtggctgagtatttttaaagcactttaaggccttaagtggattaaatacagaacatactgtgacctcaggtttgtgcgacttgtactacaacctgcaggatgggaggaacctccttgtcacagggattgtaaggcttcattggagcagcgtgggtgcctatgtatgttcttgtccatctctgaggagattatttcctacacagccagcctcagctagtaggtgactctacgatactccctagcagtgcctgattattgcgcatattggctaagctctctcttctcataactgggatgcaggatgcataattatatgcagtaagagtggttccctttcttaccctttacttctcagtcttggtcagcattagcctattgttattaaaggttttgccaaacacagccacatgcccttgatctccacctttagctgggcagagacaagatccaagctttgaaaatggctttgggccaaatcaagttgctaggtgggccttcctccccaccccatccaatctcctcaaatgcaagaggaaccatctctccaggaggcaaggtggtgtggttggggactgggattggggtagggggccggtgatgggctgagggtgttgggggaggtgatgggattgtgggtggtaatattatttcaataaatatataaaaataaaaatttgcaattagcttgtgttaagtacaaatagtatactaggaatatgcatttgaactggctagagagttcgcagtgaatgtcacctaagtttcccagggttcaccttaggggaaatctggggcaagctccacctgaaagagcgaggcagatttgtttcgccctttggtggcttactaaatattatgagcttacttattcctatgattcttgaaataaataacgttaggatttatttgttcaggattcaggatgtttttccttcctatgggctttagttcaagaaccatcaatcctcgggttgtcataaagcattttggggtctcctcggaagtccctggccttcccttatgtcctgtctccctaccaagaatgtggttttgcatcctcagagttgaatgattcttggactcacaacctttctgagtctggtttcaggtaaagacaggttgattggtgttccatggagaacatgtctagccctaaaggctagagcactggtgacatctgattcgatgtgtcattcagcagcctgcacgcttcatatctagtcttgctaggcattgttccagccagccaatgacctgaacctctgctgctgtccccagaacttcacataagcctcagttttctcatctgtaagatgggaattataattctagtcttgctgcctcacttatgactatcgaatgaaaaaaagataaggatttcatacaaaataaagccctatatacgattatttatcataccagtaacatgtttagtgtataacatgtagataagagaaaagtggggagctaaataataagaattaaataaaaatgggtttgagggtcaaatatgtttggggtaaaagcaaagtcaatgcatttctttactgccggacttctcagtgtttttgatatgccaataaatgttgtgaatttccaacagtgacataaaacaggcagggtttcctaatgtccatgaactcctctgcttttcaaaaaccatgcatctcagaatgagcacaccccccagcatagtatgaaaaacactgtattggttaagattactgtcgctagtgttgtgattgcactccagatggctcaaggccagcctactatctctgccctgaaagtgaggaaatctaagctcctggccctggagatgtaactatgggcgagatgcctggataagtctaatgggtcttatcagactcgttagctcttctggccctctgatgaagctatgctttgcattcccaggccccatcagttctggctttgatttaagaccaagttgccagggaacagtgagctgtgaggaggggctttcctggggcttctcagttgcccaggcttgcctcccgcctgctggtgggaggtggctatgacctctgcataactgaagtatcatccattctgggccagagagaccaggctcagagctctgtttctctgccaggaccaatcaataactctctgctcttcacaacacgtctgcaaaagacttgttggacctcgggcatgcaggattggcgcctttttcctttctgctgttttctttactcctaaggccgccctaacttgattttgtaaaaatagaattttgtttttaaattacaagttaaataaagctcattgtaaaaattttaatacaaatatgtataagcttgaaaagggaattctccttttatcttctcttatcccatatactgtgggatgtacatcattctagatctttctctacgcacatataaaaactgataaagagatttgcttgtttgttcagaaatttggtcggatatactgccactttcttatttcactcgacagtgttccattgacaatcttccatgtcagtgcatacatgtgacatttttcttattttttaaagtcaagtttactgatggaaaatgtacatataataaaactgaccctttttgagagtacggtttgatgaattttgacaaaatatacaaccactctaatcaagataaagaatattttcatcactgctagttctcttgggcccccttctcttctcacaattctaacccctggcaccatggatctgttctccagccccatagttttgccttttccagaatgtcctactaatggaattatacagtatgtagcctgttgtgtctggcatccttcacttagcataatgcacttgagattcttccatgttacttagtttattccattttattgctgagtagttttgcattgtatgtacacatgcagtttgtttatccattcactggttgatggccatttgggttgtttctagttttagctattacaaatgaagtggttatgaactttcatgtacagtctttctgtggacatgtgtttcatttctcttggataaatactgaagagtagaattgttggatgtataataagtgtatatttgactttataaaaaactgacatttttttccaaagtggttacaccattttgcattcccactagcaatgtttgagaattccagttgcttcatatcctcaccaacacttggtattgtcagtcttttaaattttagctattctagtaggtgtgtagtggtatctcactgtggttttaatttgcatttccctaatgactaaagatgttgggtatctttacaaatgtttatttgtcattaatgtatcttctttggtgaaatatatattcgcatcttttgccttccttccttcccttcttccctccttccttccctcccttttttgagacagggtctcattctgtcgcccaggctggagtgacgcagtaatggctcactgcagccttgacctcctgggctcaggtgatcccttatcttcaccctcccaggtagctaggactacaggcatgcaccaccacacccagctagttctgttttttgttttttgttttttgtttttttttcatagatacagggttttgccatgttgtccaggctgtgtccatttctttatttcatttcagttttttttttttgaaacagagtcttgctctgttgcccagggtggagggcagtggtgtgagcccagctcactgcaacctctgcttcccaggttcaagcaattcttgtgcctcagcctcctgagtacctgggattactggtgtgtgccaccacacccagctaatttttgtattttgtgttgagatggggtttcaccatgttggccaggctggtctcaaactcctggcctcaggtaatccacccaccttggcttcccagggtgctgagattacaggtgtgagccatgtctggcctgccatttcttttaattaagttttttatcttattattattgagctgtgaaagttttaatatattctagctacaaatcatttatcatatatgtgtttggcaaatattacgtcctagtttttggcttggctttccaatttagtattctattttgaagagcagaagcattaaagtttttataatgtccaatttaacttttttaaatttaagatttgtattttgcatcttatttaaaaaatctgtacctaacccagggtcactaagattttctcctgttttctgccgtaagtttaatattttagcatttacaattaggtctgtggtctattttaaaataatttgtatgcatggggcaaggtaagggttaatctttatttttatttgtttgttttgcatatggaagtcaaatttttccagcaccatttgttgcaaagactgccttattctttctagtcactgcataacattttgaatggatgtcccaggatttattccaccaatgtttcattcatggacagttaggctgtttccaacttgaggcaacaatgcacacccttgcacctaaaccactgggtagtgaatgagtatttctgagaacttctgggtcagacggcatgtgcattttaagtttaatggggccaaaagattgttttccagtgtacagtcctgcctacaaggtctgagagggaagactctgactttgaatggctttattggtgtgagcttttctcaaatctcaaatagtttccttctggacaaatctaatagtctatgttattagattctggaaacatcagagcccttccaggaggatttgaagaaagatgataatttctgtcttggtcagttagggtaatcttataagaaataggttcataaaatataagatacctaaggaaatggaaatttactaaaaattgtttaataagtattggggccttataaataactctgtgttggggcctcctcaaagggtagaggctcctgtcgtaactttagatcagcagtgactcattctccagtgacttgaattataaatttagcctctctgtctgcgggtcctaattcaaggtggccatccatagtccctctcacactctcaccatactcaccaaagccctcccttgtatcaggcgcaggccacccagctgtatgtgcagaggctccaaggggtgctggggaaatgcaagttgtgcagaaagctggagcataaagttatgctacttttgtacgttcttcttttttcatcctacccagtggtgtgatttgatcaaagtaacttacattgttgaggatctgttaggtgacaaggactgtcctgggggccttgagagtacatagagctgtgggatagtcccctatctttagggatgttaatgccagctaaatagcaacacaaggtggtgttcaaaaacaatagcagcaggtgtcaccggtaggacgtattgacagaatttgttccaagggtatggtcagtggtgaattctttgtgctgagagaaggaagaagtcatactggctttgcagaggaggaatctgagctagatagtaaaaattcatattctgacaccaagttactcaaaagataccttcctcccaggtagactgtaccttctccaagccactggaagctggctgctggggctccaggagttaacaagagtgagcctgagaatgtcctgattgagtttggccagcaatcacagctccttcttgtaaaaattttgggagcagctaaatgggggtaccctctctttaatctgtcctataaattttgaatgtagttcaggtatatttttcatgctttcaaaagctttccttatcaactctgtatcagttagctattgctgatgagcaagtcatcctaaaacttactggtttgaaacaatagccgttttatttgctcatgacttcgtaatctgggctgggcagttctttcgagggtctcacttggggtcactcctgtggctggcatcatctgagaccaggacagggctagatgttccaaaatggcctcactcgcctgttgatgctgcatctgggatagtcagaacagctggaggctggctgcttccccctccatgtggcctcttcaatagtccagactttttaaagtggcagctgattttcaagaaaaggcaaaagcaggagctgccaggccttttaaggcctaggccaggagatggcacagtgtccctttagccacattctattggtcaaagtaagtcacagagccacctcagatttaagggaggggaactagccctgctttttgctgggaagagtgtcatgcacacactgggttgggaggacttttggaggccatctttgcacccaggctaccatggctcccttgggtctcctttgtgctgttcctatgtgcaagttctaatccgtgtaggattcatccccattacctcacttaactttccaacaaacctttaaagggaacattgtctccattgtatggatgagaaaactgaggcttagagaggtgagcttgtccactgccactcagagctgagagtcaagcccaagtgtggtgctacagctgtaaaatatcactttataccacgccctgacccaactccaccttccccataatgagcacaggggcaggatgcccaccccagcatccagtaactagcagactgtttctgagttaactcctatgaggcatgtaatatgtaaattaaagcaaaatgaacaactctgtgaattattattttgttttagtcatctaatcatctctataacaggcttttataaactcataaaaggtattaagaatgtgataatttttatttgaataattttgtctagccaaagattaagttagtgatgttatttttctgaatatagtttgataaaaatcattcacttttctatacttttactgttttcatttattttgccttgcattgaatcaaaaggttgcagcttttggagagagaaacactttttcacagagaaagctgtttggaaatataaactacttccttcctcctttttattggatgattaaagaaaaaaattaaaagttaactttacatttgttacacaatgggtaaaaatgtcacaggctgacagtggaggggtttttctccatgaaattcagtttgaatcaggagagttgtttctgcccagttccaaggaggtagatggtggcacataaccaattaggaatctctctgcccttgaggactgcctccagtgaacatctgagacttggctgccttctcatcacctcttcactagccacttacctcagtctccaaaaaagaaaattttgacatcttaattttaatgtgggcatttgatatggagcttgagataaatataactctctgtagcatggagacagtttaatgggaaatggttggcattctttcttggtaaaggcatgggagacaggagaggtgggggagggagagagagggagggggtgaggaggagggagagggaaagagaaagagggaaagacacacacacacacagacacacacacacacgcacacacacacacacaaacacacgcgcacgcaaacagcagtgaggaagagaaaagcagagataagcaaggctccgcagcagcctcctttctaacttgaccctcgccagaccctggccagcatggttgtcctgaatccaatgactttgggaatttatcttcagcttttcttcctctctatcgtgtctcagccgactttcatcaacagcgttcttccaatctcagcaggtaaatgatggccacaactttcctctcttccatctgtcaggggacagggggaggaaggaagattgttttgcaatgtgtcctgatgtttttgccattcaactgttggtggagggaggttggaaggaagacggccaccccagcagcttcctgtcacccgagcttgtctcggaagccccttctgtccttgttccaaccggctcctacctggctgctcaaagcagagacactttgaaaaatggtttctgcctcccctattctccccatttgctgcatgatttcatcttggtcaggaatttgggagagcttaaaagagacagaggtgtgcaagtaatagagaagtgagtctcagatgtttctataaatacatctctgacctcttcgaagggggcttgcctcacaggggctgttgtggagtaaacaaacctctttccagacccagatagcatccatggccacaatagtccctcgaagggaaaatgcaggtggcaggggccggtggggtggggggtgaacagcggcggggcagttgcagcctcaggactaggttttccctttctccagacctgtcttcctgggtgcgacttcccttcagcctcagacaaggcagctggaggtcctgagagaagtgagctttccagggagaagtggagggggttccacagtgacagccaggtctggagctgagtgtgtctgccgggtatgaggctgggagatttggggaaggggctgtgtctgccagcctgcaaccttttctgaggtcagcagcctgttgcccttgtcttgtctgacccagagcaggggaagtattcggttactagtatggcctatttaaacctttctgaggaaactcaaatgtttccggagggcttgaaggaggcaggcagaccctcacagcccccctcaattcacctcagtgacccctgactctccccagcaaagttttagttatgcctccaacatgagtctcataaatacttcaactgagacagaaatttcactatcgctgcctttgctggaaacacagggagggccagaaatgccaggctctcagagagggcacatctctgaatccagctcccaactgctgtccattgataaaaacagctcatcagcaagttgtgtagccaacgtttgtgggccatgagggagtgactcagagactggtgtgaggctaattataaaagtgtgagaaacagaaggaggtgggggcagatttgtggagaattcaggagggtgggcaggaaaggtgagtggtggtgtcaccgtgggtgtgtgcccacatgcccctgcaaattcaagttaagagcatcaagcttcttctaggagtgagtagtcattattcattccccagttcaagggagaagcttgagagttaatttggcctaatttggtggttcttaatcatgtttgggtcatggattcctttgagaatctgctgaaggttaggacttaaggaaactcagttttctggttctagccctgcctctgatgagctccctgacttctgagagacagtggccttacactataagcaccatgtggccagggcatgtgtctctcttgtactttactgttttcccagggtcagaacagtgcctggcacatagtaatcaataaatatttgatgaatgaatgaataaaagcttctcatctgcaaactggggtttaccatcattttgtattacttaatttaaatagcaccaaagtggttaaggagttcagaaaactagagagaaaagaacctctggttttcttttgaactctttgccttggagagcaccctggcacaacatagatatctcttaggtaagctttttgcagactgtaccaatcagggcaacagcaggataaagaagcaactcaggtggttcagatgaaaagatctgaatgaagggatcactttgagaggtgtgggcggggttaagggaaccaacaaggaatgctgaggcacctagagattagcaactgcaatatgcctttaccaccctgtgcttgaaaaggcaagaggggcaaataggaaaatggatcccaggcagatttggagccttagagaaggggccattaagcaagagcattggtcatggaaggccctaaagcagggagaaagtgaaggagaagtacaccatcttctctctcctcccatccaagcaccttttggcagcgcctctcattggccaacccaacttgaagccagagggcagagcctggaggtcagggactggaacactgagggcagagagccaaggggagggttgggatggagaacaaccagtgcgcacatccacaggcacttctggctgggaatgtggtcattagacattagggaaaacaatggaatagacctagcgggaatcactaaggtaaccagctcagtatcacaaagatatgttttctccggtggtcacttggctttgcccccctaatttagtcaccatggctttatgatagcacagttcagaaataaacttaagctttaaaaaaatggaagctgttccttgtaatcctttggaaatattttccaacagtttgatataaaatattctatattcagaagcttatagactcttaattcttctgaagataggctgtgtatacacagaaaataagggcaaccaggaaaatcttttcattctatgcattataacttagtgagtgcctactgtgtgcctggcactctaatgtgtgcttcaagggacacggagacaagtaggatgtggcctctgctctgagggattccatgatcacctgcttttgaaacacaggtggcgtgtggtaaatgccccggaaaggggttgtgatggaggaagagctctcatgggcctgtaagccagtacttaccttcatagataatccactccttcactgtcttcaagaaagactattccagcagtgccatgtgcagcaccagctatctggatcagaggttcattacctggcaacctcctctgctgggtcccagaggagaaccaggaaggagcaaaaaacatcagaggccagaactgatgatagaaatgccatcgctaaagcacataatatttgatacacacaaaactatttcaggcctttattctaagcctattaactcttactttgggcaccactctaatagacatagatagtccgtgacttgaaagctggtgattatatatagcatattaaattggggagggaggagttgctgcttaagctagacacaatgacggatgataagaatgattacaagaaaaacaataaagaattaggaaatgggcctgagatttcaaaaagaatagtaggccaggcgcggtggctcacgcctgtaatcccagcactttgggaggctgaggtgggtggatcacctgaggtcaggagttcgagaccagcctgaccaacatggagaaaaccctgtctctactaaaaatacaaatttatctggatgtggtggtgcatgcctgtaatcccagctactcaggaggctgaggcgggagaattgcttgaacctgggaggcggaggtagcagtgagctgagatcgcgccattgcactccaacctgggtaacaagagtgaaacttcgtttaaaaaaacaaacaaaacatagtagactagagctacctctagagcctctgctctgtctgtaacccctgaaggcgtcattgactacagtacattaactggttttcattatgatgaacatgaatggaccagtgatgactggattgtgcctactttatcttgcttaagaaggtagataaatgccatttatatattagaatgatttctattgaacatggcaattattaaaaatgccaagattcccacgtttggtgtattgcgttaaccattggtgggtaataaaccaccgtgacacttggtagatcaaaacaacaaccatttattgttgaagttcatgtgtttgtgggtaaactgagggtcagctaatctagcttgggtttggctggccctggctggactcacttatgggtctgtggattgacttggctccagtatccacccacagtggtagctcagtagtagtacaatttccagaatgtggaggcacagacacaaagacaatgatatttaccggagggcaggccttccacacagtttaatttgtgtaattctcgcagcactcctgaatgggggcagcaccacttcccctttcagatgaggaaatggcagctcagaaaggttaagtgacttgcccaaggtcatgcagctgttatgtgggagagctggagactgaaatcctgcttctttaagtccagggctttcaccagtatataccaaatctccttatggttttggataaatagtgatattggcctttaaagtcctgtaggctaccctcctatcctctggaaactctcctctggattcttttttgtttgttttttcgagacagggtctcgctctgttgcccaggctggagtgcagtggtgcgatctcggctcactgcaaccctccgccttccaggttcaagcgattgtcatacctctgcctcttgagtagctaggagtacaggcacgtgccaccaagcctgacaaatttttgtatttttagtagagatggggttttgccatgttggccaggctggtctcgaactcctgacctcaagtgatccgctggccttgacctcccaaagtgctgggattacagccaccacgcctggcctggattctttattttccattccctcctgctttttcctcagtatatcaatgcccaaagctctagcaaaagattgaatattgctttatattaaagtgtgcatgacttgccagggtactgatttatctctgctttgatggttcttgcattttaatggaggttaaggatctaagctaaacaatactctagtgaaatggtgtcaaccagggtgtttgggggtggggagccaggggaatccacttcacaagccttccctttaggcattgtgagccgacccatccccatcgatgaccctgcagacacatgtggtttccctcattgaatacaggattttccaggaaggcaggactcttcaggtgatgtttgggtccgggtctcagaaaccagatggtgagaacacccaaatccagtcctgtagagtgagatcagatggaaggatgtgatttctgtctgggtactggaatcttctcctgttgcctgctgggatgtaacccagggcaggcattttgtggcctgtagggcctgatgtccagccccgtgctcccctgcctggaagccagccaggccaccacttgggaactatccatattcttggcactagattatggaccatttatttgtgtctgatgctgatcagctattgtttaatgctccgtaatgcacttgccagccatctcctctgatttaccgccccatatttcctatggataataaaatcagagaggattcttaaattaaagaactctctaaggggtcccaggcttcctgccaaccccatcccaagcctctgcgtgcagcagtgggctcatgtcctgttcagacacagagaggggtgggtgtgagaggtgggagactttcccttctgataagttgggccaaccccccaccttactgtttgccacactcacacctcctttttcagatccacagccaccactgccacatccatacaaaaacaacacagctccagagtgaacagagagccgctctggcttcgatgagacaccaaataacctcgtgtcccattttctttattttattttattttttattttgatttttttgagacggagtctcgccctgttgcccaggctggagtgcagtggcacgatctcagctcactgcaacctccacctcctgggttcaaacaattctccagcctcagtctccggagtagctgggattacaggctcccaccaccacgcccagttaatttgtatttttagtagagacggggtttcaccttgttagccaggctggtctcgaactcctgaccttgtgatctgtctgcctcagcctcccaaagtgctgggattacaggcatgagccactgcccctggtccccatcttctttaaatgcaattcagtcagaagtaccacttgtatttctcctatggactggcaccaatgattcccacaagcctcttgttttacaaagcactttcacaactacagttgtctttcccttcacagtagcccctactgtgaggggtcctgggtgcaaattgtgcctcccttggttatgaactgtgtgatggtgaagagctcatttcatgcagtgagccccaagtttctcatctgaagaatggatataatagtctctgtctcacagaattgctatgaggatttattaattcaacaaacatttcatgagtgccaactatatgcctggggatatgcagcagtgagcaagcagacaaaaatatcccacccacatggagtttctgtcatctctctgagaacttatccagtcctaagagatgaatgaaagacacgtgggacagagacggagtttgtgaaccagctgcccaaagaccaaatccagcctttatgcttagcccttagagtactaaaggtggggggtggtgatttctaaaaattgccttagtggctaacatttaaaaattgaatgctttaacatttaaaaacaaaaagtatttctgatatctattcagcaaaaaaattaaataaaataaagaagcaaacatcttgaaaagcaggacaagctgctggacgcacgttctggccatcactggaatggagcttctccagctcaccaagtctgctcttaacccccatccacctcccttactacatctacctctctagccccctctgggcatgtgactctggtctctgggaccaggagccctgctggcttggcctctgccttccccttcttctgcatctgcctagaatcccaaagctctgcacagcttagtttgaaagtcaacagtctagatcagagagtctcaaactacagcactggttcccagccctggttagacaaaagaatatgcacccaggttgcattatgaaagtccagagtccaagctgagcagacgaattagatcagaatctctggggtattggatcaggcattgggaatgcttaaagtcctccaggtgattctaatgtctgggcagggctaatcactgaactacggccagcatggaaatcacctggagggctttttaaactgcagaccactgagacacaccctgggaatttctaatttagtacttctaatgtgaggcccaagagtgtgatgctgctggtcggtggaccatgctgtaagagcctctgttctagctcacctctgagttcctttattagtttcctatggctactgtaataaatcatcataaacttagtggcttaaaacagcacacatctattatggttctggaagtcagaagtctgaaatcaaggtgtcgccaaggccgagctccctcagaaggctctcaggaagcatccatttcctgccttgtccagctctagagctgcatttctttcattctttggttcctggcccctttctccaccttcaaagcaagcagcatagcatcttgcttcagtggtcacattacctcattctgtgtcaaatgtcctctgcctgtctcttataatgacccttgtggttgtatttaggggccacccaagtaatccaggatgatcccctcattttaaacttcttaatttaatcatatctacaatgtcccattttccatataaggtaacatttacaggttccagggatcaggatctggatatctgtgggagccgccacaggttacctagtttttccactaggtaaacagacccacgagtgttttgttaaagtgacatcagaatcaaaggcaccgtggtgtgtactgtcttcatttgggttccttctcagaagcggagcctgagacaaggatttgagtgcaagtagtttatttgggaggtgatctcagaagggcagtggggaagtgagacagggaagagaaggcaatcagtatggagtgtgttcgggagcaggttactgctatgagcaactggggctcaattctactgggggccttagggagacaggcaggggactgggatatttatccatcaactcctggggattttcaccactctcttcttcctgcttaccccaaacaacttcccatggttggagaagcgctctggcatagacacaagactctgtagtgggaagctgaaagcatgagcaggatcgacgaatgggcgggattgatgaatgtgggcagggaagtgtcctctgctatagatagtgtgagagaacagctgtgtcctgctggcccttacacagttccttgcctccatcgcctctctggacagtaacagttatagctcagcagcccttccctgtcgggatgcagaagttgggatccagcgggccatggaaccaccactaaaaacactaaagttacctttcattgagtattttctggtcaccagactcttgacacatattatatttaatcttcacaacaatgtcacaaggtagccattagtacccctattttactaaagaagaaaggaacattcatagaggtgcagtcacacagtgcctgggtcaacattccacatcagaacttctgaccccaaaccatgacaaaggcagaatcgcagagtggttaggagtagggcctctggtgccgcactgctggagttcaaatcctgtgttcccttagctttgtgaccttggcaaattaccctgttggtgcctcagcctcctcgtctatgaaatggctgtaaaagcaggatttcactcccagagaagttgtaaggattaagtggtctaattatgagcataaagtactttcagtagtgcctggcatacaatgtgtgatatatacatatttcctgtcattctttccagaacctcttggtgtctctacacatggcaagaggtcagatctttttccataattaattgtgtcaaaaggcaaaaatcccaaatacaacccagagaactttttgcttaaaatatccagtgagttacggcaaaaaagaagagactcagcttccacccactttgcatttataaaccagcccctaaagaaggaacacgttgcccagagaaggaggcttctcgtggtgaccggcttccccagatgctttaaaaatacacctggccctcttccatctcccagcccaggagcatttagctccattcaagcccgcacttatctctcatggcaaccagcataaacacaggcatggggcgcgtgtttgggagctggtgacagctgaaggagaggcctcgtggctgctacaggctttgcaccatcaaccagctgcgggctgcaaatgaaaaaagagaggaaagaaaagaaggaagcatcggtgtgagtcgggcaggttcctccctcccaggcatcccacactttcctcactcatccttctgtaccactctcctcttccttctttgagaagtttggagaaggcatcaggagctttcctgctgctgctgggagttctgtcctgggaccatgctccacagaggactttccaggggtttcgggcctggcatggggcttcttggggacccgggaagacagggaatggggcgacattggccatcctacttggagagactttcctgcccacctgctcttcttacttcactaggattccgggtttgttccagtgtttggacttgtcccccgtatgaggggactgtcgggtgggttatgatcatgaggagttgaaactggactgccctttgtgtccaacagggccagcttggcttctgagaccgtccttactggggtggacctcatggagtggcccccaaaaggtttccagattctctgtggtcatctggaaatgaaattctcaaccactgagcacagtgtccaggaattagggaggctccaggtgaggaaacaatctgttttccttctgtcgatcttctcgagagctgcgtggagcaaggtcatggtagggaaccatcatggtggaaaacacaggagtcccctgtctctagagagcagcagggccctgcaggagcagcattggttgggtggtttgtcccctcactcttcctgtctgccagtagaaagtgaggattgaagggccgaggtgactttaggaacaatctgggccccagaaatgctttccccagagtatctgctctggcccttacttccctctgctgtggagtcctgagaataagagtgcattggctggacaggcttaggagccggctgccctgggcatgactgccaagattattttgttcatgtccagtagaagatcatatggagacatgtaggcagggggttggccatttgcctgtttacttgtgtttttagacagacttgcagcgcagtccttaggagttcaggtaaaattaggacacatctgtagtgttggacaagtcatttgctctcttgcaggacccagtttcctcatctgtaaaattaaggggtggaccagactttaaatatcctcttagacttagactttccctgactttgtggctaacatgctatttgcaaatttacagaattagcacccacacaaagaaggggtcttggcgtgtatttctcttctgagcattggcactgagaacccattatgtgagagtaaaaggcatggagttcccattcacacagctctggatttgagtgagtctccgtaacccattagctgagagatcttggccatgtgatctttgttttggtttccttccttccttccttccttccttctttccttcctctctccctcccttcctcccttcctcccttcctctctcttggtctctttctcccctcccctcccctccattcccctcccctcccctctgttcccctcccctcctgtcccctcccatcctgtcccctcccatcctgtccccttccctccttgtctcactctgtcaccaggctggagtgctgtggcaatcacggctcactacagtctctaccttctgggctcaagggatcctcccacctcagcgctccttccagtagctgggattacaggcacatgccaccataaccagccaagttttgtattttttgtagagacagggttttgccatgttgcccaggctcgtcttgaactcctggggtcagcgatccacctgccttggcttcccaaagtgctgggattataggcatgagccactatgctcagccacggtttaatttcttaatatttcagtttccacatctgtaaaatggagataataagagtctccattttagacggtgatgaggataaaatgagctaatacctacagagctttgcactgcacctgacatacagtttgctctcaattactggttgcaaccattattccaaatggtggagagaaactggaattcagccacttgcctcctcctgggatgtttcattccactatcatcccatctgctttttttttttttagacagagtctcgctctgtcgcccaggctagactgcagtggcgcgatctcggctcactgcaagctctgcctccggggctcacgccattctcctgcctcagcctcccgagtagctgggactacaggcgcccgccaccacgcctggctaattttttttttgtatttttagtagagacggggtttcaccatgttagccaggatggtctcgatctcctgacctcatgatccacccacctcggcctcccaaagtgctgggattacaggcgtgagccaccgcgcccagccccatctgctcttattcggtgctgaagattccagtttcagaactgagactctctgtctaaagcctgaggctgagttggggacatcccagtgcacaggctatggaaccggaggtctgggttcagaatcccaactccacaggaccttggatatcatagaatcaattttcctcacctggaaaaggggaatatacaatccataacatcattgcaaggatccaaggagagagcctgggaagggcccagccctgggcctgggtcagaatatgtactcaggaattactgttgtactttgaggggcaacatttgactttcaggacatgggatgctcacacctgataacaacaccttagccattctgagttctcagtagaaaggtctgctaaccagcaaagttcacaggcaggagctcttcctttggctgtgaaggagaaagcttctccccttctaagacaggggtgatcttaggaggaaaccccacaaggcactgcaatcctgagagtgtccactttttggaaattgggcagctctatgcaaaacctagcaagaagacaagccacttactgtatctagttcatccacatcagaacagaccctctgtccacatggcatctgtcttgcatgcttcctttgaggtgacaatggccatcaagtcaccaggcctgcctagtgcaggtcctcctgggcagtcagaggaaaatgattaaatatgagattttcaagtggaatgccagcaaatagtggctgatttgacatagatgcccaatattctggccatatacccatctgctgccgctttgcattttgctcaatgtttatttctaattgaagcaataaaatccatttgaattgattaagatcctccttcttcttatagttattatgtatgtaattttttttatttttagtaaagacagggtctagctatgttgcccaggctggtcttgaactcctgagctcaagcgatctgcctgcctcagcctcccaaattgttgggattacagacgtgaaccactacacctggcctgcagtgtggttttaattttcatataattaaaattatatacaatttataatatataatttaattcttatataatgaatgagactgaaaatttgcccatttttcatctatcggatgggcaaaattcaaaaggtgtaacatcagactgttggtgaaggtgtgtggaaacagacactctcatccactgctcctaggaggggatgtgaattgatgggggctttgtggaattatttgatgaataatttgatgaattattcacttatcaaacctggctttccgtctctagattcattatggccattacttaatatacatagcatttgagatacttcccctcaatcaaatgaccagtatttattgtaccgcctacaatatgcttggctacttgttatacaaatggttggagtttgtgtgagagcaaagcaatcaagacagggagacaacccatctatgttcaagtcagactctaccacttacctgggcacttatttgagcttcagtttacttatctcagataagtaatgtttcaaatgaaggcaacattccggttgtaggccgatgcttagcacatagtgctcaatatgtgttgttgagagttgtgacagctggcgttggcaggctacctaaggtagtttaaagactgtttttgtgttctgctttaggccacaggaaaacaccagaataagttacaaatgaatgaagatttaaatataaaatatgaaactataaaatgattagaaaaaaccttgtgagattttttgggtaacttgggtgtttggaaaaacccagaaaccataaaagaaaataattatacattaaattctgctacataaaaaaataatgtgggaggcgagaattctaccactgaaccaccaatgcctctcataaaaaaataatgtgtggcaaaaaccaactcaaaaggccaaaacaaactagggaaaatatttgcaagccatataataaagtgtttctttcctatatataggaaaaataatgtaagagaaaaattgacaacccaatgaaaaaaatggaaaaagtataaatggcttcaaaatgtttgaaaatattctcagtctcatttactatatgagaaatgaaaattaaaaccatgctgaaggctaggtgcagtggctcacgcctgtaatcccagcactttgggaggctgaggctagcagatcacttgagcccaagtgtttgagaccagctggccaacatggcaaaaccccatcttgctaaaaaatacaaaaaattagttgggcgtggttgcacacacctgtagtcccagcttcttgggaggctgaggtgggaggattgtttgagcttgggaggtcaaggctgcagtgaactgtgattgcaccactgtactccagcctgggcaacagagtgagacccacttttcacctatcaagtaggcaaaattcaagaggtcaaacatcagactgttggcgaaggtgtatggaaacaggcactctcatccactgctcctaggaggagacgtgaattgctggggcctttctggagatgaattaggcaatatgtgtaaaaattacaagtgcccatactttttgacccagtatttttatttctaggaatttatgtaatggatagtcttaccaacatacacagagatgcatgtggaaggttatttagttgcattgtttgcatcagcagatgtttgcaaatcatccaaatgcacatcaatgggggcagaatgaacaaattatggttcttccaaagaaagggatattatgcagccatagaaaagaaagtggggtggcacggtggctcacagctgtaatcctagcactttgggagggtgaggtgggaggatcacttgaggccaggaatatgagaccagcctaggcaacgtagcaagacctcatctctaagagaaaaatagaaaagaaaacaatgtgcatgcattttatgtagttacagaataatttcttagaaatactgtgaaaagcctggtgcactggtgtgtgcctgtagtcccagctactcaggagactgaggcaggaggatcgcttgaatctagaagttctgggctatagtgcactatgatgatgggatatccacaccaagtttggcatcaccacagtgtccttccaggagcggggtgccccattgctcagggaggggtgaacccgctcaggttagaaacagagcaggtcaaaactcctgtgctgatcattagtgggattatgcctgcactccagcctgggcagcataatgaaatgctgtcttttaaacaaaaatactgtgaagaaaccaagagggagtatcatatgtataatagaatattacaagtaaccctttgagtaaaagggggaaaatattatacctacctatttgcttgtatatgcacaaaatattcccagaagtatacatagaaaactaagtaatggttggtaataaataattggaactgggtagctgagggagaggggtaggagaaagaattttaatgtatacttgtttgtatgttttgaattttgaatcacatgcatgtaatacctattctaaacaattaaacaaaacaccatctgtacaaaatactacctttcatctggagcacaagatggaattttttgtctttaaaagtccttagatccaaagcagcaaggagaattgagatctcagagagtttccagattggtagaatcacaggattatagtgctgcaaaaagcctaaggtttatcttgccaacttgctcagttgataagtgctagtgctcaactgagtccaaagggatcaaccctaggctccccaatttctggaatccaagggttttagtgactttgagaccaatgggtagagaagccagtctgtgccagtgggcagccatgggactcccaggaacccagcctccctcctccccacctgttgtggacccttggacaatagatcctggaggtgggatggggggtgcagggatggatctagggaaaggaataagtgagccaggtggttttgaattacaagtgcctatagagctaaactgtcaccatggaaaaatgaaggcatggaaacgtagtggctggaagcacagggtctttccacgcagtcacagttgtcagcaggtgttggaaataacccaccctttgggcccgatgcagctggaaggttttgtctctgacctatggccagatctcccgaataattctacaaacttgtcctcccctgtcaagcactggcagaagatttaatagcaccggctgatttatgttggctgctgtaatcaaattcagagtcaaggcgcagccagccatggagaggtttctttatgttcccttggctcctaatagcattgtctccgccttcctctctacttaccacatgccatttggtcaaattagaacttgaactcaaaaagcagatgcctttctttagataaggtccaaaataattctcttgtcagggaaagggggatggatttgtttccttgactctgtgtgtgcaaaggaggtatttttgatatatgacttatataaaataatgaccgacacgagatgactgattttctttcatccttgtagtgaggatagacttttcctcctcaagacatctctgtgggttaggggtgggagacagaagagaataacttcttatatggtttgcagtgattcaatgacctgctcaaggcctctcaatgagcggcttcaggttcctccaggtggcactggtgccttagctctgtgcagctccaggggcccctagacatttgccaacaagggagttgggctgacctactcccaaccctaatccttgtgaacatatcttctggttctctgttgactatctaaaattttttaatggtattctttttaaaattaggaataatttcaaacattcagagaaagtaaagataattgttcagggaacaccaatatgtccactgtttggggctgaattgtgtctcccccaaattcatgttgaagccccagtaatacccagtaccttagaatgtgactgtatttcttttggttttggttttggttttgttttttgagacggagtctcgctctattgcccaggctggagtgcagtggtgcaatctcggctcaccgcaaccttcagtttccgggttcaaacgactctcctgcctcagcctcccaagtagctgggattacaggcacccaccaccacacctggctaatttttgtattttttagtagagaaggggtttcaccatgttggccaggctggtctccaactcctcacctcaagtgatctacctgcctcggcctcccaaagcgctgggattataggcatgagccaccatgcccagccagaatgtgactatatttggagatgaggtctttataaaagtgattaagttaagataaggccattagggtgggcattaatccaacttgactggtgttcttataagaagaggaaatctgaacacacaaagagacacgaaggatgtgttccgaagagaggccatgtgaggacatggcaagcaggtggccatgcccaagccaaagagagaggcctcaggagaaaacaaaccagccacaccttggttttggccttccagcctcaaggtctatgagaaacaagtctctgttgtttaagccattcagtctgtggtactttgttaccccagccctagaaaaccaatacacgaaccgcagcgattctgcactggctatcattttgctgtaattactctatcatatatctgtttattaatcttttttattgatggatttcaagtgagttgcagatttgtcaccctctttgaagaatagaataggggaggtaaatccatgtttgattgaagaccaccagcacacctgattgaaccctctctgtggtcgggataatcagagattgtttactcatgggagtttacaaaccaggaaactgaaacccagagatgaacagtcattgggtttgattggaaagacgtgattctgggcgttggtaagtggttccaaccttagctggctgaggcgacacttctggctcttttgggtgccatttcttctgaggtttcctgctcattctctctaggtggtggtggtggaggaagatctccaccgtgtgctggtaactgaacctccagaagtctctggagtcagacatccagattcaatcctggcctactgcctactggttgtgtttgaccttgggtgcatcccttaatctccctgagccttacctgaaaatgaggatgacagtactaatatataccttgtggggctgttgcggggatcaaaggattgaatggggaacatcacggaatgtgtcccattgttggcacctcactactgggttagggcaatgctatctgctgtaacaggtgagcattttagtggcttatcctaatcaaaatttattttttgctcacctaacagtccatgtccctggttgggggcagtgcacctccattctggcattcaggggtgcaggccctttacatcccgtggctccactgtcccccaggaattgagtctgtgcacccaggcagaatcattggcaagaataatgacatgcccccatctctctatactgcagagggctgggaaatgcagctacttcacagggctcactctggcctatggaagagggagcacacattttggagggaatgttagccttttccacacagtctcaactcagagaaggtcctctgatgggaagtcagtggctgggagttagtagaggaggcagccagctaacccggaaactgccccaccagactagagcagtgaggacagcaggaaggttggaagtggttgggaaccagtgagccatcaccaagggtcagcgtcagatgaccacaggaggtcacctcctcctagggctgtgtgcaaggtgcctttggaactctgaccccaattctgtacttgctatgtggtccagatcaagtgacttaacttctccaagagtcatttttcgcctctgtaaaatgaggataatcagttgtgagggttaaatgcaataatgcctgggaaatgctgagcatgggtcatcgtcgtttcgtgatgtgggttttgccaaacgagtctgcaagtatgcagcgcaggcaatgctccttcccctcatctcagggaggatgatactaacaagtcatgaccctctttcctcagagtccttcttaacacagcattccaggaaacctgtattcatcagtgcaagttaggccgggcgtggtggctcacacctgtaatcttggcagtttgggaagccaaggtgggcagatcacaggaggccagaagttcaagaccagcctgggcaatatggtgagaccccgtctctactaaaaatacaaaaaacagccaggcatggtgtttttcctgtaattccaggtactccagaggctgaggcactagaatctcttgaacccaggaggtggaggttgcagtgagccaggattgtgctgctgcactccagcctaggtgacagagggagactttgtttaaaaaaaaatttataaaagactgggcatggtggctcatgtctgtaatcccagcactttgggaggctgaggcgggtggatcacctgaggtcaggagttcaagaccggcctggccaacacagtgaaaccccatctctactaaaaatacaaaaaattagccaggcttggtggcaggtgcctgtaatcccagctactccggaggctgaggcaggagaatctcttaaatccgagaggcagaggttgcagtgaaccgagatcatgtcattgcactccagcctaggcaacaagagcaaaactccatctcaaaaaaaaaaaaaaaaaaatcagtgcaagttagcagatgagatagatgaaaactctttgttcccaagagattagtcttctacaagactctcctgagtaaacaaaaccattggatctagaggtgagattaaagaaaaaattattctgacactggttaaaatggtgaggaagactttatccaagactattgcaataggtttaaagactattgtaataggacacagagatcaaccttagctccattacaacaaggacaagtggggaattatagccaagaagcaggttgggtgggtcagtggattaaaaactagtaagaggagacatcatgatagggggattttggctgaaacaacttaacaggattcttgctgaaggcagaccaggttgatcagttctcaagggtgggggattctctctaaactgacttatcaagattctggctataactggactctgcaaggatggacacagaagcccacgttcaaagcctagtcaagaggagggctcaggggaacctgaccaaagcttggccgaggaaagaatggttgtcagtgggaaggtagaactcaggtcttcctacctatttctctgcccaccaaggttttgggatgggacagcggatgtgaagtgctccagggctggtgggagccttggcactgccccaaacaggtagatgtctttgcctctggatccctgggaaggctgtgggagttatctatgtcacacaggctctctgtgaggtagtggtgggagacacagcaggagcagcatgcaaagcagaatctacttcagccccatcggcagggaacaggcctgtgtgtggcagcagcagggacaggagcacctggaacagctcccggggatgtcgtattccagaagaggtctctagcctggctgataaatcccagagctgtaattaagacaaaatactgtgaatgtgacacctgctgacagctgcaggaaggccccagaaacttgtattgtgaattagattttacaggcagctcttgccgtggtgaactggtgccaggctaaggcacctgagggaacttgagggcaaagattgttcaccaaggggtaaaaggggagatccttcacccctgtctaggaaccactgatgtttcaggaatcacagaccctgagagatgccaaagttggaaagggcttagagctcatctggtccaaggctttcattgtacatctagaaaaatccagacccacaggggaaatgggttgtcctaggtcacacagtgagttagtgccagggctaaagaccagggctcttaatcccaggctggcacacttggctggagagcaattaaaagtagttgagcatacatccagaaatttgacttaaattaaatggtgcatgcttggaaagacagagacaatgccagagaatgagacaaagttatagatagagagacacagagacagagaaagacagagacagaaaagagagtagcagaaggagagaaacacagagaagaggcagaagatattcgtgaacctgaaccattaggttcaaatagagattcaaacacctgccaagttggacaggaccccagcgatcatctagtccagctacttttgtttttacaataatgaaacaaactacagctgagtggtttacatatgtcaaacctttttagaaaaagtttgatgccatgtggttaaaaaaaacacagtaagtgcttttggtgtgaaaagtggcaaaacttccatctctgaaggtttgcgaaatgaaatttgaaaaatgaagagctgcaagaatatgactcagaatagagaaagtcaggaaaatgtgatgcagatacttctgcaactctctaggactcaggactgaggactccctggccttattgctactttctctgaggtcttagacccagtttctgagaaggacaaaggggaattccccagagaaggaacacagcctaagcctcacctcccactcctcccatcttgatatagcaagtctctgctttcaagtatcagctcaaatcccacctcttccaggaatccttccttgatatctcacttggaccctctacccctcaaccgttacccatttcttccttctataaatcccttcaggcatccctgccctatgttagccactcttctttttttaccttatacaacagttatccaagaatatgtcaataagagagcccttattcggtgccaggaattccaaaagctgtagctctaatcctcacagcaaactatcaaagtcggctttgcacgcccactttataagtaagaaagcttagactccgaaagaatgaataacttcctcaaggtcacacagctactaagtggcaaaaccaggacttaagcccaacttggatgactccagggccagtactcttcccgtgacactgaacgacacattccaagggcgggaactgtgtctagtcattatgtcttgcacaatttggtacttactgtgtttctgaatgaataaaacagtaaatgaatgaatgaacataagtgtcctttcttttgaaggttatagtgcagggcttggcaaactacagcctgtgggccgaatccagcctgcctcctatatttgtgtaaacttttacaaaacatgaccaatctcattccttcatgtattgtctatggctgctgtcctgtacaatggcaaagtgaggttgtaacggagaccatgtgacccacaaagcctaaatatttactatgttgacctttatagcaaaagtttgctgactcctgctatagcttatggtctttactaagctgatcaaaacaacagtgcttattgctaagtagtataataataatcttgtcttttataatctaaaatattgtgtgtgtccatgcttgtgcactgggtgtgcctataaagtaccagatagatttaagcatgtaactggtatatgccgcttcatccaaaaagacttgcctacatgccctttggaaatctatatattttgtttgtttgtggtttcgttgttgttgttttagttacgtttagctttgtcagcaacactttggcccagacaggattagagctgagacccctggccatgaaggtcttccctgaagcagaggagggcaggctccccttggacggtctcggtggggggttgactttgaggcttaccagagcagtcaatactgctgtggtattttgagtcaagtcggtttttgagccaaatgaaaagcagcctgtttgattgctctcaatttcctcttggcttgcagggggataagtatccctgggctcccaacctcatatcctcccctgggctgaaggcactcttgtcctccaagcctcccctacagcagtgttcatgggcagctggagcagggctgcctacccattgctactcccaggagctcaggactggctccagacccctggcatctggagcagaagcaacatcaaagcagggattggccaactcccacccctaatgccaaacaggccaggcactgggagcactcagaggcgtgacgaatctcagcctgtctccggctagtgttccctggccagtccgctttgggccctgcctcacaatgacgggctcatcattcagcctcgctcatctgctcatcatttcaggactgctctgttactcggcaggctgcttgggtgagttgtgtgtgcgtgtgtgcacgtgtgtgtgtgtgtgtggatgcacatgcattgttttggaaaaaagactcttggaaagcagactgtactaggaggttttagcagcctttaaattttttttctttttaagtttttctttcacagggctgtttctcattgtgaaagcctttaaattttaaactgctcagccagtgttgaagttgcaatgcaaaggggtttcacagtagagttggtggggacctggcgtacatgctaacgggtgtgtgcacttgtctgtgtccctcttgtgaccttgactgacacaagtaccttgtgctggcagctggtaccttggctggcagctggtaccttggctttgaagtaaaatcgtgttctgtagtctgggcccccgctggcgttgggtggctgagacagtctccatcactcttgagtggactgccttgggtaatttggctcagaggcacagccaccaaaccacaaattgttctttgtaggttgtatccttgcctgctcagggacatacagcagaaggcaaactctaccatgttctttcagagaagttcaaattacgtgcaacttttaggatcagaatttgtctttcaaggtttgttgtggggattgaaggaaaattgtagggtgcagccttctctggaacatgtgaattggggggaattttgggcaaattgcattcagttaatgtaagaactttactgtagctgagacccaactcactacaataaagtcaaagcactctgagctgccatacagcgtgtgcccttggctttctctcttctttggggtctgtctctctcatgcaagttcccacaggcagggaaaggccccaaaagaggaggaggaagtaaaaagctgactagtccaccaactggacaggcaggtgcagaacagttaaatggctgcacttgtaattctctcaacctgctgaggcaggatgcttatgtcacttctttcctttgacagtttctaatgacacatttgttggattgagggggtgggagggaaggctacttgatggaaaaacagaaggcagaaatggaaatggctatttccagtaacctattgtggggctggccttgcaagagggtagatgaagatggatacagtggtggttctggtgtcatacttattttaaaaagggactaaaggaggccaggtgcagtggctcatgcctgtaatcccaacactttgagaggctgaggtgggcggatcacctgaggtcaggagttcaagaccagcctggccaacatgacaaaaccccatctctagtaaaaatacaaaaattagccaggcatggtggcactcgcctgtaatcccagctgctcaggagactgaggcatgagagtggcttgaaccctggaggcggaggttgcagtgggctgagaacccaccactgcactccagcctgggcaatagagtgagacttcgtctcaaaaaaaaaaaaaaaaaaaaaaaaaggcaaaaggactttggagatgatttgggcaaaactctttgtggtacagatgaggaaactaagtttcagattgagtaagtgagttgtactggctcacatggccacttgcacctagacttaacactctttaatcaaatccatgtctttccaagagtaaattggagaaaatcgctttccaaagatgtgcctcagtttcttgaaatgaaacaagagaaagtctccttttcaagaatgggtattgagtccaaagggcaaaaccagcatcatcgacaacaaaagcttcaaacacttgccaaagcctgcattaaacaattacccataatttggcaatgcactggccacatacaacatgagcttgatgtctttaagttgggacatgcggtcctgaagttccgtgatggttggcatttccaaggcagctgcctggtgctgagccacgtgctgctcccaggtttctgcaggctccacggagatacgcacaggattgctttcaatacaacagagccttccggggcttttccagactggagcctgagctcagacacaattctatagagacagtccatgagaaagacccacaggccactcggatgacaccaaaatagacatgtgaagtcctggcttagttgactgggagggaggagggagggggaagctgctcccaaacacgtccacctgatggaaatattctgaacaggaatgagctgtaaataaactaggctcctaaaaacaaatagcttcagggagtcaggggagggcagaaatagatggccttcccctgctgggaagaaagtgggtcaagggggaaagggtgagggggatggggtgggggagccgaacaatgcagaagcctcagccagaaatgcagctgataatttgtggtcactgaagaggtctccaatttccaggaagaaaggagagaagtgattgctttaaatgatacaaggtccttcatcagtggaaggccacacagggtgctgggtgaaggaaggcactggaggccatatatggtctggaaaaataatggtgatgagtgcatattagcagtgtgggcctgccagcctcccaggtgcttttggaacactgcagcctcagcccttagctgtgtgctgaggcaaaagagaagcaaaggagaaactgtagccaggggaccttaaaaacgttccgggattggtgtgaacctgccagcctcctccaccctacaactgaagctgcccactcctagcgactcaacactctaggaaacttggagaagcttgaggaggaatacattggcattaatgtcaagttcgggaacaatgtatccatattattttaccactgagaaaagtagcccgtgacagctggagctgccctgactctcagagctcggcatggtgttttgcaacacagaagcgatgtcacagaacaccaacttcagacagggtcaccctgtgaccttgatggattgagaagaaagtaagaatcacttgataatcacaactgaacacagacgaaaacaggactatcatccaaccacaaaagtaactaaacattctcctatccttgctaatatgagtgattgctgctgtttaaaaaaccaatcacagctttggtcttgctccactctcttctagatatgaattaaggtactcaattatagaatggccctttcttcctgatggcatccaattcagagtgaagccagacttcatttcctcagtctcccctccatcacttagcaaaatccccaaccctaggatcagtccttcccagcatcctctaactgagatgccccacggttccttccggtgtgtgttctccctctttgcagtgagtcaataaacccagcttggttccctgaagcctttgcttggagggcactgatgctatagccccaagttgttgttatgggacttgaagctccagaccttcatttctaccacatgcagtcatggtgtagagctcaagaggaagggctccggaaccagactgcctggctctgtcacttactagctatatgacttcggacaaattgcttaacctctttgcctcagttaatggatctgtaaaatggagatgatgataacaagagtagtacctagctcttagggttgctgtgaggattaggtgaatttctatgtgtgaatcacttaaatggtgccttgcatgtggtgtttgtcattattaattcagcaaacgtttgtggagtgtctagcatatgccagatacagtgctagaccctggggataaaagctggctcctgctctcccagaaagcacagtttggtcagagggatacaaggaaatagtttttccccatggaggaaacctaacataggggtaaacccagagaaaaacagcagggccactcaatcttgcctgggaagtcaaggaaagcttcctggtggagacggcatctagtggaggctgcttgtgggagggcagggagtggggtacaagcagaaggcctctgagctctgcaagcctttccaactacagatgccatttaggtactttctgcttcccacaggcctggcccagtgcctggcaaagagtgtgctcaaatgaataaatgtctaacacccataaactagtgcctgctgtgacttttctttctcaaactctgaccactgttgccctgggtaccctgcaacttcaaaaccacccttgattcttcctgcttcttccctcctgcaacatgttggccccgtttctctgcatcagtccctcccttcctgtcccgtgccctgctgcatgctcccattctccaagcctgtcctccccacacctgcaccttccttgcacacagtgttctccagcaccattttgatcctgtcactcctttaccctgcacctgccgtggtttcctacgactttccaattaaagcctaaacccttttgtggggtatccaaaacagcacaatctagccccaaattaactttccagctttccctgcatcctgaccccaacagtcactattcctttaagataagagcttcctcttcagtgcaatggcacaatctcggctcactgaaacctctgcctcccaagttcaagcaattctcctgcctcagcctcccaagtagctgggattacaagcatgtgccaccacggccagcaaatttttgtgtttttagtagacacggggtttcgccatttggtcaggctggtcttgaactcctgacctcaagtgatctgcccacctcagcctcccaaagtgttgggattacaggcgtgagccaccacgcctagcctgtttgacatattttggagtgcctgtctgcctggccttcctcaggagaaactcctcccacagcctctgttgagctggtgacagaccctgagatcctgctaaagactgggtctgagtctggtccagggcaggctctgcttagctgcccccatgacctgtcacctggctgggcaaacagattccctgtggtggctatttgaactaagacccacaaggggatgttccagacaaagcagatgggggaggtaaaagaggtgaggcaagactgggtcagccgtcatggagagatgggcgtgaagacgccaaagaggatggaatggatcagatgcacagaaagaagcataaaaggggagatgggggacaggggatcgaggaaggtgagagaaataccaggacagtgtcatgtcccattgactcattggctccagctctttctgacagttgttaactttacaataaatctcctttttccccagagcccatgtgagtgaagctctgcttctcacaatccaagtagccctgaatggaacatgggtctttctcctgccattcctcccgctccctggggagcctcccctccttccatcagccacctccccagctagcccttcaaggcctagctcaagtatgcatgacttccccagatattttcgtggtctggaagtcttcctgtctaaattctccttgcttttccagaattagcatgaatgccctctttcccaaaagacagctaggtttatcccagctggtggccacctgttgttcctgtttttctgaattccttcagtccctcgttaacttgtatgacctggagtggatgctgctttggcgttgagtgctgggttctatggaactttttgtgaccaagctaagcaccaagcattggataggccaacagttttcactggggccattttggaaattttcaaggtatttttggttgtttcaaaggctgggatgggtagcatcactgtctgttgagccgggtcaggagtgagagctgtcttgcaaagggtgggatagaattgtcccacatcctccatgactttgaaatgtcccaaggaacattcgtacttatatataattatctcattctagaactgaattctcttttacacagcattttttttttttttgagacggagtctcgctctgtcgctcaggctggagtgcagtggcgcgatctcggctcactgcaagctccgcctcccgggttcacgccattctcccacctcagcctcccaagtaggtgggactacaggcgcccaccactacgcccggctaatttttttgtatttttagtagagacggggtttcactatgttagccaggatggtctcgatctcctgacctcgtgacccacccaccttggcctcccaaagtgctgggattaaaggcatgagccactgtgcccggccttatgcagcatttttaaagcactgttataatataaattgagttttctaagactacaattatggagtaatggttgtgctttatctagtcgggaattttacccagtgttgtttattatttcagaaaatcacatcacatggtggacacattccttgtagcatgagacttgccaataccataatctttatttgagctgttgcattcactgtgatttcatgtaagtgtgagcatcaaaccacagcattatgtattctaatatggttatgtctgaccacttataatcaaaatgtttacttttgtatcataaatcactttcttttttttttttttgagatggagtctcactctgttgccaggttggagtgcagtggcacaatctcagctcactgcaacctccatctcccaggttcaagcaattcttctgcctcagcctcctgagtagctaggactacaggtgcatgccaccgtgcccagctaatttttgtatttttagtagagatggggtttcaccatgttggccaggatggtctcgatctcttgacctcgtgatctgcccaccttggcctcccaaagtgctgggattacaggcatgagccaccatgcctggcccataaatcactttcttgtatttctcttttatgtagaattaagagcactgtattgattttttaaattgtctgtcagcgtgctgtactatttgtgaatttcatttccggataataaaggtgtctttataaaatatttcccgtaaaaggtcgctttaggcctgagagggctgagggtctttggcacaggccagtggaatgctccatcatcaagggtgcgagcgagtgtgtgtgcacggagctaccattcccgtggacaccgcacgacctggcgacttctggggagcacttagcacttgtctagtgtctgaggcaggtcctggagcacaaggtggagatggtcggcagatgctggcccctgggagataagacagaaaactgggttcaaggttgagagcctgtggtggtcaatgtggcgtgcatgttctgtgaggtcagaggtttcgtgaaggggtggaagtgaaggtacatcgtgacaccaaaactgagaactgaaaaaccatagctttgggtgattatggatattgctgctatgaacattttaatacatgcattttggtgaaaacacacccacttttctttttttttcttcttttttttagggccatttcaagagaaatttttactttttggtataaaaataaaactataaccattcaagctggctcttaactaaaacgtttatcttgaaaaatttgcaataacccccactggattcattaggtagggacacaaatcagggctttctcagtgcaaacaccagagaacatatatatggtcctggccaatgcccatcattcagagatgccggggaggagattcaagcttggagtcagaacctgaaactttaaagatcacttgcaatcatgattctgaatgcacccacttttctattggtaaaaacctaggagtgaaattgctgggctagagtatatgtctatgttcagctttaatagaagataacaagcaattttccaaagaggttggatcaatttacattctggccagctaatgtgtgatagttgtggttgttccacatccttgccacatttcttatattctgtcctttttgctttagccattctggtggatgtgtagtggtatcaacccaatgaacatcagcgatgttcagcagaatggatgagtaggttgtgatatagtcactcagtgggacactattcagcagtaacaatgataaacagcaacctagatgatttccatagacactatgttaaaagagagaagccaaagacaagagttcatattgtatgattccatttacataaagtgcaaaattagtcaaaatgaatctctggtgttagaattcaggatgggaaggggtgcagagattggagcttgaaggagcttctgggcactggggaatgctgtttcttgacctgggtgctggtttctaggatacgtccaccttatggagatctgttgaactgtaacttattgatctgtgtactttttgtaaggcatacttcaacattgaacatttactaacattgaacatgggtgagactttttgtaaaaataaagctacaaaggttcagggccctccctttatttcctgatactgcagattaggctacccatatattgagacattaaaccgtaactctccagtgaaatgagtgacacgtgaatgtgtttgtaaagtctagagtcaatgtatgtgttttaaatcatgggtctgggtgtcctgtaagtaatgctaccactggccctggctgcctccctgtctaaacaatttccttctgagtacaatattaaagttattagcaagcactttcttctcctcaactactgggggcatatgatgaaatctgtttgaactttgcatttcctgctacatctacaaagtgacaagtcagtatctgaggaaggagaattgaaccttataatggtcagtgtccagacaagtcatctgcttctttatgaaccatcttaatctagcaaaggcaagggcaagggaataattgctatgtcaagtagccaacaggaggcctatccacatctaacaggctagaaattagatgtggaagtctggggtggcaggatgggtcttccctgggcacggtgggtgtgacagaggcccagcactgaccacatgctaacgagcggcagttttctctgaacagcccttcccagcctggatcagaagaagcgtggtggccacaaagcatgctgcctgctgacgcctcctccaccaccactgttcccaccaccattcttcagaggtggccgaagtccggtgagtactttgggatttatgagaggaaaaaaagtgcaggctactcagtgcacaccacgcagccccacctgcctgccccactccacctgagctgcctccggaatcttttctgagagcctcaaccctccactgtcacccagaagttgagccccggaatggacattttgcagttcctggggtgtgtccattctccaaatatcttaaataaatgatggagggagattcttcttagcaggaattggatttggcaaagtttctcatcttctcaaaaaccatgaggtgaatttataatataacttcctgggttcccatcagctgctcaaacatggaatttccccttctgtttttcttctccccaagtgtttatgaaattcccttctgcagcccgtgtctaacacagaccgtttccatgaggtgactcaggaaatagttctcccgtagccacactgaggtgtgagagggagcagaatttggaaagaaaggaccaggtgaggaaaagagcaagattagggaaactggcctagaagacaacagccagggcattctggggacttgggattctcagctctttcccaacgctctgtctcctgagctgtccaattcaggagccactagccatatgtagctatctggcacttgcaatgtggctagttcaagttgaggtgtgctgtaagtgtaaaatacatactggatttcgaaagaagtagtatgagaaaagaatgtaaactatctcattagttaactttccaatactgaatatatgttaaaatgataatatttgagttttgttgggttaaagaaagtatattattaaaattaatttgacttttttctttttaccttcttgaaaggtaaaaaagtgactactagacaatttaaaattacagtgttgctcttattggtgcctcacgttagttatgtttccattggacagtgctaacctacacattggatagaggcccctgaaatgagcttccaaactctatccaaagtggctacgaggtgtctgtaatccatacaagccaggttcgtctcaagagcagatgagagaacagaaactggtagcccaaggtgtcatcttcttggggcagtcattggggtgtcagggaactgccaggcttagagacctgatcccggagcaggtctgtgtccaggatggtgacccttcctctgtcccctacgcctgacctctaactctgtgttgctttgtactgaagcttctctccccagacatgaagaatctcatgctggaactggagacctcgcagtccccgtgcatgcaaggctcgctaggctcccctgggcctcccggcccccaggttggtgcactctaccggacccctctcgctgtcttctgtttagagcaggaaagcccactgcacagagcctcttagtgtctgctctttctcatgtgatacaaagctgtttttccttctctcgcttacttcctgctccaaagccacttggatagaacactgactctttgctaggtaaattctggcctcccatccttgatttcctcatctatgcaatggggataataattgtccctacaatactgaattttgggggaatcaaatgaggatgccacctctatggatatggtttttattacagttacaatcagacaaacacttgatgacagtgccccttatgtaaccattgacccctcctgtggacccagaggtgcctgcgttcagcacaggaaagtggaggtgcagaggagatggtttcctgcctcactgggcccccaggtattgctaccaagcagcccacccctccccaccaaagctaaaggggaaacagtcaaaatgctgcagaaaggatttctagacaaacaagagtaccctccagagaccccaccccacagagtcctggcccctctggcctgcctccaagagggtgctccatcggtgagggacagctgggtctgagccttccatggggaggagaaagagggtgtaaggagcagttagttcccaagtgccttcccatgcagggggcgtaaaaatgacatcacccacctgggtaaacactcctgtggcttctggacacttgaaggctcacctggattacaaagccccacaagaggggactccggcctgtatctcctacatcacctcataccacctccattgtctcgttgactcagccacagtgaccatctctcgggttctcaaacactccaagcttgctttagccacagggcctttgcacttgtggttcctgctgtttggaatgttctttctggtttgtatcatggccagctcctgttggccactcaggactcagcttctatgccacctccttagaaatgccttcttctaccacccactcaaccacttaaagtagtctcctgcccacacgaccaccacaatcactctctgccacaatgacctactttaattctctgcatgattttttcatcctgttacagttttcttatctgttcttctgttcctggtctcccctctgtaaaacgtaagctcaatggcaggggttggcaaactatatctgtggatcaaatcctgcggcaaagtttcaataaaacatcgaagttttattgtctgtggctgctttttcacgacaaaggcagagttgagtagttgtgacagagaccaaatgtggcccacaaagcctaagatattgacaatgtagccttctaaagaaaacctgtatcaaaccttggtctgtgggaacagagacattgtccatctcactcactattatattccctgtctacaacagtgcacggggttggtataggttctccgtaattacttgttggatacaagaaagaaaacaggactttgaacccagagttggccagaggctgccacagaaaagcttggaagcctgcagaaaagcaagatgagaatcctcggaggtgcatttctatcttcccaccttcagcagtctacactaacaggtctcaggcatgctagaacccatggaatatagaaaagaaaagggggattttctgctgacctcaggacagtggctctctggtcacacacatctctaacctcgtgcaatcccctttgaagcatgtggaggctgtgttgcccaaatgcagggtcctgtgtagccaccttcatgtccttagaacacaatgtggatgctgtccctactcaaagtgaggtctgtgaaccagcaacattggtatcatatgggagctggttagaaatgcagaatgtcatccccctgacaaattcattctatcagaatctgcattctaacaagataccacccctccaccaagtgaacggagtgggtcatctgcacattaaagttggagaggcactgagctagagcacaatgaccttgtgaaatagttctagtccacttcaagaaacagaaagaactaaggcttggaagaatcaagagattggaatgaaaaccctcctcttccctatccaaaaatagaaggtgaataaaccaaagatactggttctcaaacttatctacacattacgattccctgggggagctccaaaaattactgatgcttgttcctcctcccctgagattgctatttattattattatcattattattattgggaagagagtctcactgtgccacctaggttagagtgcagtggcttgatcgcagctaactgcagccttcacttcccaggcttaagtgagcctcctacatcagcctcccacaggagggtgggaccacaggtgcacataccatcatgcctggctaatttcttaatattttgtagagacagggtctcaacacattgaccaggttggtctcaaactcctgggctcaagcaatactcccacattggcctcccaaagtgctgagattataggcataagccaccccacccagcctgaggttgttatttaattgggctgggttggggcctgggctttgggatttttcaaacatctccagagaattgtaatgtgctgatagacttgggaaccacaggctgaggggagctgttgttatttggataagttttgcagaaatcatatttcagggagggaggttccaagacagccgaataggaagagctccagtctatagccctcagtgtgagcgatgcagaagacggttgatttctgcatttctaactgagctgtgaagagagtagtggttctcccagcacagagtttgagatctgagaatggacagactgcctcctcaagtgggaccctgacccccaagtagcctaactgggagacacctcccagtaggggccgactgacacctcatacagctgggtgcccctctgagatgaagcttccagaggaaggctcaggcagcaacatttgctcttctgcaatatttgctgttctgcagcctccactggtgatacccaggcaaacagggtctggagtggacctccagcaaactccaacagacctgcagcagagggtcctgactgttagaaggaaaactaacaaacagaaaggacatctacaccaaaatcccatctgtacatcaccatcatcaaagaccaaaggtagataaaaccacaaagatggagagaaaccagagcagaaaagctgaacattctaaaaatcagagtgcctcttctcctccaaaggagtgcagctcctcaccagcaatggaacaaagctggacagagaatgactttgatgagttgagagaagaaggcttcagacgatcggtaataacaaacttctccgagctaaagaagctaaaaccttgaaaaaagattagatgaatggctaactagaataaacagtgtagagaagaccttaaatgacctgttggagctgaaaaccacagcacgagaactacacaacacatgcacaagcttcagtagccaattcaatcatgtggaagaaagggtatcagtgattgaagatcaaatgaatgaaatgaagcgagaagagaagtttagagaaaaaagagtaagaagaaatgaacaaagcctccaagaaatatgggactatgtgaaaagaccaaatctacgtctgattggtgtacctgaaagtgacggggagaatggaatcaagttggaaaacactcttcaggatattatccaggagtacttccccaacctagcaaggcaggccaacattcaaattgaggaaatacagagaacgccacaaagatactcctcaagaagagcctgcctttcaagagttcctgaaggaagcactaaacatggaaaggaacaactggtaccagccaccacaaaatcataccaaacggtaaagaccatcaacaccatgaagaaactgcatcaactaatgagcaaaataacaagctaacatcataatgacaggatcaaattcacacataacaatattaaccttaaatgtaaatgggctaaatgctccagttaaaaaacacagactggcaaattggatagagtcaagacccatcagtgtgctgtattcaggagacccatctcacgtgcagagacacacataggctcaagataaagggatggaggaaaatctaccaagcaaatggaaaacaaaaaaaaagcacggcttgcaatcctagtctctgataaaacagactttaaaccaacaaagatcaaaagagacaaagaaggccattacataatggtaaagggatgaattcaataagaagagctaactatcctaaatatatatgcacccaatacaggagcacccagattcataaagcaggtccttagagacctacaaagagacttagactcccacccaataataatgggagacttcaacaccccactgtcaacattagacagatcaatgagacagaaagttaacaaggatatccaggacttgaactcagctctgcaccaagcagacctaacagacatctacagaactctccaccccaagtcaacagaatatacattcttctcaccaccacatcacacttattccaaaactgaccacatagttggaagtaaagcactcgtcagcaaatgtaaaagaacagaaattataacaaactgtctctcagaccacagtgcaatcaaactagaactcaggattaagaaactcactcaaaaccactcaactacatagaaactgaacaacctgctcctgaatgactactgggtacataatgaaatgaaggcagaaataaaaatgttctttgaaacccatgagaacagagacacaacataccagaatctctgggacacatttaaagcagtgtgtagggggaaatttatagcactaaatgcccacaagagaaagcaggaaagatctaaaatagacaccctaacatcacaattaaaagaactagagaagcaagagcaaacacattcaaaagctagcagaaggcaagaaataactaagatcagagcagaactgatggagatagagacacgaaaaaacccttcaaaaaaatcaatgaatccaggagctggttttttgaaaagatcaataaaattaatagaccgctagcaagactaataaagaagaaaagagagaagaatcaaatagacgcaataaaaaatgataaaggggatataactactgatcccacagaaatacaaactaccataagaaaacactataaacacctctacacaaataaactagaaaatctagaagaaatggataaattcctggacacatacaccctcccaagactaaaccaggaagaagctgaatccctgaattgaccaataacaggctctgaaattgaggcaataattaatagcctaccaaccaaaaaaagtccaggaccagacggattcatagccaaattctaccagaggtacaaggaggagctggtaccattctttctgaaacgattccaatcaacagaaaaagagggaatcctccctaactcattttatgaggccagcatcatcctgataccaaagcctggcagagacacaacaagaaaagagaattttaaatcaatatccctgatgaacattgatgcaaaaatcctcaataaaatactggcaaaccaaatccagcagcacatcaaaaagcttatccaccatgatcaagtgggcttcatccctgggatgcaaggctggttcgacatatgcaaatcaataaatgtaatccagcatataaacagaaccaaagacaaaaaccacataattatctcaatagattcaggaaaggcctttgacaaaattcaacagcccttcatgctaaaaactctcaataaactaggtattgatgggacgtatctcaaaataataagagctatttatgacaaacccgtagccaatatcatactgaatgggcaaaacctggaagcattccctttgaaaactggcacaagacagggatgccctctctcaccactcctatcacagtgttggaagttctggccagggcaatcaggcaggagaaagaaataaagggtattcaattaggaaaagaggaagtcaagttgtccctgtttgcagatgacatgattgtatatttagaaaaccccatcatctcagcccaaaatctccttaagctgataagcaacttcagcaaatctcaggatacaaaatcaatgtgcaaaaatcacaagcattcctatacaccaataacagacaaacagagaggcaaatcatgagtgagctcccattcacaattgcttcaaagagaataaaatacctaggaatcaaacttacaagggatgtgaaggacctcttcaaggagaactgcaaaccactgctcaatgaaatgaaagagaacagaaacaaatggaagaacattccatgctcatggataggaagaatcaatattgtgaaaatggccatactgcccaaggtaatttatagattcagtgccatccccatcaagctaccaatgactttcttcacagaattggaaaaaactactttaaacttcatatggaaccaaaaaagagaccacattgccaagacaatcttaagccaaaagaagaaagctggaggcatcacactacctgacttcaaactatactacaaggctacagtaaccaagacagcatggtactggcaccaaaacagagatatagaccaatggaatagaacagagccctcagaaataataccacacatctacaaccatctggtctttgacaaacctgacaaaagcaagaaatggggaaaggattccctgtttaataaatggtgctgggaaaactggctagccatatgtagaaagctgaaactggatcccttccttacaccttatacaagattaataccttattaattcaagatggattaaatacttaaatgttagacctaaaaccataaaaaccctagaagaaaacctaggcaataccattcaggacataggcatgggcaaagacttcatgactaaaacaccaaaagcaatggcagcaaaagccaaaatagacaaataggatctaattaaactaaagagcttctgcacagcaaaagaaactaccatcagagtgaacaggcaacctacagaatgggagaaaatttttacaatctacccatctgacaaagggctaatatccaaaatctacaaagggctaatatccaaaatctacaaagaacttaagcaaatttacaagaaaaaatcaaacaaccccatcaaaaagtgggtgaagtgtatgaacagacacttctcaaaagaagacatttatgcagccaagagacacatgaaaaaatgttcattatcactggccatcacagaaatgcaaatcaaaaccacaatgagatatctcacaccagttagaatggcgatcattaaaaagtcaggaaacaacaggtgctggagaggatgtggagaaataggaacacttttacactgttggtgggattgtaaactagttcaaccattgtggaagacagtatggtgattcctcaaggatctagaactagaaacaccatttgacccagccatcccattactgggtatatacccaaaggattgtaaatcgtgctgctataaagacacatgcccacgtatgtttattggggcactattcacaatagcaaagacttggaaccaacccaaatgtccatcaatgatagactggattaagaaaatgtggcacatatacaccatggaatactatgcagccataaaaaaggatgagtttatgtcctttgtagggacatggatgaagctggaaaccatcattctgagcaaactatcgcaaggacagaaaaccaaacaccgcatgttctcactcataggtgggaattgaacaatgagaacacctggacacagggtggggaacatcacataccagggcctgtcgtggggtggggggagtggggagggatagcattaggagatatacctaatgtgaatgacaagttagtgggtgcagcacaccaagatggcacatgtatacatatgtaacaaatctgcacgttgtgcacatgtaccctagaacttaaagtataatttaaaaaaagaaatcatatttcaaacaggctttgcattatgcatgttcacctgcagatcctggggttgcagtgggggcctggagaattttgatgaatttcctctctgctgttttggagaatttggaaaacagctgactgagcattttgcaggcacattctggctgtggatatgcaaagctttgatgcagtgagttgtagggtccctgagctagagtcagctcctctccaaggcacaaaaatgcactctttacttgccaacattcttagtgtcttaaaaaagaagacttttttcctgctgaagaaaggcaaaaattatttggcacctagtacccacaaattgaccatgggaatttccaaggtggcagctgctgctatgtgcaaaacttaacttgtctcttgtcaggcccccagggaagtttggcaagagtaactgaaaagatatgagaggtgatgaagcctcttgttttcagcaaatgggatttattcaagactcttttgttgctctcaacaagcacttgggatgttttatgcaaacaaagagttacagggagaaaattaaaaccacagagtagatatgtaagcattgcaaccatggagccactggaaaaccagctcagagaaagctaaagaggaggaacagaggaggggactgggctggagggcaaaggaaaagcctccatgggtccctggagccctacatctgcccagagaatgatgttgctgctgtaggagcccagtgcaccaagagcctcacacccatccagcttcagactgatatatactttcttcactttttatcttgattgattagggtccaccggggcttcctggcaagacaggaccaaagggagaaaaggtatggaccactactttcttcaacccttctttccttggcaattccagcctgttttctgggcatcccactgagaatttcctagttgagatttccaaacatgtgctaactctgccttggtgagaggctgggttccatgatggctgggctgctgcagcacatatgggataccactggtgtattttgacgtggcctatcgacatggcagaggggccgtgagcagcagccaagcaactgagccacatggccatgcccagtcatcagctctactaaggcttctgcttccagaacatctcttccaaagcagcctctccttacctgtcttctccatccatagggggagcttggccgaccaggaaggaaggtatggtctgcgctgttctgtgagtgtcacatgagcgtctgtgcttcatgtgtgtgcatgcactcctagggaggggggaacagcaatgcacttcagtggtcactgatacccaggtggacagtgatggtgctgctgtctcgatggtgacagtagtaaccttgccctttctgtcaacttctttgttcaggagcaggagcctgctactgccaggcattcagacttcttccgggggctgccaagcctggccaaattccacccctctcacttcccgccccaaccccagaccatctcactctgctacccatcagagaaacccttcatagctccaaccagtgacattgaatgactgtcactctctgtttgattaaatttgaataaagtgccagagcagacagaaacaaatggcttttgctttttggctcagctgaaataaatggaggttacttaaggtcacggtgactctgcgtgaaccaaacacatgttatcaaggctctcattagtgtcaggagggagtaaatcagctgcctattatatttgctgaggtcagtggatactggcactgaatttctaggtcttggttatagacaagcgtgcaaaactttggccaagaaagatgtccatggctctaaatataaattactatatttattgttaaatggtttattaaatggtttcatggtccacaagatccttaaacagacttttgcaagacaaagttacaactctttagggcacagatgaaaactatagccaaggcacagtggctgtctgaagtgctggggtggtctccatggcaatggtcaaaggatattctgctgtggtgtccatgctcaggcctaacaaggaccatgattgattagtgatgtcgccatggatgtgggaggcaacagtagaaaccagtacacgtgccaggatttggtatatctggtttaggggctgagcccttcacatctctagctaattgcgaaattagctaatgggcacaaggtcaagataggcccttagcacctgcacccactctctcttgcagggcttgctcttccatagccctggcttaggcagagacacaggtgacatgtaccctgtgcaagtgaatacattattatgggaccactctcgggaggaacctgtagggagaatgggagaagccaggcaaaggtgtggtatcaggtgaagtcgagctttagcagtctgatatctagggggagcttgagagtgtcaactgcccaaaggtaagggagctggactattggctgcaggaaggagagttacataaattactgggcagctccaattgctcaagggcaaaccgcagttacaggtagcagaaatgagctgttagcagcaaggaaggtagcctctgggcgatgggcactctgagcaggtcaaaaagaccttgaaagagtgctgacagcatctgctactgctccccaaatgtaatcctatctcattccatagcacatccttggaaagaacccattggaacgcaggggacttttgggtgggggtgggtagaagtgacaaaaattaaaaaaccaagaagtttagagtccctttctcaccaccctccatttcttgagaagaataaggtcttatttgatgatacagtgtgacaccaagggcttgtcaggccatcagtctttggagagtggggatgagggtcatagtagccatgcctagagaacccactgtctcctctgggccccagagacaaaacatatttattagaagtaaagaaacaaacccagttgccctgacttttgttcttggtctttgaagggtagacctggccccccaggtgttcctggcatgcctgggcccatcggttggccaggccctgaaggacccagggtaagtgtggcatgctctcagggctcatgcggtgtcaaaacaagaggggggaagatggcagctttcctggctcctggcacatagtcagggaatcccttcttcaagagggggaagaagaagagagcttaaggactggccacagggccccagatacttcctccttcacttggcctgcaagaccttgatcagtgcaacagctctgttcctgtgggaggagaaatagggggctggtaccctcttctacaggggccgtggttctcctttgtcctaggaactagcaccccactctggtttccctgagatgacctaagaggggcttgcgtctgggaagctcttgcctgtcatgctgacctggcagggaatggagagttgagaaggtggtgttggctggctgaaggatggaaatcctacattcagagagggattgtcgagtgctgatgaaatctccttcctcagtcaggctatggaaagcaagcacatccccatctgtgcctctgtttttcccactagtagtcatagactagagggttcagaggcgtgactcagagttttatctgcagaagtcagagctgggcaggtggatctcaccatctgctctgatttgtttactggctatattatagcagtggaaaactgtgtgtccagtcctcttaggaaaagtcccaaaaggatattttaaaaatcctctgcatacagctgagctgtcctgcacagcagccagtagccacatgtgaccctcaagcccgtggaatgttgctagtgctactgaggaactgaatttttaaattttaactatttgaattaacctttactaaattcagttatttgaaaatgttaaagtatgtttggagcaacttgaatgcatgaatctgctttttcaactataaattttatgatctctaagtacagattaaatattttggatgaaaatttagcacctgaatggagatgtgtaaatgtaaattacatagcagatttcaagtacttattatgaaaagcacaatgtaaaatatctcaataatttttgtatagattacaagttgggatgattaattagattaaaggagatctattaaaattaacttcattcgtttagttttactttaaggtgacttcttttaaaagtttaaaattaagtatgtggctcaccttatatttctattggttagtgctggtatagagtatttttagtacagagggtgggtgctggaagtcccaaccacaaatcattctgaggacccttcctatgcaaagagcaaagcaggcaatgttttttgcgtgtattgacaccttgttttctggggccccagttccgtcatgccccctccactactctctcactatcctcgctaggaaaataccaagtattaccatatacaacatcttagtgagcagttggtgtggggatctgcttcactttgggcgttttcattttatatttaatcttaaacacaagaatgaaatgtggagtacggagttttgggacctcaggagggagaaagtgggtgcatctggggtcctcagatttacaagccagccctgatatccccagttccttcccaatcttgcctgtgacttcctggttcagtttctctaaaaaatatcaccgtgggtcttttcttcttctaattcccacagggtgaaaaaggtgacctgggtatgatgggcttgccagggtcaagaggaccaatgggctccaaggtcagtgtggggtccaaatggacgttcccagatctctgtcaggctctggagcagctgctgtctacaaacatagggactgggtggggctgcagtcccggactagggaatgtcgcggatattggagagcctgcctttaccagccctttggagaacatcatgccctgggatgcaggggcatagggatgccattcctgctgttctcttgggcaggaagaaccaagcttctggacatcagagcagatggaaacctttgatcaggactttgcagagtgataaaagcaatgttccttttaggcctggtataaccacaaccctctgggacatctttgtgtttggtgctgcaaccccactaaaactcacagtgcaatgtggagacataccttaccaccacattcagggattccttctattcttccaccaaactcagaagtcctacagggctgattgtaaatgtaccttctgctttcttttagggctaccctggatccagaggggaaaaggttagtgcttttcttggatggtgtcctagagcctggtctgggctactggctctggaatcagagacatgcagagaatgggtccaggtctctctttagtctgcaactgaagccaccatccctagctattccccaccctttgtcagtggactgagagagaagtgagggacctcctgaagcagggcaagctggtaagagaagggctccccatagaggcagaggcccctcgtgtggagcacataagcaaatgaaggccgtgccaggtagagaataagcacagtttgcacagagtgctggaggaaattggtgatgcatgtctttaggccaagctttcaccaccacacaaccttctgacctggccaaaaaccaaatcaaaacagcatcaacctgtggacaaatttcctacaggatgagagaggatttggggcccagaattttccgtgagttgtcctttatgaatgcaagaggtctttggggttcaacaagaagtagatcacaaagcattccttccctggagaagtcacctgacatatctgagcctatttcttcacttgtaaaatgagggttttggtttagggagcttttcagtttgaaatgcttgaatttccctcccaggatattaactcattgactttctcctatggtttcttcctagggatccagaggtgaaaagggtgacctgggtcccaaaggagaaaaggtaatggagaaaacctttccatagaaatgataaatgtcagtgcaagtagcagcccccacccacccccatccgtggactgatgatggactgatggacaggcctccatcttgaaaatgaccaacaaagcctgtccacagccatttcaggtgttatttcagaggtgatcacaattatttgttgctcttttcacagggtttcccaggatttcctggaatgttggggcagaaagtaagtaaccttgaggtagtgaaaataggcctcaataaaaatatcaggtcctccaagcacaacaaaaagaactctgcctccttgtctatcaggcagggatggtgggtttaaccatggaaacttctattttgggacgggaagcaagttgcttttcaccctggggagagggtggcaggatggtctggagcctccctctagctcaatgggaaggaaaggacaacccatctgggttttgggtttttgtttgtttgtttgtttttttgcttttttgcttttcctacctcttagagggctgtggtcctattcaaatgcagaaacctttctcacaggggactcagatctgagccacaacggtcaaagcccctgtcagcacacaggcctcagtgtaaggcacaggtgtctttagcttaaggtcactgtgccttattgcagtccttcttcaagggcggtgcacatactgccagaaggacacaaaagtatttgaactgaagactgctaacattgtttaagagttaaattttgtatttaaatagttaaatattggccaggcatggtgcctcatgcctgtaatcccagcactttgggaggccgaggtgggcagatggcttgaacccaggagttcgagactagcctgggcaacatggtgaaatcccatttctaccaagaaaaatatacaaaacattagctgggcatggtagttcgcacctgtagtgccagatacttaggaaggtgaggcgggagggtggcctgagcccaggagtcaaagctgcggtaagccatgattgcaccactgcactccagcctgggccacagaggcagaccctgtctcaataaataaataaatagttaaatatttaatggatatcttgcttgggacaaggcttaataaaaaagggtccatttcaggtaacttaaagaaaaaaatactcagcttgggcaatatagtactatctcatctctaaaaaaaaaaaaattagcaggtcatggtggcacatgcctatagtcccagcgactcaggaggctgaggtgggagaattgcttgagcccaggtgattgaggctgcagtgagccgagattatgccactgctctccagcctgggcacagagaaagaccatgtctctgaaaaaaaagaaaagaaaagaaaagaagaaagaagtgaagaaagagagagagagaaagaaagaaaaatattcagtaaatagcaaaacagtggtatatagagatgacaaaaattgtgaaggtgactgttgaccaacatatgttttgaaacttttaccgagggttagggttggggaagaagaacaagggtagttgagggggaatgtcagagaataaagagagaaaagggcatacatggccatttggaacagctcctaagctaacatcattttggctcctcatgccataagacattgacattggaaattgttattttaacatagttctcaaaccatcatattcttcaaacatgcaaaggggatgctttgttagtatttttcatttttaaaagttcaccttaaagttttatttaccaaactaaaacaatttttatcttaccttttctagtcagtggaaagtgtttaaatattttcaatcaacatgcattaatttattatatcactaccttaagctgtcagaaactacactctgctaccctaggtagggtgttgggttaaaagaatagattaattatataagcaaattaaaggaagtgttaaaagagaaaaaacagttttacttaaaaatatttagattagcttttcattcagggcaacagtgaacgtcaaagaataataaattactgtaaaattaagtatggcagcttctctgtcctctgcaccatttactagacttcccatctgaagagttgtcttccccttttatgacaggctgttttaagacagagctgatatgatgaccataattaggtcttgggagagaaattagatcaagaaattcctgactgcttcaagctaatgtagagaagggccacacttccttctgacaatccctgaaaaaaaaaaaaaaatgctgcttgtgctgctgttttctcccagccataaagacatccccgagcctctctaaaacagccagggaaaaactgcaagcatctccatggcatgcggcatccatcctatcctctcacacgctcccattccctagagaatgttgaaggatgtatgggttggaaagaaataacagatttaaggacaattcttggtgaaacaagacattggtggcttgggtagggacacattggctgagctgacagataatttcagagctttatgtttgatcctttccatatacaggtgttccctggaattttccattgtgttatacctcctctgactgccatgtgaaaaagtgcctgggtgttttttgttctctctgagtgtctgggcagctcttcatgggcactggctgctgattaacactcatggttgctattgctaaatttttcttgttggctgtgcattctgggctgttgggggattactggagataggaatgaagcgccctgtgggctgacccaaagaaatagtaagtggggctggaatccatgtagaagaaaatggggaagaaggagagaaactaagatggagaaatgagttttgtgaaatattggccttaaactatgaaattctgcaatgggtacattgggttttgatagttcaacatagagctttacaaacaggaatattgtttccattgttctccatgcctttttcaataattatattgaagatgtgaacatatgtttggaacatctctcccacaaaagaactttcatctaaatcaaatggaagtgagctggaactcaaaccaatgcttactaagagtgggcaagcacataatcctaagcaagagtcattaaatgagtagaaacttcccaaagatgacagctggcaaaacagtgtccaatcatttaaaaacctccagatttgaatttgtgctaaaaacagcacgtaagaaaacacaacataaaattccaactagaaggaaagcgttttcccagacagcttgtagtaattagcacaggcatgctgtgctggatgccccagcctctcactgcctgttctgggtgatgatttgtctcttctatttggccatcaaaatgtgtgctgctccacacctgtccctctcaggtaacagataacccactcagaattaccttcttccttccctcctcttccatgaaagacatgtctgcctttctcatgacttcctcactctgctaaccttgcagggcagcccagttggcatagattcggaatgatcaagtagactgccctcgtagccaatgactggctagacctgtgtagatgtgcccactccacatgccctaagtcctctcttgcttctctttccttctttccagggtgaaatgggtccaaaaggtgaacctgggatagcaggacaccgaggacccacaggaagaccaggaaaacgaggcaagcaggtaaggatcccagggcttaccacccgcctgaggtcagaacttcctgacctggcagtgtgtggagtggcaggcaggtggcgttaatcagagatattctgtagaccttgactccagcatcctctgggctagcagacgggagcagcaccacttccagaagctgctggcatctctaggctagccgtagtttgaagtggatgggataggatgctccatgtgaactgtgccaaggccagaagcaagagtggatatttggttcataaaaataagtctgtcttaaccaaagcagctaggaatggaaggcagatatggtcatttacccagaaaacctattttatgcttcaatgtcccagacacaaatgaagttttaaaaatgagcctagatattttcctgctgttgagaggtcttctgggtctcaacaatagggtggtttttccctactcaggcctccaatttgtaagtgaccttttttcttgggttgattaacatgcttaaggcagttgttcattctgaactccccctggtcagcaggctcttgtgttaagccatgtgatgtgacatgactgctctagagacagccttagctgtctcatatataatcctgagaggtaaacatctttggatggaagctttttccattcttttacttatttccttaggctatatctgtggcccacaaacttaatcttacatcaagatcacctgggggtggggccggtgattaaatacagatgtacagatcccccacatcaggtgcaatggttgtagttccaagcttgccactcctcatccccagtgcctaggccttattttccaaagaccataatataattgacctggaatgagctttcagcatgggtttggttatttttttttaagctccatatgattttaatgtgcagccaggtttcagaaccataataacactatgaagccaattctggtcttttcccaatcaatttagaaagaacacaggctccaacctggaaaatttagactgtgcagtaactttcgaagttacaatcatccagtccagttttcaaactttgatcatgggtagcatggtcatggtttcacaatgatgccacagataccaatttcttaaaagtaggctcagataaaaaaggaaaaatatgggggagaaatcttttcttatatcactttatcccctcctaatgatttccattcataatattttaagcttggggttccagaagcttcctggcttccttctgtcttgggcagtgtttgccttttcctagttcctggcgataaccaaagccaggaaggccatttcttgagcctgctgagactaattccgttggaatcataaaagctacaccaaaaccacatctgggagctcagagaagttagagaaaagagcccaagctttcgacaagacattgtgaacaacccgagggtgctgcaaaccctcggtgttggggtcgttccagttgggagataacgaattgttagccttagaagcctgatgtggtatttatttttatcatgaattaatctcccagcatagtcttacatactctttgtttgttggccagcagtgctgagagtctctgaaagttattgttaagtcaatccaaagccaaaaatcagaaattcagaaggaatttcagatagtaatttctgtgccagaaggattacagagaccacttaatccagtctcctcaggttattctcaaggaagctgagggccagggaggtggagttgcttgcccaagacccctccatgaagtcagcttcaaagccaggattagaatccagagagttgagttgagaccaactttccccacatgacttcttctctcagctaccttcatgcttcaggacttgccttcaggcaagcccaggaaagcagctgttgactttattataaaaatcttctcagccgggagtggcgactcatgcctataatcccagcactttgggaggccaaggcaggcagatcacctgaggtcaggagttcgagaccagcctggccaacatacagtgacatcccacctctactaaaaaatacaaaaattagctgggcatggtggcacacacctctagtcccagctgcttgggaaacttaggcaggagttgcttgaacgcaggaggcagatgttgcagtgagctaagatcacgccactgcactccagcctgggcgacagagcaagactccgtctctcaaaaaaaaaaaaaaaaaaaaaaaaaaacttcagtaactgagaaacaatttccttgagagagatcacccaactttgtggcaaataaggaataaagaatgcctttcctggaaagctctactcagtgagtcctgctgatagagacgtggctcattctgagcgatggccgataagcggaatattccattactgctggtgtcagaatgaaggagcatttccagctccttcaagctttggcacttcctttgctcagagccagctgacatggccgttagaaaaacaagactgaactgtggctatattaagatgtgtgacttcctttgccatcctgagacccagcttggttactgcagggaatgcttcagctaggctgaggcttaagaactccctccataaacatggaatcagaaataaactctgacctcacggatcccatattcagagttcaagaactccttgcacattaccaagacggcccccagtgccatgtggacaaggcagccggtcacctgtcaccgttgtggctggaaacgagtcccaagcctgcctgctccccagatttgaggaagattacatttcatcaggtgggcaagcctgccaaggcgcaagtgtagtaagaagaaccaggtcaaaaatggcaagtgtcgatcactgctctgattaggcctgaggcaagagcagacaattagcaaattgctcaggggaagagtcaatagcatgcaccagccttggtttcggggtgactcctaagagcaaccctgagggagaacaaagagcccagtctttgctcttgatactcccagaataggcagaaaagaggacactccatgcggaacggctatagccacagatgtgccctttttaataaaccaagacttaactacgtgaaacagatggaaccaagccagttgctgtgataattggcttgccccacatagctcttcgttctgtacaaaccacattttcacatctgagatctttgttagtttcacagacctatgtgggtgtaaatttactggcctcattttaaagatgacaaaactgaggtacaaagcaatgacatgagttacctggagtctcaaggtcaaggtgaaacctctggatttacagatcagcaaagctgcctaccattgtgtttctagcatctttgtcctccctcatttcatctggggaaaggaggtgagctagacagattccagcccatagggagtgtatgtctcatggggagacatcaatgaaatgaccacacaaataatccatatgctatgatctgggataaatgccatgaaggaaacaggctgagttatgagagcttatggtggggtgaactgactccatccaggaaggtcagggaaggctttgccatagggcatttgagctgagagccaaagggtgagtgacagttaactaggctagggggaaggaagagattttggggcagagagaagggtcttgagaagggggataatagacatggtgcccttgaagaccaaaaaggccaaaaggctggaatgaagctggaaagcctagccatgcaaggcttcgcaggctgcagtaaagagctaagtctttatcctgagtgcaacgggaagccaatgagtgaaaatagctcatttctaggcctccatttcctcatctgcccagggcctagagtagatttgactggttcctttcagctgccatgtgccacatttgtaggacagagcaagaactaaggtctacaaatttgtagccatcactatctcaaatgtcacttgccctaagcttattaagagctcgatggtcaagacctctggagctgcatcccccactgggctcttgctccttaagtgcaaggtgatctctgatttggtgataaatggggcgggaagcttgctatgtcatgctttcataacaggctctgcctttctctctgtcagggacagaaaggggatagtggagttatgggcccaccaggcaagcctgggccttctggtcaacctggccgtccggggcccccaggccccccacctgcaggtaagagctacactgcttcacttgatccactgttggagtactggccagcctcccagagagggcacaaggagatgccagcagagatgccttgtgtttcaagttagaaactaccagagacactccaatatctttgtaatttctccacgatttagctcattcaacttttatgcaagagagataaatgccattctgaatttgttttagcattctggagaacaaatagaggacagaaaaaaagcacattaatgatgtcatttataccttaagtgaaaaataacaggaacatatttcatcaactaatacctttttctagataaaagtgtcatggctccaagcaattctcttaaacctagaagtaaaggtgacattgcaggttttttccaatttacagtgttataaaagagtccttatttgtttgcaatagctagagaaagaggctaggcatgggtggctcacgcctgttatttcagcactttgggaggccgagacgggcagatcacttgaggtcaggagtttgaaaccagcctggtcaaccatggcaaaaaccgttctgtttttgctaaaatacaaaaatacaaaaattagcctggcatggtggcacgcggctgtaatcccagctactctgaggctgaggcagaagaatcacttgaacctgggaggcggaggttgcagtgagctgaaattgtgccatctcgaaactctgtctccaaaaaaaaaaaaaaaaaaaaaagatgtagaaagaaattactaaaataaaataaaaaaataaaaagttggctgggcgcggtgggtcacgcctgtaatcccagcactttgggaggccgaggtgggcagatcacgagatcaggagattgagaccatcctggctaacacggtgaaaccccatctctactaaaaatacaaaaaattagccgggcgtggtggcgggcgcctatagtcccagctacttgggaggctgaggcaggagaacggcatgaacctgggaggcggagcttgcagtgagtcgagatcgcgcaactgcactccagcctgggtgacagagcgagactccatctcaaaataaataaataaataaataaataaataaataaataaataaataaataaaaatataaagtctgttattgagaagggcatagatacactgcttccttgtatgtttgttttcaagacagagccttgctctgtcgcccaggttggagtgcagtggtgcgatcttggctcactgcaacctccacctcccgggttcaagtgattcccctgcctcagcctcctgagtagatgggattacaggtgccttccaccacgcctggctaattcttgtatttttagtagagatggggtttcaccattttgttcaggctggtctggaactccggacctcgtgatccgcccacctcggcctcccaaagtgctgggaatacaggcgtgagccaccacacccagctgctgcttcctcttttacctcattcaattttattagctaagccctttatttcgttcccttgtcagctcatggtaggggctttcacagcacatcaactgtataaagacagtatcaagaagatcatttgttgactgcaacattttctgtcttcagttatacaaaaggaatccaaacaatttttattccaacttttttcttaagaaaatgaagacatttacaattccacagtgtattccccctcctcctgtgtttatggaactatatttgcaaccacatcatgggatgggcaagaaatgtcatattttgttagatcctttaaactaagttaaatctggctctgagagtccaacctactaggatgccaaataaattaattcaggcattattaggattttcactactcctccaacaaccacaaataggttgggcaaagatcctggtgaattatggcagaaaaatgtcagggaaggtccctccaacctttggtctactccattcacctctgaaatagagtagaaatagaaatagacttgttgtccaagtccctgtggtccacagatacctggtggctgctgttctcatgccatacgtgggtatcagaacattttcaaggctgggagtcctggtccccacagttcaactttccaaggagcaccccacaaccattctttctgagacctgtctctttctcaggatacaaggggtccctctcctgtccatgtctagggaggtctctcctcttccatccctgacccctccttcctcatactcctcatataccagcaccccaattaggagctttgtccttcagagaacagaaggcagaaagaaaagtttgtttccaatagtacctgcttttagcaagggcaagaaagcacaaactcttgctacctccttgaaatagggagaggaggaaggaaatactgggagaacaaacactgattagtatgggtaataacttatgtttgctgcgcctgtttccatgttgttaggggaatcagatttgagatgcagcccaggccatgtgcccacactccataattcatttctggaattggctggatgatctgaatgggggtcctttcaactagtcctcttcctccttggttctggaaggcatgatgtccccctggagccccataactatgagctaccaaccgcagagactgagagcttggcctgagttgtgccttcagaagggactctcttggcccctggggtacctaggggctcacaaaactgaggagtaggccaggcgcggtggctcacacctgtaatcccagcactttggaaggccgaggtgggcagatcatgaggtcaggagatcgagaccatcctggctaacacagtgaaaccccatctctactaaaaatacaaaaaattagccgggcgtagtggcgggcgcctgtagtcccagctacatgggaggctgaggcaggagaatggcatgaacccgggaggcggagcttgcagtaagccaagatcgagtcactgcactccagcctgggtgacagagcaagactccatctcaaaaaaaacaaaaaacaaaaaacaacaaaaacaacaaaaaaaaacaaaaccaaaaccaaaaaaaactgaggagtagtccaggggcatgggattggtggatgtgggatgtgtaggagatccttagcggactgggatcttaatggtctcactgtgtttatctctttgtaaaggccagccctcacctgacttgtctggttccctcctggggctaggggatggatgagaagggctaggctggagctgtcagcagcttcttggtgcctgctgtttctcttgtcttgtctgtcttcggtgtattgcaatcctgtcctcttagcaggccccgcagagtcatactttttctccctggccttccagctccctctcttccacccagtatgcccacctccctctcccttgactaccccagcctctgcccaatcacgccctgccctctacccttcagaggacaccttgccgtctgtggagctggagctattcctatggtctctctgggtccacatgaccttacatggcactcctctcaccttctgtccatccaacaaaattctctgttcctttgaagctctcttttcagtaaggccttccttggcccctaacaggatggatcaccctcccctgagccctggtcattgcctctctgttatggcctctccattggtaacgtttctgcagatgtgtttcatcttcccactagatccttgagggcgaggtaggcggctgagtcagcttcacatccccagtggcacctggtatgtgggtggacagggctgcttcctgcaggggctcccaggcaggggttctgtgggttcacagttcatctccttaggagccaagcagggtgggaccatctctttggattgatgcccccgccccccattccgtcctttgagccacttcctttctgaggaggcttcctgagtgagcgggctgaagaaggtaaagagaagatggggcaataaataatcctgctctttggaaaatattggaggggtggggagagagggcaaggaaggagttaaaaagagatattcagccgggcgcggtggcttacgcctgtaatcctagcacttggggaggctgaggtggacggatcacttgaggtcagaagtttgagaccagcctggccaacatggtgaaacccccatctctactaaaaatacaaaaattagccgggcatggtagcgggcacctgtaatcccagctactcaggaggctgagacaggagaatcacttgaacccgggaggcggaggttacagtgagccgagatctcgctactgcactcccgcctgggcgacagagtaagactccatctcaaaaataaataaataaataaataaataaataaataaataaataaataagttatccctgtgcctgggaccagttggataatcatccagagttggactaggccccccaaattggttcctgacactacctttgacagtctgatgaaagtcccaaacccattctcgggggggaaaaaactgtatatacctacatccaaggttttgcaccctgtttcccagggttccagaacccctgtcccagcgccatcgtgagatagccttggcctctgtagaccacaggttaaaactcccctggtctagtcctaccctccccttagagaaaagaatcttgaacctcaaagagaagtgatgcctgcaaggtcacagcagtgactgggggccaccctggtccagaatgggtgagtgtcagccaggcggccctagaggttgttgtgctggttcctctgccctctcctagattcccctttcctgatcctttcccactgaggcagccaatggaagcgggagcctgcctgggaaaagatggagagccaggtcctctggctgcagggggtggcgatgaaacccagctgagacatgatctcccagaggtcagggtggggaagttcaggttgctgagtcctttagtatagcctggcagaaaacaggcaggggtaacagatgccctgcagcaactgggaggaagctgcagggaaactgcagtggtggcagcaggctccctgccacatcctgttgggaggtgacctcggtttctggtgcccagctctgtgggaccagatggtgctgggggaggtggaaagggtgagagctttgtacttatctgagttagagggtaagaggggctaagaggtcggggggggaataaaggcaaaatgcctttaggatgtaatttgcaataatcaaattacaaatttggctgagtccttcctgtacccagacagagtataagtgaatcaacgtggtacctgggaattgccagcttcctgagagcatcagtattcttggacatttgtcttttgaacagcatagtgttaagtaaaacatgaattcaaatctcagcctcaccattcatcagcagctaatgggacaaactcctgactgtctctcaggccatggttctggaggagttgttggggtcacagagccttctggaaggctgttccaatgccaccctcatattcttggtcacagagcttttccacttcaatttccccaagtgcttaattacccagaatattcctagcctggtggattccctgtctctctgggctcttctgaaaatatcagaacacagactggagctcttcctacagaattatatttgtatttcttgttagaacaaacaaccataacttaggataagatattggcacagtgcccttcccctcatgctgtcagcattctgattgtacgaatacctgtcaactcgctcaggaaagttcagtctcctccgactgcagtgttttccctggggtcctggccagatctctcccctggggtcattttatttcctgcccttctggatctgtgaactgtgttcccagcccctggctgccccagatgtcatactgcctgacaccaatgactggctggcctccaaacccacccctcgctattttcccagaagaagggatccttacctatttctcttctcagtccccatctttttttctctttcctcacttcctgttagatggcttttgttctggtgcttttctgccagccagaatgtgacttttaccctcttctgaagactttttctctccaattagtcggcattcattcattcgatcatcaaacactttccatgcccctactttgtgtaagccctggtggatgaaaacaggcactagccctgtccttgtggagcgacattctactggagatcaaccttgatggaataatctcacaatatatagaatcacaaagagaagtgctgtgaagaaaggcataggaaaccatgaaattgtatcccaggtatacatgacagagtctgaggattcaaaaagtcttccttcaagaagtgatgtttgaacccagatcagaagggagttgagaggcagctggggagggatggaggatgaagggaggatgatctggcaggggaatggcccagttctcaaccttggggcaaattggaatcatcttgagagcttttaaaaatatggatgcctagcacatgtatacatatgtaactaacctgcacattgtgcacatgtaccctaaaacttaaagtataataataataataataataaaatatgggtgcctgaccaggcgcggcagctcacacctgtaatcccagcactttgggaggccaagggagatggatcacttgaggtcaggagttcgagaccagcctggccaacagagtgaaaccctgtctctactaaaaacacaaaaattagccaaacctgatggcacgtgcctgtagtcccagctactcaggaggttgaggcaggagaatcacttgaacctgagaggcggaggttgcagtgagctgagattacaccactgcacttcaccctgggcgacagagtgaggctccgtctccaaaaaaaaaaaaaaaaaggatgccttatgctaaagtggtaaaaaaattttttttaataaataaataaaagtgtggatgctgcctaggttcagttcagttttcagaagtcttgatggaattggtctgaggtgtatcctgggtatcagagcctttaaaaaccaaggtactaccctcacagttcttccacattgctagggagtacactttctgatcatatcttttcaagacatgtcctcacttcttcagcaccaggggagggtaaatgggcagagcatatactaatgttctattttcttccagaagaaatgaaagaaacccacatccagaaattcctctgtaaagatcctacattggctgggtatggtggctcacgcctgtaatcccagcactttgggaggctgaggtgggcggattacttgaggtcaggagatcgagaccagcctggccaacatggcaaaaccccgtctctactaaaaatacaaaaattagcctggtgtggtggcacacacccgtaatcccagctacacaggaggctgaggcaggagactcacttgaacctgggaggcaaaggttgtagtgagccaagatcgtgccactgcactccagcctgggcaacagagcaagactccatctcaaaaaaaaaaaaaaattctatatataagaaaaacaaaagttttttaaaacaataaaagttaacagtcaataatgtgtttgtcggcaagaagccctctgttaataatggtctaaacaaataagacattgtttttctccaataaagaaatccagaggcaggcagtagctggctttgattcagcctctgactgtcactgtcagggccccaggccccatgagcctttcgtctttcctgcatgttggcttatcttctcatgcttgtgacttcctggttgcaacacggctgctgcaacaccagacatcttgcctgtcttcaaggcaggaaggagggggaaactatcgcctaccagctatttttcttaccttagctcctccatgtcttggatcaaaagcatctctttgaacctctccctcaggcataccctgaaatgctgtggactttaaccttttttctgttgcaaaggtcgctcacatctccctggttgtttggtcttctcttccttggctctagtaacacagcagtctgttgcttcctaggacaacttataatgggacccaaaggggaaagaggatttcccgggcctccaggaagatgtctttgtggacccactatgaatgtgaataacccttcctacggggaatctgtgtatgggcccagttccccgcgagttcctgtggtaaggctttctgggagaagtctggggtggttatccgtgaggacctctcacctgatccttatggggctttgtaaaatcctttcagtaaaactaactttttttcacgactctgagtacaccctcattataggaaattggaaaatatgagaaaatcaagaggaaaaccaaattgtccatttgattgtgagtccattttggggtattttctttgtcttattaaaatctaacttttatatggttgagattatattgtataaaaatgtacttttggccgggcatggtggcttatgcctgtaatcccagcactttgggaggccaaggtgggtggattataaggtcaggagttcgagatcagcctggccgatacagtgaaaccccatctctactaaaaaatatatttaaaaaattagccgggcgcggtggtgcacgcctgttgtctcagctacttgggaggctgaggtgggagaatcgcttgaacccaggaggcggagattgcagtgagctgagatagcaccactgcactccagcctgggcaacagagcgagactccgtctcaaaaaaagttatactttgttatcttagttgaaatcctgccatgtttccacactctataaataacattttaaactttttattagggaaaatttcaaatacatataaaagcagaacaaatagtgtaatgaacccctgtgtacccttcacccaactttaataatgatcaactcatggcgagcctgtgtccttgttttctctttatgcctactcactcctgcccattctctgttgtattattttgaagtaaaccttggacatctgttcatcataatcatccatctagtgtggctgtgctacaatttacttaaccagtgttggtgtttaaccaacctattgcttattggccacccccaagctttttactaatgtaaataatgctgtaaagaatatctttgagtaggataattttaagaatcacttccagatgtcaaattacttgactatatgacattgccttttaacttaagtcttgggaacgttttaaatatttaaaaatgttaaatccgaggccgggcgcggtggctcatgcctgtaatcccagaactttgggaggccgaggtgggtggatcaccttgaggtcaggagctcgcaaccagcctggccaacatggcgaaaccctatctctactaaaaatacaaaagttagccaggcattgtggtgcacacctgtaatcccacctactcgagaggctgaggcaggagaattgcttgaacccgggaggcagaggttgcaatgagccgagatcacgctacttcactccagcctgggcaaccgcgtgagactccatctcaaaaaaaaaagaaaaaaaagttaaatccgagtgaatattttagtttcaaactcagacattaggaacttgattgagaaggtgagggaatcaagacactcctctcacttcagaaggaatgctagagtgtagtgtgcaaacccctcttcccactgttgagcagcccaaggatagagattctgtttcctcctccagcttttttcctgccccctgcagaagtgttttctggaatcctcaccagtgtgttctctggcagatttttgtggtcaacaaccaggaggagcttgagaggctgaacacccaaaacgccattgccttccgcagagaccagagatctctgtacttcaaggacagccttggctggctccccatccaggtacccccaggccattacctcaggacatactccctgcccaggagagagatgcatccattaaaggaagggaaggccaccccactgggcctggggagggctttctacagtctgtctgcatgggagggctgagcatcctccctcaaactctctctgagcagccctccattcccccaccctgactcccaaatagaagcccctctctgagccagggttccagatggtctccacatccctgcgtgccaggttgctgtcttgatctgacccaacatttaaccagctacagagctctgggcaacaggaaaggagtacctttcccacccctgggaggaagtcaaggcatgccccccagcagtgcctttggaccaaaaccaatgacctccctgcctgcggctgcctgggtatgccatgctccagttaatgctgtgtgcttctttggccagctgacccctttctaccctgtggattacactgcagaccagcacggcacctgtggggatgggctcctgcagcctggggaggagtgtgacgacggtaacagcgatgtgggtgacgactgcatccgtgagtgaggcccagaccaggaggacctgaggcctgaacagcaggggggtgggactcagggccagccctggacaccagctgtggtgctttgggacctttctagagccagagaagggtatacccaggccaccttgtgccacccaccccagtccctgctgccccagtttcagcccaaatattaactcttccaccacccaagcacctcaccaggggcggatgtcaaggatcctgcccccagttaggccttctttatctcaaaatgtagccaccaggtcctcccagtcctacatcttagcaaaacccatgttacaggtgcagaagataaaggtgatgggctctcactttgcatggagtagtgaaaggcaaaagggagaggccaagaatctgaatgagggctcatttaccaggtagagctctagtagcaaagccctccgtaggggaaactgggccagccagagctgctgtcagcctcgtgggctgctgccttaactggtaggcagcaggctctggagggcttgcttttgtttgtttttgtttttgtttttaatcaagtaacaaaaccaggaggtgtgatggaaagcaggagctttagagtcaacagaggttgaatgcaggccctgagaaacaccaaccaccctcaggctcaaggcagaggccacatggtgggtggggtaatggggggcaatttacagctctgagcctcactttccttgcctgtaaaatgggtatgatgtgctggctgctcaagtccctagagatcctgtgagctaacatgtgcagagattatctggatatagtaagggttcaaccaccattcactgaattcatttagggcttgtggtttaagcccctgctctaaagatccaggctggggctcagggctggatgtgtggatgcaaagtcatggtccttgctctcaagaagctcaggggaggctgggcacagtggctcatgcctgtaatctcaacactttgggaagctgaggttggaggatcacttgagcccaggagttcaagaccagcctgggcaacagagcaagacccaatctctacaaaaaaaaataaaaattaaaaaaattagccaggcctggtggtgcgcacttgtagtcccagctgcttaggagggtgaggtgggaggatgatttgagcccaggggttcaaggctgcagtgaactgcgattgcaccactgcactccaggctgggaaacagagcgagaccctgtctcaaaaaaaaaaaaaaaaaaaaaacagttcaggggaaggatgacagggcagagtgggtggcgggagatgctgctgactgtctcagtgtggccgaactgtctcccgacagctccagggatggcatcccctagaaggctggccctgcccagagtcccttctgcctctggtgcacagtgtcaaataggagctctcacagtaggaaggaactaatggactgtccctgccctgtgaaaacaacgctgggatccatactccaacaccctcccatcgtgtgagagcagaggtctttgctgaagatcatgtggctccccagggacacaaggctgggctcaccagtgtcacacagaagctctctgttgacagatgagagtcaccatgcaccctcactggggctcagcagtcttccaaccctcactcccgggacccccacactggctttatgaggtggaggtcatgtcagtgtcccagttttgcagataacaacctggagtctccccacccctcagctagtaagttgtgaggcggggctggagccaggatctccttcttcttgtcccatggcacatcgctgtgggaccagagcctgtgggcagtccctggaggagtgtgaagcttaatggaggtcagttctttaaggggtgcagcacttaggttggatcccttgggccgcatggtccttacaagctgaggcaagcctatcgcctctgctccttctcaagactgcacctccttatgtcccctcaggctgtcaccgtgcctactgtggagatggtcaccggcatgagggtgtggaggactgtgacggctctgactttggctacctgacatgcgagacctatctccctgggtagggatgactcccctccctccctctcccccttctttctccctccctcctctttgctttccttctttccttcacaaatattttgagtgcctctccactttgtggtgccttctagacactgaggtatggtgatgaatgacacaacacgtgctccctgcctaccacgtgccctcttggtcagcactgcctgcgtgccactgagactgagccacggcacccacagccacctgctccatccaaggcccagaggggagctgcggtctctgagctcagctgctgccctgcatgagcagcccccaaacccagtggtcaccatgactacatagtctcctgggctgtgggcctaggtgggaagcccagtggagagtaaaggtctcagggcatttccaagaatcgacatgtctacctaacctgacttccctggaacaccctgcccatccctcaggcatgcctgtgactgcaagtgagatcaaatcagccttaatatctaattttgcaagctcatggcccctccaagaaaatactccctccaaggacccctctagttatttctgagagtcctcagtggctatttatgttgttcaggacaagtattctagtgtcctggctccacactggcgcctgccaagccaactgagggccaccgccccatgaggtgctgattccatgcccagattgtaaccactgggctccttccaaggtgcagaaggtacatgtctccccagtccttacagaaccagagttgtacaacgttctcaggaaaatggggaggccgttcctttttacctaggccatgccctgctcttcactgggttccagagtggatctactggtgcttccgatctcttctgtccttgagtccagtcccttcagcttttgctcccatcccattttctcttgtagactcggacctgggcccttggcagggctggggagccatgcctgtctctccattgccttctctgtgctctctcttccaagggggtctccctaacactcagatattagcatgttcaaccaggctgggagaactacagacctgtagtctcccccagtctcccccagactctaagcccatttaggcttggccaggaccccactccatgtatgtgtctgtgtgcagtgcccctctccctgaaggaaggaagacccctgacaggcctctgccagagagttggctcttcatggctccacagagacaaatcaatgtagacgatcagatatggagtacaggatcgagtagagcccagggctcccccacgctcactgtggttacacagctattccccagaagcctcagagggacgcctgtgactgtgcctgtaaggtttaacgccctgtctcggatgatcatccgggcctacagaggtataaactgcactgtccaatatggtagcccccattcacaggctgctgttcaaatgtaaagtcattataagtaaacttaaaatgcagttactcaggccaggcactgtgactcacgcctgtaattccagaactttgggaggccaaggcgggcaggtcacctgaggttcagagttcggcaccaccctggccaacatggtgaaatcccacctctactaaaaatacaaaaattagctgagcttggtggcacgtgcctgtaatcccaggtactcaggaagctgaggcaggacaatcgcttgaacctgggaggcagaggctgcagtgagccgagatcacaccactgcactccagcctgggggacagagcgaaactctgtctcaaaaaaaaaaaaaaaatgcagttattcagtcacagtaactacatttcaagagctcaatagccacatctggccagtggcttcacagatacaggacatttttgttggtaggctgcatcgtagcaagggggattccctcacagatgctgtgctaagagcagggcaaccacctccttccacccaggccccgagctagacctcaaggcaaaaatcccagagacatgattcaactcccccaggcctctcactccaaatgagaatgggaaaaagttcttgtagagccattggcccttggccgctgtttgataaggtttgaccggaagtcaccagcatataagaggtggccttttagaacgtgtctttgcctccctcaggtcatatggagacctgcaatgcacccagtactgctacatcgactccacgccctgccgctacttcacctgagggccgtgaggagaaggtgggctgcgccccacagaactggcagcagcttctccactgtcatcaaactggccatgtcctggccccgtctccaccaacctttgtgtgacaaaaacaaggacaaattcctgctactaagacatgctgttaactcagtctgactggaagaatttaggaccactgcatcctgtcttaatccaaggtactggaaaaccttccacatgcccaacctgagacctgttccccatcgctaccatttggccaaacaaccggctacaatgctcttcctcttctggaatgttgctgacccaggccgtggacttggctgagcactgttagacacacacagacctgcaggctgttttagaatgttttgatctctttggggaatctggagtacaggcctctccgcccctgaccaccgaaacgtgcaggcattctcactcacactgggcagcccgctgtcgggtctctctaggcctatgaaccacaaagcagggaagtgggcacgttctctcggggtggctcacagctttgaacctgccaaaggacccctcgactggccacagcccagcccagcctgacgtggatgtggctgcccaggaaaagacttaactgtgaaaaagtactgagaacccacctgacccaggcttgccccaagcagaggctagagaagaggctcctcttctcagtgtttcccaaaggggcggctcttgtggtttcaaaatctctggcaccatcttgacctcttggctctctctgcactttgccccctgtctcaaaaatgtccctcatgtccatttcctgtccaggagactcatgaggactgtgtgacctgcacaagcccacacctgggcaggctgttggtgtctccttggtccttaggcagatactcccctgagtccccgatctagggccagctgcagagggctctctctaggcagagcgttcctggccagagctctacctctttgcctcctgctgacccctgacagcgtcccgtggcatttctttcatgtctgcatattgcatagccttgtcctcctgtgtgcctgagctcctcccttttcaataagattattagtcgtgcatgtctgtgagctgcctttcatcaccatttttcctgagtagggcttagttttattctggaaagacatctccaaggtgaggtccacccccacagcagacctcaagtagaaattgcccaatttttaccagctggagggacacccttgggtttttgtacgaagctatttaatgagcctgtgtcttggggactcagcaggctggagcttggggcctggtggaccatcacctggtgtctgtaggtggacccggtctcccacaggtgacatcaacctgagggtggcgtctttagagacaggcacatgggcagccctgttcccttcgcctctactgcgaggcctggggagatgttgttttcatgctgcttccaccatcacactggggtttctggatgggaaataaaaaaataaaggcagttcatttccccactgtggctctctcttccgttggtggtgggggtggggccggtgtctcagcattgccagatggagggaggagtctaaattcaaatctgcttcccaaactctgtggagggttctacaatgtggaagcattccagttccctcaggcacaagggaggaaacagatccagagatgtcatggacttgcccaaggtcaaaaaacccagtcttgctaggccagccctgtcctcagccctagttttaggaccttgtttaggatggaatggaggtctagtactactcctggatctggccaagagaggccctgtcctgggtcccaaggctggagggccctaccctggccctcctctggccattaccctccccacagggtgaggtctctatgtggccaaagtaacatacccgctggagcttgcaagccccactcctagaccatgctccaggtacctgggaaaccacagttccccacccaagtggtcttgagcctgcttcctagacctgcaggcctcttgcccatgtctgtcctcctgagtgtgacctgaaacacatgcaggcctgggggtggccagcaaaaagttgtttgtaggaattatagatggggcttggaatgtgggctgggatttcctcatggacacacatgaagcccttcttagtgtgggatgggccaggggtaaaaacagaaggggatctggcaaggggctggaccctcctctcctcttgctaccacaggactttgtggaatctaaaattccaaattcaaacctggccttccattctttatgaaagtatcctttttgagggaagcagatagaacatattgaatcatttaattgggagtggtggcatgtgcctatagtcccagctatttgggaagctgtggtgagagatcacttaagtccaggaatttgtatttatccattttcatgctgctgacaaagacgtacttgagaccgggcaatttacaaaagaaagaggtttaattggacttacagttccacgtggctggggaagcctcacaatcatggcagaagtcacatcttacgtggatggcagcagggaaagagagagaatgagaaagagcttttgcaggggaactcctccttttaaaaccgtcagatctcatgagacttattcactatcacaagaacggcacgggaaagacttgcccccatgattcagttacctcccactgggtccctcccacaacatgtgggaattcaagatgagatttgagtggggacacagccaaaccagatcaggtggcatgtgcctgtagtcccagctacttgggaggctgtggagagaggatcacttgagtccaggaactcaaggccagcctgggcaacacagtgagaccgccctccccgcccgccacctctaaaaaacaaaaagcaaaacaacaaaaatagtctgttctttgattataatgtaaatacctaaacatttggtatgtgagtgtccatatatgctctttcctggtccccgaaatattagggatgggcctatctggagctatttcaagggacggttctgaaaggctcaggacatgaaaggattcaaagtcacatgttttaagaatatgtgtaatagtagtaattctggccctttggcattttgaaattgaaagatgagagatcggggaaggtgggcagctcccagcccttcctgaaatcctaactgtgatgtagggagctggttccccatgaagaaaagtggctgtgctgcccagggagccacataattggtatccaagagctcatctatgccaagtagatgtttcctgagataatctgctggtcctggaggaagttggggtgctacaatgaatgtggagggaagaacactgaacagggggtgcaggtacctggattcagactgggttcatcacttctcatggtctcaatttcctcacctgaaaaagactttcaataagggctgatttttcttgcagctctaacagattgtgggtgtggcgcctgcccttcacctctgacaacataccctaggaacaggaacggattcccttagctgctcctgaggctgtcacatggggtggcttagaataagacagggtctcagagatgcagttggtcaccaaagaaggctatgccagtccatatgcttttgttggcaagaacagaaaatccagtctgaataccacatatttattggttcatataactttaaaagtccactggggtggggtgatcaggcatgattcagtcaaggtccccactctattcctctactatcctctcaactatttgaacctttccattaatttgatccttagggtggatccttagggtgttgactgctgcagtttcaagcttacatctgcaccctgcagaatccagaggaagagacaatgcctgttccagtggctctcaagaaattcttttccagccaggcatggtggctcatgcctgtaatcccagcactttggtaggctaaggtgggtgaattgcttgagctcaggagttcgagatcagcctgtataacatggcgaaaccccatctctataaaaaatacaaaaatcagctgggtggagtggcgtacaccttcactctcagctacttgggaggccgaggcaggaggatcgcttgggcccagcaggttcaggctgcagtgagccataatcacaccacaggactccagcctgggtgacagggtgagaccctttctcaaaaaaaaaaaaaaaaaagaaaaaaaagaaagaaaatttattttctggaaatccccagcaaaccaaggaggcagtgagcctccttggtctgctttgggtcacacgcctgttactgaaccaatttctattggtcaggagaatggcacttgctgacgaatgaaggctgggttcctgaacccatggagacaaaggttataagaatttaggaccactgcatcctgtcttaatccaaagtaccggaaaaccttctgcatgcccaacctgggaactgttccccatcactaccatccagccaaacaatcggctacaatgctcttcctcttctagaatgttgctgacccaggccatgggcttagcttagcactgttagacacgttattcttagcctatcccctggagattctgcagaagcacagaggctacatgggggtgacttctggaccaaatattggggagcatgaattgggggaatgggtacagggcacacataatgtccattccactggttatctggttttgcttctccttttggcaggaataggtgctgagttgcttgaggcaaacctttgggaagactgctcacaccatacccagaaagctactggttgattcttttttttttttttttttttttgagatggagtctcgctctgttgcccaggctggagtgcagtggcacaatcttagctcactgcaacctctgcctcccgggttcaagtgattctcctgcctcagcctcctgagtaggtgggattataggtacaagccaccatgtctggctaatttttgtatttttttttttttttgagacagtgtctcactctgctgcccaggctggagtgcagtggtgtgatctcagctcactgcaagctccacctcccgggttcacaccattctcctgcctcagcctcctgagtagctgggactacaggcgcccgccaccacacctggctaattttttgtatttttagtagagacggggtttcaccatgttagccaggatggtctcaatctcctgacctcgtgatccgcctgcctcggcctcccaaagtgctgggattacaggtgtgagtcaccgcgcccggcctgtacttttagtagagatggggtttcatcatgttggctgggctggtctcgaactcctgacctcaagtgatctgcctgccttggcctcccaaagtgctgggattatagacagatgtgagccaccgtgcccggcctgctgttcgagtcttttaatttttttttttttggtagagattgagtctcactatgttgtccagggtggtctcaaactcttggcctcaagcgatcttcccacctccacaccctgaagtactgggattgcaggcctggttgattttgacaggtccactcacagagactgacttctcacagagtgccataggtcaagaaagatgtggtgtagtttgtgaaaaaagcagaagattggattcacacatctggatttgaagcctggctctgccacaaactcgctgtttaattaacccgcttaatttacttcacttctctgagtctctgttttcttacctctaaatggggaataatagtaccttatttcaaggttgtggtgaattttagtgataacatggtttaaggccgggtgtggtggctcacgcctgtaatcccagcactttgagaggccacggtgggcagatcacctgaggtcaggagttcaagatcagcctggccaatatggtgaaacacccaactctgctaaaactacaaaaattagccaggtgtagtggtgcacacctataatcccagctactggggaggctgaagcatgagaatcgtttgaacctgggagtcagaagttgcagtgagctgagatcgtgccactgcactccagcctgggtgacagagtgagactgtctccaaaaaaaaaaaaaaaaaaaaaatgttttggaagtgttggattttatttgttgttatcattatttagtggctcaggccaaatcaatcacctctttggggatctaggggtattcacaaagtttcacagtgatttttttcaggtggcgggagtaacaaagcaaggctagagatgtcattggaaagaaagcagtagtcactcaaaataaggaatggttggccggatgcagtggctcttgcctgtaatcccagcactttgggaggccaaggtgggtggatcacctgaggtcaggagtttgagactagcctggccaacatggtgaaacctcatctctactaaaaatacaaaaaacgtggctgggcatggtggcaggcacctgtaatcccagctacttgggaggctgaggcaggagaatcttttgaacctgcgaggcagagattgtagtgagcatcatgcattgcactccagcctgggcaacagagcaagactccctctgaaggaaaaaaaaaaaaggaatggttatgacacttttcaattgcagcagtgtgggagaaatatttctcctgttaacgttgcaactggctttctggtgtcggctatgacagtctgaggcatggtaggggcacagagctgacttactctctctacccagactgatttttttactctttcagtactggactggttctgatgctttcaccagtaacagaagctcaagctgtgctcaactgacccccaaggatccagcctgtctctgggattctctaggccgtcccggaactcctaccatgaccagggaagtgtagggttggggtttggccctagacctcttatctgtccacctgcaaagccgttttagtaacagatttggaagcaaagtaaggtttttgatggcagcttggtcaccagcacttcacttaggaaccagtgctggggaagcggatgggacaatttctgagtgtctcctgggacagacacataggccatcgctccgctaggggcatggagggtatgtgtgggtcaaattgctaaataatctccaaagctcattacaattaatgggccgacctattccccaatgcctgctttactggaattgttcggccccatccttcccccacagtagagtgagccaatttaaattttcaatgcagttcttcagcacttgtgtgatgataatcagcttacaggtcaaggaccttggcaattcaccaaggagattgttacatttgagcaattcaccattacaatccatgggcccagaggttccaggagcctgcttccagccacctccaccaggatgccaggcatgtgagtgaagctagcttggaccctgcagtccagcccatctgccagctaagtaccacagttaaagccacaagaagctgacctgcctagccaagctctgtcccaatttgtaaccaacaaattccatgatgtaaaatagtgattgttttaaaccaccaagttctgggaagtagcttgttacttagcaacagataactggaatagtgctcttggtaagaaatggcaggaggggagcaaactatacacagtgaatgaaggagggagggccaagccaagagaagccattgggtggcttttggtgccctctgcatgaatcatgaatagaaatatcttaactcttactggaactttcgtttatctggccaggaacaatgccagaattgggaggggacttagcgatcatgtggcccagtggtctcaaacatggcagtcacagggcatgtgaatgtaatagatggcattaatagccacaattcttcccacctccctgtatctacaccctttccaatctctttttcaactcctcccatcaattttggggaatggatttccccaccccttcattctgaacttagctctctaacttggtttggccaatgatgtcttagcaattgtgacagaagtattttggttcctctcttactcttacacctctctgcctttgccatgacaacatgcccaggctaggctggtggagatgacatggagcagagctgttgcccccactctgctggccaaagccatcctagatcagctgaacctcagtcaactgccaggcctatgagggagccaatcaagaccagaactgtccagctaaggccagtctaaagccaactcagacttgtgagcaaaataaatgcttattagtcattgagttttgggatggtttgttacagaacattacagtggcaatagttaactgaagataaaactcccttcagtgatggacaccaccacttccccactgagatggttcaagtctaactcctattaccatctgagggaacaagcacattgcagaattaagtagcagaggatttctagacttaacacgtaatttaattcaatccaaatatattgagcacccattagagacactacagcgaattaaaaaggaatatggccactgcctacctagaagtttatacagtctagcagaggagccaagaccacaggtaaatgtgagcactgctgaagcagaagtggagaatggaagcaggaggtcaggatttctagccaaatgtcagctgggagtcagaggtgtgtgtggcatagcattccaggcagaaggaatctggtaaactaaaatgacaataggatatgtctagggattcagtttaactgttgcatggttctcagacccaaactaagccctccttctcagaccaagtaaaatggcctcagatgtaattcagttttgaacttcataccttttaaaaactgaagttcgtccttcagttttgaatgtcacaccttttaaaagctgaggtatacttcctaatgattataaacaccaaattaaaaaggaatccatttagttagctatttaggcttaagcacagaaggttcttaaaagaaccctatattgctcattgatttctaaaagaaaatgaaacccaccaagacaagaaatgtgttgctgaccttcacttttatttaaatatagtgatcttttaagagaataaacaaaaaatactttacacagcaaatattttacataaatgtaaacatgcatgtctacttcataattaagcaaaaaaacttttaggcacaagattttaaaaataaagaatgagacaatgaaaccaagactggaataacagaagtaacaaaaactcacatttcctaactcttcaattggtcttgtcttccaacctattggttaaggcctgagtttcagaaatcctaccttccttgccaaatagaaacatccactttggctgtatataacattatccacataacacactaattctctttcaaaataatgtaataaatataccattcatacacacacacacacacacacacacacaccctgctgaaccagcctctcaaataggaaaataaggattttggaattttcaagttttcctacaaccaaagcacatacacacacattaacaccttacatagaaaaaatgattctgctacagaaataaaatcgttagtgagtggcatgattacaaacctctagttcatttgtattaagtttcttcaatcacaactttactaaggcttactaagcgcctctgacacttcagatttaattaagtttttcatctcatctaaatgacccacagtacagtagacattgtacagcacaaaaaaaaggcaattttaataattcagttaaagacttctaaatcatgaaagtcagcatggatactttcagctgtctccaaatgcctggaatgttttcctatgtctatcctctgcacttcactggctgggtagtcttctctgccttctaccccaccaggctacaaccatttgaatgtccattcctgtggataccccagggaggagatgagaatgacagtccctgctttttttttccctttttctttttgtagaaacagggtctcgccatgttgcccaggctggtctcaaactcctggactcaagcaatcctcccacctcagcctcccaaagtgctgggattacaggcatgagtcaccacagccagcccagtacctgcttttaaggagctcataccgaccagagttcaagcaaaaaaaaaaaaaaaaaaaaaaggtcagtatgtacacacagggcactccatgtgggttgaaaaaaaagacaagagtccacaaagatggtacccacagaacctcaaaagtggggtatggagggagagaaggagaatgagagaaggcacagaggcaggaagaacaagtccggtttggctggcaggagggcatctgtgagaagccatctgtgaagccaaattcttgatttctaaaaagaaaagattgcttactctggtgggtaaagctggagggcagagggcagaaccaccaaaggctttgtgcagagaacaaaattgaagccgtgctagagaaaaaccatacagtgttgggcaggacagatgacaggacaaacggtctgaagctcaggaagcttgactcaccaagccagtgccacgtgcaagcatttcctatagaaacacgtcttgacccaacatgccaaaaaccatagttctgtctacagaaatcaaggctttcagaaaaaagttggggaggagagaaagagagagaggcttaaatagatatttttagttcaagttcctggaacctgccccagtttgagcaagttaagagcagtgaaacaattcctacatccagtaacaattcaagtctcctgatcatgaccttgtgaaaccttccctgagctgtcattaccaaggaattataaagcaattatcaatccactataaataagttcctacctgccattaaatccaccaaaatctcatgatgggctgagagcccagcacggggtcctagcgtagacctattacctacactagggtaggtggtgtgagcatgctgctgggcagtggctctctgggctcactatgatgatgaaacagttgactctatgaagtttaactctaatgaaagcccctatgacagaccacctatttcctttctaagtccagactgcttcccctccactagctggggagggagaggccatatgagtggagggacctgtggaggaaaaattattattactaccttgatgtccgctgaaccaaagtggatggaaatttctcaggacatattcatccaaactacaaaaacaggttactccatactgattacaggatgatttatcacacattcattaaatatagaacattgactagcaaccagtttcctccaacaacagatccatttggaaatggcacactgtagaaggcaatcttgtgacttccttctagttgtatataaaaaatacaaatcggtcagggagtcaggtacaaaacagtggtacaaaagcatgaatagatacgccttatcaaagaatgtgctcatttcatattgcagaacttctatctagattctgatttttagaaacttactgctggttcatttgttcggagaggt

SEQ ID NO: 682 - DNA, 2992 bp, Homo sapiens
cacacgcacacacacacacacaaacacacgcgcacgcaaacagcagtgaggaagagaaaagcagagataagcaaggctccgcagcagcctcctttctaacttgaccctcgccagaccctggccagcatggttgtcctgaatccaatgactttgggaatttatcttcagcttttcttcctctctatcgtgtctcagccgactttcatcaacagcgttcttccaatctcagcagcccttcccagcctggatcagaagaagcgtggtggccacaaagcatgctgcctgctgacgcctcctccaccaccactgttcccaccaccattcttcagaggtggccgaagtccgacatgaagaatctcatgctggaactggagacctcgcagtccccgtgcatgcaaggctcgctaggctcccctgggcctcccggcccccagggtccaccggggcttcctggcaagacaggaccaaagggagaaaagggggagcttggccgaccaggaaggaagggtagacctggccccccaggtgttcctggcatgcctgggcccatcggttggccaggccctgaaggacccaggggtgaaaaaggtgacctgggtatgatgggcttgccagggtcaagaggaccaatgggctccaagggctaccctggatccagaggggaaaagggatccagaggtgaaaagggtgacctgggtcccaaaggagaaaagggtttcccaggatttcctggaatgttggggcagaaaggtgaaatgggtccaaaaggtgaacctgggatagcaggacaccgaggacccacaggaagaccaggaaaacgaggcaagcagggacagaaaggggatagtggagttatgggcccaccaggcaagcctgggccttctggtcaacctggccgtccggggcccccaggccccccacctgcaggacaacttataatgggacccaaaggggaaagaggatttcccgggcctccaggaagatgtctttgtggacccactatgaatgtgaataacccttcctacggggaatctgtgtatgggcccagttccccgcgagttcctgtgatttttgtggtcaacaaccaggaggagcttgagaggctgaacacccaaaacgccattgccttccgcagagaccagagatctctgtacttcaaggacagccttggctggctccccatccagctgacccctttctaccctgtggattacactgcagaccagcacggcacctgtggggatgggctcctgcagcctggggaggagtgtgacgacggtaacagcgatgtgggtgacgactgcatccgctgtcaccgtgcctactgtggagatggtcaccggcatgagggtgtggaggactgtgacggctctgactttggctacctgacatgcgagacctatctccctgggtcatatggagacctgcaatgcacccagtactgctacatcgactccacgccctgccgctacttcacctgagggccgtgaggagaaggtgggctgcgccccacagaactggcagcagcttctccactgtcatcaaactggccatgtcctggccccgtctccaccaacctttgtgtgacaaaaacaaggacaaattcctgctactaagacatgctgttaactcagtctgactggaagaatttaggaccactgcatcctgtcttaatccaaggtactggaaaaccttccacatgcccaacctgagacctgttccccatcgctaccatttggccaaacaaccggctacaatgctcttcctcttctggaatgttgctgacccaggccgtggacttggctgagcactgttagacacacacagacctgcaggctgttttagaatgttttgatctctttggggaatctggagtacaggcctctccgcccctgaccaccgaaacgtgcaggcattctcactcacactgggcagcccgctgtcgggtctctctaggcctatgaaccacaaagcagggaagtgggcacgttctctcggggtggctcacagctttgaacctgccaaaggacccctcgactggccacagcccagcccagcctgacgtggatgtggctgcccaggaaaagacttaactgtgaaaaagtactgagaacccacctgacccaggcttgccccaagcagaggctagagaagaggctcctcttctcagtgtttcccaaaggggcggctcttgtggtttcaaaatctctggcaccatcttgacctcttggctctctctgcactttgccccctgtctcaaaaatgtccctcatgtccatttcctgtccaggagactcatgaggactgtgtgacctgcacaagcccacacctgggcaggctgttggtgtctccttggtccttaggcagatactcccctgagtccccgatctagggccagctgcagagggctctctctaggcagagcgttcctggccagagctctacctctttgcctcctgctgacccctgacagcgtcccgtggcatttctttcatgtctgcatattgcatagccttgtcctcctgtgtgcctgagctcctcccttttcaataagattattagtcgtgcatgtctgtgagctgcctttcatcaccatttttcctgagtagggcttagttttattctggaaagacatctccaaggtgaggtccacccccacagcagacctcaagtagaaattgcccaatttttaccagctggagggacacccttgggtttttgtacgaagctatttaatgagcctgtgtcttggggactcagcaggctggagcttggggcctggtggaccatcacctggtgtctgtaggtggacccggtctcccacaggtgacatcaacctgagggtggcgtctttagagacaggcacatgggcagccctgttcccttcgcctctactgcgaggcctggggagatgttgttttcatgctgcttccaccatcacactggggtttctggatgggaaataaaaaaataaaggcagttcatttcccca

SEQ ID NO: 683 - protein, 401 aa, Homo sapiens
MLPADASSTTTVPTTILQRWPKSDMKNLMLELETSQSPCMQGSLGSPGPPGPQGPPGLPGKTGPKGEKGELGRPGRKGRPGPPGVPGMPGPIGWPGPEGPRGEKGDLGMMGLPGSRGPMGSKGYPGSRGEKGSRGEKGDLGPKGEKGFPGFPGMLGQKGEMGPKGEPGIAGHRGPTGRPGKRGKQGQKGDSGVMGPPGKPGPSGQPGRPGPPGPPPAGQLIMGPKGERGFPGPPGRCLCGPTMNVNNPSYGESVYGPSSPRVPVIFVVNNQEELERLNTQNAIAFRRDQRSLYFKDSLGWLPIQLTPFYPVDYTADQHGTCGDGLLQPGEECDDGNSDVGDDCIRCHRAYCGDGHRHEGVEDCDGSDFGYLTCETYLPGSYGDLQCTQYCYIDSTPCRYFT

SEQ ID NO: 684 - DNA, 2780 bp, Homo sapiens
atggttgtcctgaatccaatgactttgggaatttatcttcagcttttcttcctctctatcgtgtctcagccgactttcatcaacagcgttcttccaatctcagcaggtggccgaagtccgcttctctccccagacatgaagaatctcatgctggaactggagacctcgcagtccccgtgcatgcaaggctcgctaggctcccctgggcctcccggcccccagggtccaccggggcttcctggcaagacaggaccaaagggagaaaagggggagcttggccgaccaggaaggaaggtatgacctggccccccaggtgttcctggcatgcctgggcccatcggttggccaggccctgaaggacccaggggtgaaaaaggtgacctgggtatgatgggcttgccagggtcaagaggaccaatgggctccaagggctaccctggatccagaggggaaaagggatccagaggtgaaaagggtgacctgggtcccaaaggagaaaagggtttcccaggatttcctggaatgttggggcagaaaggtgaaatgggtccaaaaggtgaacctgggatagcaggacaccgaggacccacaggaagaccaggaaaacgaggcaagcagggacagaaaggggatagtggagttatgggcccaccaggcaagcctgggccttctggtcaacctggccgtccggggcccccaggccccccacctgcaggacaacttataatgggacccaaaggggaaagaggatttcccgggcctccaggaagatgtctttgtggacccactatgaatgtgaataacccttcctacggggaatctgtgtatgggcccagttccccgcgagttcctgtgatttttgtggtcaacaaccaggaggagcttgagaggctgaacacccaaaacgccattgccttccgcagagaccagagatctctgtacttcaaggacagccttggctggctccccatccagctgacccctttctaccctgtggattacactgcagaccagcacggcacctgtggggatgggctcctgcagcctggggaggagtgtgacgacggtaacagcgatgtgggtgacgactgcatccgctgtcaccgtgcctactgtggagatggtcaccggcatgagggtgtggaggactgtgacggctctgactttggctacctgacatgcgagacctatctccctgggtcatatggagacctgcaatgcacccagtactgctacatcgactccacgccctgccgctacttcacctgagggccgtgaggagaaggtgggctgcgccccacagaactggcagcagcttctccactgtcatcaaactggccatgtcctggccccgtctccaccaacctttgtgtgacaaaaacaaggacaaattcctgctactaagacatgctgttaactcagtctgactggaagaatttaggaccactgcatcctgtcttaatccaaggtactggaaaaccttccacatgcccaacctgagacctgttccccatcgctaccatttggccaaacaaccggctacaatgctcttcctcttctggaatgttgctgacccaggccgtggacttggctgagcactgttagacacacacagacctgcaggctgttttagaatgttttgatctctttggggaatctggagtacaggcctctccgcccctgaccaccgaaacgtgcaggcattctcactcacactgggcagcccgctgtcgggtctctctaggcctatgaaccacaaagcagggaagtgggcacgttctctcggggtggctcacagctttgaacctgccaaaggacccctcgactggccacagcccagcccagcctgacgtggatgtggctgcccaggaaaagacttaactgtgaaaaagtactgagaacccacctgacccaggcttgccccaagcagaggctagagaagaggctcctcttctcagtgtttcccaaaggggcggctcttgtggtttcaaaatctctggcaccatcttgacctcttggctctctctgcactttgccccctgtctcaaaaatgtccctcatgtccatttcctgtccaggagactcatgaggactgtgtgacctgcacaagcccacacctgggcaggctgttggtgtctccttggtccttaggcagatactcccctgagtccccgatctagggccagctgcagagggctctctctaggcagagcgttcctggccagagctctacctctttgcctcctgctgacccctgacagcgtcccgtggcatttctttcatgtctgcatattgcatagccttgtcctcctgtgtgcctgagctcctcccttttcaataagattattagtcgtgcatgtctgtgagctgcctttcatcaccatttttcctgagtagggcttagttttattctggaaagacatctccaaggtgaggtccacccccacagcagacctcaagtagaaattgcccaatttttaccagctggagggacacccttgggtttttgtacgaagctatttaatgagcctgtgtcttggggactcagcaggctggagcttggggcctggtggaccatcacctggtgtctgtaggtggacccggtctcccacaggtgacatcaacctgagggtggcgtctttagagacaggcacatgggcagccctgttcccttcgcctctactgcgaggcctggggagatgttgttttcatgctgcttccaccatcacactggggtttctggatgggaaataaaaaaataaaggcagttcatttcccca

SEQ ID NO: 685 - protein, 314 aa, Homo sapiens [sequence omitted]

SEQ ID NO: 686 - DNA, 2521 bp, Homo sapiens
cacacgcacacacacacacacaaacacacgcgcacgcaaacagcagtgaggaagagaaaagcagagataagcaaggctccgcagcagcctcctttctaacttgaccctcgccagaccctggccagcatggttgtcctgaatccaatgactttgggaatttatcttcagcttttcttcctctctatcgtgtctcagccgactttcatcaacagcgttcttccaatctcagcagcccttcccagcctggatcagaagaagcgtggtggccacaaagcatgctgcctgctgacgcctcctccaccaccactgttcccaccaccattcttcagaggtggccgaagtccgcttctctccccagacatgaagaatctcatgctggaactggagacctcgcagtccccgtgcatgcaaggctcgctaggctcccctgggcctcccggcccccagggtccaccggggcttcctggcaagacaggaccaaagggagaaaagggggagcttggccgaccaggaaggaagggtagacctggccccccaggtgttcctggcatgcctgggcccatcggttggccaggccctgaaggacccaggggtgaaaaaggtgacctgggtatgatgggcttgccagggtcaagaggaccaatgggctccaagggctaccctggatccagaggggaaaagggatccagaggtgaaaagggtgacctgggtcccaaaggagaaaagggtttcccaggatttcctggaatgttggggcagaaaggtgaaatgggtccaaaaggtgaacctgggatagcaggacaccgaggacccacaggaagaccaggaaaacgaggcaagcagggacagaaaggggatagtggagttatgggcccaccaggcaagcctgggccttctggtcaacctggccgtccggggcccccaggccccccacctgcaggtcatatggagacctgcaatgcacccagtactgctacatcgactccacgccctgccgctacttcacctgagggccgtgaggagaaggtgggctgcgccccacagaactggcagcagcttctccactgtcatcaaactggccatgtcctggccccgtctccaccaacctttgtgtgacaaaaacaaggacaaattcctgctactaagacatgctgttaactcagtctgactggaagaatttaggaccactgcatcctgtcttaatccaaggtactggaaaaccttccacatgcccaacctgagacctgttccccatcgctaccatttggccaaacaaccggctacaatgctcttcctcttctggaatgttgctgacccaggccgtggacttggctgagcactgttagacacacacagacctgcaggctgttttagaatgttttgatctctttggggaatctggagtacaggcctctccgcccctgaccaccgaaacgtgcaggcattctcactcacactgggcagcccgctgtcgggtctctctaggcctatgaaccacaaagcagggaagtgggcacgttctctcggggtggctcacagctttgaacctgccaaaggacccctcgactggccacagcccagcccagcctgacgtggatgtggctgcccaggaaaagacttaactgtgaaaaagtactgagaacccacctgacccaggcttgccccaagcagaggctagagaagaggctcctcttctcagtgtttcccaaaggggcggctcttgtggtttcaaaatctctggcaccatcttgacctcttggctctctctgcactttgccccctgtctcaaaaatgtccctcatgtccatttcctgtccaggagactcatgaggactgtgtgacctgcacaagcccacacctgggcaggctgttggtgtctccttggtccttaggcagatactcccctgagtccccgatctagggccagctgcagagggctctctctaggcagagcgttcctggccagagctctacctctttgcctcctgctgacccctgacagcgtcccgtggcatttctttcatgtctgcatattgcatagccttgtcctcctgtgtgcctgagctcctcccttttcaataagattattagtcgtgcatgtctgtgagctgcctttcatcaccatttttcctgagtagggcttagttttattctggaaagacatctccaaggtgaggtccacccccacagcagacctcaagtagaaattgcccaatttttaccagctggagggacacccttgggtttttgtacgaagctatttaatgagcctgtgtcttggggactcagcaggctggagcttggggcctggtggaccatcacctggtgtctgtaggtggacccggtctcccacaggtgacatcaacctgagggtggcgtctttagagacaggcacatgggcagccctgttcccttcgcctctactgcgaggcctggggagatgttgttttcatgctgcttccaccatcacactggggtttctggatgggaaataaaaaaataaaggcagttcatttcccca

SEQ ID NO: 687 - protein, 327 aa, Homo sapiens
MVVLNPMTLGIYLQLFFLSIVSQPTFINSVLPISAALPSLDQKKRGGHKACCLLTPPPPPLFPPPFFRGGRSPLLSPDMKNLMLELETSQSPCMQGSLGSPGPPGPQGPPGLPGKTGPKGEKGELGRPGRKGRPGPPGVPGMPGPIGWPGPEGPRGEKGDLGMMGLPGSRGPMGSKGYPGSRGEKGSRGEKGDLGPKGEKGFPGFPGMLGQKGEMGPKGEPGIAGHRGPTGRPGKRGKQGQKGDSGVMGPPGKPGPSGQPGRPGPPGPPPAGHMCNAPSTATSTPRPAATSPEGREEKVGCAPQNWQQLLHCHQTGHVLAPSPPTFV

SEQ ID NO: 688 - DNA, 2521 bp, Homo sapiens
cacacgcacacacacacacacaaacacacgcgcacgcaaacagcagtgaggaagagaaaagcagagataagcaaggctccgcagcagcctcctttctaacttgaccctcgccagaccctggccagcatggttgtcctgaatccaatgactttgggaatttatcttcagcttttcttcctctctatcgtgtctcagccgactttcatcaacagcgttcttccaatctcagcagcccttcccagcctggatcagaagaagcgtggtggccacaaagcatgctgcctgctgacgcctcctccaccaccactgttcccaccaccattcttcagaggtggccgaagtccgcttctctccccagacatgaagaatctcatgctggaactggagacctcgcagtccccgtgcatgcaaggctcgctaggctcccctgggcctcccggcccccagggtccaccggggcttcctggcaagacaggaccaaagggagaaaagggggagcttggccgaccaggaaggaaggtatgacctggccccccaggtgttcctggcatgcctgggcccatcggttggccaggccctgaaggacccaggggtgaaaaaggtgacctgggtatgatgggcttgccagggtcaagaggaccaatgggctccaagggctaccctggatccagaggggaaaagggatccagaggtgaaaagggtgacctgggtcccaaaggagaaaagggtttcccaggatttcctggaatgttggggcagaaaggtgaaatgggtccaaaaggtgaacctgggatagcaggacaccgaggacccacaggaagaccaggaaaacgaggcaagcagggacagaaaggggatagtggagttatgggcccaccaggcaagcctgggccttctggtcaacctggccgtccggggcccccaggccccccacctgcaggtcatatggagacctgcaatgcacccagtactgctacatcgactccacgccctgccgctacttcacctgagggccgtgaggagaaggtgggctgcgccccacagaactggcagcagcttctccactgtcatcaaactggccatgtcctggccccgtctccaccaacctttgtgtgacaaaaacaaggacaaattcctgctactaagacatgctgttaactcagtctgactggaagaatttaggaccactgcatcctgtcttaatccaaggtactggaaaaccttccacatgcccaacctgagacctgttccccatcgctaccatttggccaaacaaccggctacaatgctcttcctcttctggaatgttgctgacccaggccgtggacttggctgagcactgttagacacacacagacctgcaggctgttttagaatgttttgatctctttggggaatctggagtacaggcctctccgcccctgaccaccgaaacgtgcaggcattctcactcacactgggcagcccgctgtcgggtctctctaggcctatgaaccacaaagcagggaagtgggcacgttctctcggggtggctcacagctttgaacctgccaaaggacccctcgactggccacagcccagcccagcctgacgtggatgtggctgcccaggaaaagacttaactgtgaaaaagtactgagaacccacctgacccaggcttgccccaagcagaggctagagaagaggctcctcttctcagtgtttcccaaaggggcggctcttgtggtttcaaaatctctggcaccatcttgacctcttggctctctctgcactttgccccctgtctcaaaaatgtccctcatgtccatttcctgtccaggagactcatgaggactgtgtgacctgcacaagcccacacctgggcaggctgttggtgtctccttggtccttaggcagatactcccctgagtccccgatctagggccagctgcagagggctctctctaggcagagcgttcctggccagagctctacctctttgcctcctgctgacccctgacagcgtcccgtggcatttctttcatgtctgcatattgcatagccttgtcctcctgtgtgcctgagctcctcccttttcaataagattattagtcgtgcatgtctgtgagctgcctttcatcaccatttttcctgagtagggcttagttttattctggaaagacatctccaaggtgaggtccacccccacagcagacctcaagtagaaattgcccaatttttaccagctggagggacacccttgggtttttgtacgaagctatttaatgagcctgtgtcttggggactcagcaggctggagcttggggcctggtggaccatcacctggtgtctgtaggtggacccggtctcccacaggtgacatcaacctgagggtggcgtctttagagacaggcacatgggcagccctgttcccttcgcctctactgcgaggcctggggagatgttgttttcatgctgcttccaccatcacactggggtttctggatgggaaataaaaaaataaaggcagttcatttcccca

SEQ ID NO: 689 - protein, 186 aa, Homo sapiens
MPGPIGWPGPEGPRGEKGDLGMMGLPGSRGPMGSKGYPGSRGEKGSRGEKGDLGPKGEKGFPGFPGMLGQKGEMGPKGEPGIAGHRGPTGRPGKRGKQGQKGDSGVMGPPGKPGPSGQPGRPGPPGPPPAGHMCNAPSTATSTPRPAATSPEGREEKVGCAPQNWQQLLHCHQTGHVLAPSPPTFV

SEQ ID NO: 690 - DNA, 2857 bp, Homo sapiens
gcctcacaatgacgggctcatcattcagcctcgctcatctgctcatcatttcaggactgctctgttactcggcaggctgcttggcccttcccagcctggatcagaagaagcgtggtggccacaaagcatgctgcctgctgacgcctcctccaccaccactgttcccaccaccattcttcagaggtggccgaagtccgcttctctccccagacatgaagaatctcatgctggaactggagacctcgcagtccccgtgcatgcaaggctcgctaggctcccctgggcctcccggcccccagggtccaccggggcttcctggcaagacaggaccaaagggagaaaagggggagcttggccgaccaggaaggaagggtagacctggccccccaggtgttcctggcatgcctgggcccatcggttggccaggccctgaaggacccaggggtgaaaaaggtgacctgggtatgatgggcttgccagggtcaagaggaccaatgggctccaagggctaccctggatccagaggggaaaagggatccagaggtgaaaagggtgacctgggtcccaaaggagaaaagggtttcccaggatttcctggaatgttggggcagaaaggtgaaatgggtccaaaaggtgaacctgggatagcaggacaccgaggacccacaggaagaccaggaaaacgaggcaagcagggacagaaaggggatagtggagttatgggcccaccaggcaagcctgggccttctggtcaacctggccgtccggggcccccaggccccccacctgcaggacaacttataatgggacccaaaggggaaagaggatttcccgggcctccaggaagatgtctttgtggacccactatgaatgtgaataacccttcctacggggaatctgtgtatgggcccagttccccgcgagttcctgtgatttttgtggtcaacaaccaggaggagcttgagaggctgaacacccaaaacgccattgccttccgcagagaccagagatctctgtacttcaaggacagccttggctggctccccatccagctgacccctttctaccctgtggattacactgcagaccagcacggcacctgtggggatgggctcctgcagcctggggaggagtgtgacgacggtaacagcgatgtgggtgacgactgcatccgctgtcaccgtgcctactgtggagatggtcaccggcatgagggtgtggaggactgtgacggctctgactttggctacctgacatgcgagacctatctccctgggtcatatggagacctgcaatgcacccagtactgctacatcgactccacgccctgccgctacttcacctgagggccgtgaggagaaggtgggctgcgccccacagaactggcagcagcttctccactgtcatcaaactggccatgtcctggccccgtctccaccaacctttgtgtgacaaaaacaaggacaaattcctgctactaagacatgctgttaactcagtctgactggaagaatttaggaccactgcatcctgtcttaatccaaggtactggaaaaccttccacatgcccaacctgagacctgttccccatcgctaccatttggccaaacaaccggctacaatgctcttcctcttctggaatgttgctgacccaggccgtggacttggctgagcactgttagacacacacagacctgcaggctgttttagaatgttttgatctctttggggaatctggagtacaggcctctccgcccctgaccaccgaaacgtgcaggcattctcactcacactgggcagcccgctgtcgggtctctctaggcctatgaaccacaaagcagggaagtgggcacgttctctcggggtggctcacagctttgaacctgccaaaggacccctcgactggccacagcccagcccagcctgacgtggatgtggctgcccaggaaaagacttaactgtgaaaaagtactgagaacccacctgacccaggcttgccccaagcagaggctagagaagaggctcctcttctcagtgtttcccaaaggggcggctcttgtggtttcaaaatctctggcaccatcttgacctcttggctctctctgcactttgccccctgtctcaaaaatgtccctcatgtccatttcctgtccaggagactcatgaggactgtgtgacctgcacaagcccacacctgggcaggctgttggtgtctccttggtccttaggcagatactcccctgagtccccgatctagggccagctgcagagggctctctctaggcagagcgttcctggccagagctctacctctttgcctcctgctgacccctgacagcgtcccgtggcatttctttcatgtctgcatattgcatagccttgtcctcctgtgtgcctgagctcctcccttttcaataagattattagtcgtgcatgtctgtgagctgcctttcatcaccatttttcctgagtagggcttagttttattctggaaagacatctccaaggtgaggtccacccccacagcagacctcaagtagaaattgcccaatttttaccagctggagggacacccttgggtttttgtacgaagctatttaatgagcctgtgtcttggggactcagcaggctggagcttggggcctggtggaccatcacctggtgtctgtaggtggacccggtctcccacaggtgacatcaacctgagggtggcgtctttagagacaggcacatgggcagccctgttcccttcgcctctactgcgaggcctggggagatgttgttttcatgctgcttccaccatcacactggggtttctggatgggaaataaaaaaataaaggcagttcatttcccca

SEQ ID NO: 691 - protein, 443 aa, Homo sapiens
MTGSSFSLAHLLIISGLLCAGCLALPSLDQKKRGGHKACCLLTPPPPPLFPPPFFRGGRSPLLSPDMKNLMLELETSQSPCMQGSLGSPGPPGPQGPPGLPGKTGPKGEKGELGRPGRKGRPGPPGVPGMPGPIGWPGPEGPRGEKGDLGMMGLPGSRGPMGSKGYPGSRGEKGSRGEKGDLGPKGEKGFPGFPGMLGQKGEMGPKGEPGIAGHRGPTGRPGKRGKQGQKGDSGVMGPPGKPGPSGQPGRPGPPGPPPAGQLIMGPKGERGFPGPPGRCLCGPTMNVNNPSYGESVYGPSSPRVPVIFVVNNQEELERLNTQNAIAFRRDQRSLYFKDSLGWLPIQLTPFYPVDYTADQHGTCGDGLLQPGEECDDGNSDVGDDCIRCHRAYCGDGHRHEGVEDCDGSDFGYLTCETYLPGSYGDLQCTQYCYIDSTPCRYFT

SEQ ID NO: 692 - DNA, 2903 bp, Homo sapiens
cacacgcacacacacacacacaaacacacgcgcacgcaaacagcagtgaggaagagaaaagcagagataagcaaggctccgcagcagcctcctttctaacttgaccctcgccagaccctggccagcatggttgtcctgaatccaatgactttgggaatttatcttcagcttttcttcctctctatcgtgtctcagccgactttcatcaacagcgttcttccaatctcagcagcccttcccagcctggatcagaagaagcgtggtggccacaaagcatgctgcctgctgacgcctcctccaccaccactgttcccaccaccattcttcagaggtggccgaagtccgggtccaccggggcttcctggcaagacaggaccaaagggagaaaagggggagcttggccgaccaggaaggaaggtatgacctggccccccaggtgttcctggcatgcctgggcccatcggttggccaggccctgaaggacccaggggtgaaaaaggtgacctgggtatgatgggcttgccagggtcaagaggaccaatgggctccaagggctaccctggatccagaggggaaaagggatccagaggtgaaaagggtgacctgggtcccaaaggagaaaagggtttcccaggatttcctggaatgttggggcagaaaggtgaaatgggtccaaaaggtgaacctgggatagcaggacaccgaggacccacaggaagaccaggaaaacgaggcaagcagggacagaaaggggatagtggagttatgggcccaccaggcaagcctgggccttctggtcaacctggccgtccggggcccccaggccccccacctgcaggacaacttataatgggacccaaaggggaaagaggatttcccgggcctccaggaagatgtctttgtggacccactatgaatgtgaataacccttcctacggggaatctgtgtatgggcccagttccccgcgagttcctgtgatttttgtggtcaacaaccaggaggagcttgagaggctgaacacccaaaacgccattgccttccgcagagaccagagatctctgtacttcaaggacagccttggctggctccccatccagctgacccctttctaccctgtggattacactgcagaccagcacggcacctgtggggatgggctcctgcagcctggggaggagtgtgacgacggtaacagcgatgtgggtgacgactgcatccgctgtcaccgtgcctactgtggagatggtcaccggcatgagggtgtggaggactgtgacggctctgactttggctacctgacatgcgagacctatctccctgggtcatatggagacctgcaatgcacccagtactgctacatcgactccacgccctgccgctacttcacctgagggccgtgaggagaaggtgggctgcgccccacagaactggcagcagcttctccactgtcatcaaactggccatgtcctggccccgtctccaccaacctttgtgtgacaaaaacaaggacaaattcctgctactaagacatgctgttaactcagtctgactggaagaatttaggaccactgcatcctgtcttaatccaaggtactggaaaaccttccacatgcccaacctgagacctgttccccatcgctaccatttggccaaacaaccggctacaatgctcttcctcttctggaatgttgctgacccaggccgtggacttggctgagcactgttagacacacacagacctgcaggctgttttagaatgttttgatctctttggggaatctggagtacaggcctctccgcccctgaccaccgaaacgtgcaggcattctcactcacactgggcagcccgctgtcgggtctctctaggcctatgaaccacaaagcagggaagtgggcacgttctctcggggtggctcacagctttgaacctgccaaaggacccctcgactggccacagcccagcccagcctgacgtggatgtggctgcccaggaaaagacttaactgtgaaaaagtactgagaacccacctgacccaggcttgccccaagcagaggctagagaagaggctcctcttctcagtgtttcccaaaggggcggctcttgtggtttcaaaatctctggcaccatcttgacctcttggctctctctgcactttgccccctgtctcaaaaatgtccctcatgtccatttcctgtccaggagactcatgaggactgtgtgacctgcacaagcccacacctgggcaggctgttggtgtctccttggtccttaggcagatactcccctgagtccccgatctagggccagctgcagagggctctctctaggcagagcgttcctggccagagctctacctctttgcctcctgctgacccctgacagcgtcccgtggcatttctttcatgtctgcatattgcatagccttgtcctcctgtgtgcctgagctcctcccttttcaataagattattagtcgtgcatgtctgtgagctgcctttcatcaccatttttcctgagtagggcttagttttattctggaaagacatctccaaggtgaggtccacccccacagcagacctcaagtagaaattgcccaatttttaccagctggagggacacccttgggtttttgtacgaagctatttaatgagcctgtgtcttggggactcagcaggctggagcttggggcctggtggaccatcacctggtgtctgtaggtggacccggtctcccacaggtgacatcaacctgagggtggcgtctttagagacaggcacatgggcagccctgttcccttcgcctctactgcgaggcctggggagatgttgttttcatgctgcttccaccatcacactggggtttctggatgggaaataaaaaaataaaggcagttcatttcccca

SEQ ID NO: 693 - protein, 314 aa, Homo sapiens [sequence omitted]

SEQ ID NO: 694 - DNA, 3005 bp, Homo sapiens
cacacgcacacacacacacacaaacacacgcgcacgcaaacagcagtgaggaagagaaaagcagagataagcaaggctccgcagcagcctcctttctaacttgaccctcgccagaccctggccagcatggttgtcctgaatccaatgactttgggaatttatcttcagcttttcttcctctctatcgtgtctcagccgactttcatcaacagcgttcttccaatctcagcagcccttcccagcctggatcagaagaagcgtggtggccacaaagcatgctgcctgctgacgcctcctccaccaccactgttcccaccaccattcttcagaggtggccgaagtccgcttctctccccagacatgaagaatctcatgctggaactggagacctcgcagtccccgtgcatgcaaggctcgctaggctcccctgggcctcccggcccccagggtccaccggggcttcctggcaagacaggaccaaagggagaaaagggggagcttggccgaccaggaaggaaggtatgacctggccccccaggtgttcctggcatgcctgggcccatcggttggccaggccctgaaggacccaggggtgaaaaaggtgacctgggtatgatgggcttgccagggtcaagaggaccaatgggctccaagggctaccctggatccagaggggaaaagggatccagaggtgaaaagggtgacctgggtcccaaaggagaaaagggtttcccaggatttcctggaatgttggggcagaaaggtgaaatgggtccaaaaggtgaacctgggatagcaggacaccgaggacccacaggaagaccaggaaaacgaggcaagcagggacagaaaggggatagtggagttatgggcccaccaggcaagcctgggccttctggtcaacctggccgtccggggcccccaggccccccacctgcaggacaacttataatgggacccaaaggggaaagaggatttcccgggcctccaggaagatgtctttgtggacccactatgaatgtgaataacccttcctacggggaatctgtgtatgggcccagttccccgcgagttcctgtgatttttgtggtcaacaaccaggaggagcttgagaggctgaacacccaaaacgccattgccttccgcagagaccagagatctctgtacttcaaggacagccttggctggctccccatccagctgacccctttctaccctgtggattacactgcagaccagcacggcacctgtggggatgggctcctgcagcctggggaggagtgtgacgacggtaacagcgatgtgggtgacgactgcatccgctgtcaccgtgcctactgtggagatggtcaccggcatgagggtgtggaggactgtgacggctctgactttggctacctgacatgcgagacctatctccctgggtcatatggagacctgcaatgcacccagtactgctacatcgactccacgccctgccgctacttcacctgagggccgtgaggagaaggtgggctgcgccccacagaactggcagcagcttctccactgtcatcaaactggccatgtcctggccccgtctccaccaacctttgtgtgacaaaaacaaggacaaattcctgctactaagacatgctgttaactcagtctgactggaagaatttaggaccactgcatcctgtcttaatccaaggtactggaaaaccttccacatgcccaacctgagacctgttccccatcgctaccatttggccaaacaaccggctacaatgctcttcctcttctggaatgttgctgacccaggccgtggacttggctgagcactgttagacacacacagacctgcaggctgttttagaatgttttgatctctttggggaatctggagtacaggcctctccgcccctgaccaccgaaacgtgcaggcattctcactcacactgggcagcccgctgtcgggtctctctaggcctatgaaccacaaagcagggaagtgggcacgttctctcggggtggctcacagctttgaacctgccaaaggacccctcgactggccacagcccagcccagcctgacgtggatgtggctgcccaggaaaagacttaactgtgaaaaagtactgagaacccacctgacccaggcttgccccaagcagaggctagagaagaggctcctcttctcagtgtttcccaaaggggcggctcttgtggtttcaaaatctctggcaccatcttgacctcttggctctctctgcactttgccccctgtctcaaaaatgtccctcatgtccatttcctgtccaggagactcatgaggactgtgtgacctgcacaagcccacacctgggcaggctgttggtgtctccttggtccttaggcagatactcccctgagtccccgatctagggccagctgcagagggctctctctaggcagagcgttcctggccagagctctacctctttgcctcctgctgacccctgacagcgtcccgtggcatttctttcatgtctgcatattgcatagccttgtcctcctgtgtgcctgagctcctcccttttcaataagattattagtcgtgcatgtctgtgagctgcctttcatcaccatttttcctgagtagggcttagttttattctggaaagacatctccaaggtgaggtccacccccacagcagacctcaagtagaaattgcccaatttttaccagctggagggacacccttgggtttttgtacgaagctatttaatgagcctgtgtcttggggactcagcaggctggagcttggggcctggtggaccatcacctggtgtctgtaggtggacccggtctcccacaggtgacatcaacctgagggtggcgtctttagagacaggcacatgggcagccctgttcccttcgcctctactgcgaggcctggggagatgttgttttcatgctgcttccaccatcacactggggtttctggatgggaaataaaaaaataaaggcagttcatttcccca

SEQ ID NO: 695 - protein, 314 aa, Homo sapiens [sequence omitted]

SEQ ID NO: 696 - DNA, 3021 bp, Homo sapiens
cacacgcacacacacacacacaaacacacgcgcacgcaaacagcagtgaggaagagaaaagcagagataagcaaggctccgcagcagcctcctttctaacttgaccctcgccagaccctggccagcatggttgtcctgaatccaatgactttgggaatttatcttcagcttttcttcctctctatcgtgtctcagccgactttcatcaacagcgttcttccaatctcagcagcccttcccagcctggatcagaagaagcgtggtggccacaaagcatgctgcctgctgacgcctcctccaccaccactgttcccaccaccattcttcagaggtggccgaagtccgcttctctccccagacatgaagaatctcatgctggaactggagacctcgcagtccccgtgcatgcaaggctcgctaggctcccctgggcctcccggcccccagggtccaccggggcttcctggcaagacaggaccaaagggagaaaagggggagcttggccgaccaggaaggaagggtagacctggccccccaggtgttcctggcatgcctgggcccatcggttggccaggccctgaaggacccaggggtgaaaaaggtgacctgggtatgatgggcttgccagggtcaagaggaccaatgggctccaagggctaccctggatccagaggggaaaagggatccagaggtgaaaagggtgacctgggtcccaaaagttcaagaactccttgcacattaccaagacggcccccagtgccatgtggacaaggcagccggtcacctgtcaccgttgtggctggaaacgagtcccaagcctgcctgctccccagatttgaggaagattacatttcatcagggacagaaaggggatagtggagttatgggcccaccaggcaagcctgggccttctggtcaacctggccgtccggggcccccaggccccccacctgcaggacaacttataatgggacccaaaggggaaagaggatttcccgggcctccaggaagatgtctttgtggacccactatgaatgtgaataacccttcctacggggaatctgtgtatgggcccagttccccgcgagttcctgtgatttttgtggtcaacaaccaggaggagcttgagaggctgaacacccaaaacgccattgccttccgcagagaccagagatctctgtacttcaaggacagccttggctggctccccatccagctgacccctttctaccctgtggattacactgcagaccagcacggcacctgtggggatgggctcctgcagcctggggaggagtgtgacgacggtaacagcgatgtgggtgacgactgcatccgctgtcaccgtgcctactgtggagatggtcaccggcatgagggtgtggaggactgtgacggctctgactttggctacctgacatgcgagacctatctccctgggtcatatggagacctgcaatgcacccagtactgctacatcgactccacgccctgccgctacttcacctgagggccgtgaggagaaggtgggctgcgccccacagaactggcagcagcttctccactgtcatcaaactggccatgtcctggccccgtctccaccaacctttgtgtgacaaaaacaaggacaaattcctgctactaagacatgctgttaactcagtctgactggaagaatttaggaccactgcatcctgtcttaatccaaggtactggaaaaccttccacatgcccaacctgagacctgttccccatcgctaccatttggccaaacaaccggctacaatgctcttcctcttctggaatgttgctgacccaggccgtggacttggctgagcactgttagacacacacagacctgcaggctgttttagaatgttttgatctctttggggaatctggagtacaggcctctccgcccctgaccaccgaaacgtgcaggcattctcactcacactgggcagcccgctgtcgggtctctctaggcctatgaaccacaaagcagggaagtgggcacgttctctcggggtggctcacagctttgaacctgccaaaggacccctcgactggccacagcccagcccagcctgacgtggatgtggctgcccaggaaaagacttaactgtgaaaaagtactgagaacccacctgacccaggcttgccccaagcagaggctagagaagaggctcctcttctcagtgtttcccaaaggggcggctcttgtggtttcaaaatctctggcaccatcttgacctcttggctctctctgcactttgccccctgtctcaaaaatgtccctcatgtccatttcctgtccaggagactcatgaggactgtgtgacctgcacaagcccacacctgggcaggctgttggtgtctccttggtccttaggcagatactcccctgagtccccgatctagggccagctgcagagggctctctctaggcagagcgttcctggccagagctctacctctttgcctcctgctgacccctgacagcgtcccgtggcatttctttcatgtctgcatattgcatagccttgtcctcctgtgtgcctgagctcctcccttttcaataagattattagtcgtgcatgtctgtgagctgcctttcatcaccatttttcctgagtagggcttagttttattctggaaagacatctccaaggtgaggtccacccccacagcagacctcaagtagaaattgcccaatttttaccagctggagggacacccttgggtttttgtacgaagctatttaatgagcctgtgtcttggggactcagcaggctggagcttggggcctggtggaccatcacctggtgtctgtaggtggacccggtctcccacaggtgacatcaacctgagggtggcgtctttagagacaggcacatgggcagccctgttcccttcgcctctactgcgaggcctggggagatgttgttttcatgctgcttccaccatcacactggggtttctggatgggaaataaaaaaataaaggcagttcatttcccca

SEQ ID NO: 697 - protein, 249 aa, Homo sapiens
MVVLNPMTLGIYLQLFFLSIVSQPTFINSVLPISAALPSLDQKKRGGHKACCLLTPPPPPLFPPPFFRGGRSPLLSPDMKNLMLELETSQSPCMQGSLGSPGPPGPQGPPGLPGKTGPKGEKGELGRPGRKGRPGPPGVPGMPGPIGWPGPEGPRGEKGDLGMMGLPGSRGPMGSKGYPGSRGEKGSRGEKGDLGPKSSRTPCTLPRRPPVPCGQGSRSPVTVVAGNESQACLLPRFEEDYISSGTERG

SEQ ID NO: 698 - DNA, 987 bp, Homo sapiens
cacacgcacacacacacacacaaacacacgcgcacgcaaacagcagtgaggaagagaaaagcagagataagcaaggctccgcagcagcctcctttctaacttgaccctcgccagaccctggccagcatggttgtcctgaatccaatgactttgggaatttatcttcagcttttcttcctctctatcgtgtctcagccgactttcatcaacagcgttcttccaatctcagcagcccttcccagcctggatcagaagaagcgtggtggccacaaagcatgctgcctgctgacgcctcctccaccaccactgttcccaccaccattcttcagaggtggccgaagtccgcttctctccccagacatgaagaatctcatgctggaactggagacctcgcagtccccgtgcatgcaaggctcgctaggctcccctgggcctcccggcccccagggtccaccggggcttcctggcaagacaggaccaaagggagaaaagggggagcttggccgaccaggaaggaaggtatgacctggccccccaggtgttcctggcatgcctgggcccatcggttggccaggccctgaaggacccaggggtgaaaaaggtgacctgggtatgatgggcttgccagggtcaagaggaccaatgggctccaagggctaccctggatccagaggggaaaagggatccagaggtgaaaagggtgacctgggtcccaaaggagaaaagggtttcccaggatttcctggaatgttggggcagaaaggtgaaatgggtccaaaaggtgaacctgggatagcaggacaccgaggacccacaggaagaccaggaaaacgaggcaagcagagttcaagaactccttgcacattaccaagacggcccccagtgccatgtggacaaggcagccggtcacctgtcaccgttgtggctggaaacgagtcccaagcctgcctgctccccagatttgaggaagattacatttcatcaggt

SEQ ID NO: 699 - protein, 146 aa, Homo sapiens [sequence omitted]

SEQ ID NO: 700 - DNA, 2899 bp, Homo sapiens
cacacgcacacacacacacacaaacacacgcgcacgcaaacagcagtgaggaagagaaaagcagagataagcaaggctccgcagcagcctcctttctaacttgaccctcgccagaccctggccagcatggttgtcctgaatccaatgactttgggaatttatcttcagcttttcttcctctctatcgtgtctcagccgactttcatcaacagccattcttcagaggtggccgaagtccgcttctctccccagacatgaagaatctcatgctggaactggagacctcgcagtccccgtgcatgcaaggctcgctaggctcccctgggcctcccggcccccagggtccaccggggcttcctggcaagacaggaccaaagggagaaaagggggagcttggccgaccaggaaggaagggtagacctggccccccaggtgttcctggcatgcctgggcccatcggttggccaggccctgaaggacccaggggtgaaaaaggtgacctgggtatgatgggcttgccagggtcaagaggaccaatgggctccaagggctaccctggatccagaggggaaaagggatccagaggtgaaaagggtgacctgggtcccaaaggagaaaagggtttcccaggatttcctggaatgttggggcagaaaggtgaaatgggtccaaaaggtgaacctgggatagcaggacaccgaggacccacaggaagaccaggaaaacgaggcaagcagggacagaaaggggatagtggagttatgggcccaccaggcaagcctgggccttctggtcaacctggccgtccggggcccccaggccccccacctgcaggacaacttataatgggacccaaaggggaaagaggatttcccgggcctccaggaagatgtctttgtggacccactatgaatgtgaataacccttcctacggggaatctgtgtatgggcccagttccccgcgagttcctgtgatttttgtggtcaacaaccaggaggagcttgagaggctgaacacccaaaacgccattgccttccgcagagaccagagatctctgtacttcaaggacagccttggctggctccccatccagctgacccctttctaccctgtggattacactgcagaccagcacggcacctgtggggatgggctcctgcagcctggggaggagtgtgacgacggtaacagcgatgtgggtgacgactgcatccgctgtcaccgtgcctactgtggagatggtcaccggcatgagggtgtggaggactgtgacggctctgactttggctacctgacatgcgagacctatctccctgggtcatatggagacctgcaatgcacccagtactgctacatcgactccacgccctgccgctacttcacctgagggccgtgaggagaaggtgggctgcgccccacagaactggcagcagcttctccactgtcatcaaactggccatgtcctggccccgtctccaccaacctttgtgtgacaaaaacaaggacaaattcctgctactaagacatgctgttaactcagtctgactggaagaatttaggaccactgcatcctgtcttaatccaaggtactggaaaaccttccacatgcccaacctgagacctgttccccatcgctaccatttggccaaacaaccggctacaatgctcttcctcttctggaatgttgctgacccaggccgtggacttggctgagcactgttagacacacacagacctgcaggctgttttagaatgttttgatctctttggggaatctggagtacaggcctctccgcccctgaccaccgaaacgtgcaggcattctcactcacactgggcagcccgctgtcgggtctctctaggcctatgaaccacaaagcagggaagtgggcacgttctctcggggtggctcacagctttgaacctgccaaaggacccctcgactggccacagcccagcccagcctgacgtggatgtggctgcccaggaaaagacttaactgtgaaaaagtactgagaacccacctgacccaggcttgccccaagcagaggctagagaagaggctcctcttctcagtgtttcccaaaggggcggctcttgtggtttcaaaatctctggcaccatcttgacctcttggctctctctgcactttgccccctgtctcaaaaatgtccctcatgtccatttcctgtccaggagactcatgaggactgtgtgacctgcacaagcccacacctgggcaggctgttggtgtctccttggtccttaggcagatactcccctgagtccccgatctagggccagctgcagagggctctctctaggcagagcgttcctggccagagctctacctctttgcctcctgctgacccctgacagcgtcccgtggcatttctttcatgtctgcatattgcatagccttgtcctcctgtgtgcctgagctcctcccttttcaataagattattagtcgtgcatgtctgtgagctgcctttcatcaccatttttcctgagtagggcttagttttattctggaaagacatctccaaggtgaggtccacccccacagcagacctcaagtagaaattgcccaatttttaccagctggagggacacccttgggtttttgtacgaagctatttaatgagcctgtgtcttggggactcagcaggctggagcttggggcctggtggaccatcacctggtgtctgtaggtggacccggtctcccacaggtgacatcaacctgagggtggcgtctttagagacaggcacatgggcagccctgttcccttcgcctctactgcgaggcctggggagatgttgttttcatgctgcttccaccatcacactggggtttctggatgggaaataaaaaaataaaggcagttcatttcccca

SEQ ID NO: 701 - protein, 377 aa, Homo sapiens [sequence omitted]

SEQ ID NO: 702 - DNA, 2857 bp, Homo sapiens
gcctcacaatgacgggctcatcattcagcctcgctcatctgctcatcatttcaggactgctctgttactcggcaggctgcttggcccttcccagcctggatcagaagaagcgtggtggccacaaagcatgctgcctgctgacgcctcctccaccaccactgttcccaccaccattcttcagaggtggccgaagtccgcttctctccccagacatgaagaatctcatgctggaactggagacctcgcagtccccgtgcatgcaaggctcgctaggctcccctgggcctcccggcccccagggtccaccggggcttcctggcaagacaggaccaaagggagaaaagggggagcttggccgaccaggaaggaaggtatgacctggccccccaggtgttcctggcatgcctgggcccatcggttggccaggccctgaaggacccaggggtgaaaaaggtgacctgggtatgatgggcttgccagggtcaagaggaccaatgggctccaagggctaccctggatccagaggggaaaagggatccagaggtgaaaagggtgacctgggtcccaaaggagaaaagggtttcccaggatttcctggaatgttggggcagaaaggtgaaatgggtccaaaaggtgaacctgggatagcaggacaccgaggacccacaggaagaccaggaaaacgaggcaagcagggacagaaaggggatagtggagttatgggcccaccaggcaagcctgggccttctggtcaacctggccgtccggggcccccaggccccccacctgcaggacaacttataatgggacccaaaggggaaagaggatttcccgggcctccaggaagatgtctttgtggacccactatgaatgtgaataacccttcctacggggaatctgtgtatgggcccagttccccgcgagttcctgtgatttttgtggtcaacaaccaggaggagcttgagaggctgaacacccaaaacgccattgccttccgcagagaccagagatctctgtacttcaaggacagccttggctggctccccatccagctgacccctttctaccctgtggattacactgcagaccagcacggcacctgtggggatgggctcctgcagcctggggaggagtgtgacgacggtaacagcgatgtgggtgacgactgcatccgctgtcaccgtgcctactgtggagatggtcaccggcatgagggtgtggaggactgtgacggctctgactttggctacctgacatgcgagacctatctccctgggtcatatggagacctgcaatgcacccagtactgctacatcgactccacgccctgccgctacttcacctgagggccgtgaggagaaggtgggctgcgccccacagaactggcagcagcttctccactgtcatcaaactggccatgtcctggccccgtctccaccaacctttgtgtgacaaaaacaaggacaaattcctgctactaagacatgctgttaactcagtctgactggaagaatttaggaccactgcatcctgtcttaatccaaggtactggaaaaccttccacatgcccaacctgagacctgttccccatcgctaccatttggccaaacaaccggctacaatgctcttcctcttctggaatgttgctgacccaggccgtggacttggctgagcactgttagacacacacagacctgcaggctgttttagaatgttttgatctctttggggaatctggagtacaggcctctccgcccctgaccaccgaaacgtgcaggcattctcactcacactgggcagcccgctgtcgggtctctctaggcctatgaaccacaaagcagggaagtgggcacgttctctcggggtggctcacagctttgaacctgccaaaggacccctcgactggccacagcccagcccagcctgacgtggatgtggctgcccaggaaaagacttaactgtgaaaaagtactgagaacccacctgacccaggcttgccccaagcagaggctagagaagaggctcctcttctcagtgtttcccaaaggggcggctcttgtggtttcaaaatctctggcaccatcttgacctcttggctctctctgcactttgccccctgtctcaaaaatgtccctcatgtccatttcctgtccaggagactcatgaggactgtgtgacctgcacaagcccacacctgggcaggctgttggtgtctccttggtccttaggcagatactcccctgagtccccgatctagggccagctgcagagggctctctctaggcagagcgttcctggccagagctctacctctttgcctcctgctgacccctgacagcgtcccgtggcatttctttcatgtctgcatattgcatagccttgtcctcctgtgtgcctgagctcctcccttttcaataagattattagtcgtgcatgtctgtgagctgcctttcatcaccatttttcctgagtagggcttagttttattctggaaagacatctccaaggtgaggtccacccccacagcagacctcaagtagaaattgcccaatttttaccagctggagggacacccttgggtttttgtacgaagctatttaatgagcctgtgtcttggggactcagcaggctggagcttggggcctggtggaccatcacctggtgtctgtaggtggacccggtctcccacaggtgacatcaacctgagggtggcgtctttagagacaggcacatgggcagccctgttcccttcgcctctactgcgaggcctggggagatgttgttttcatgctgcttccaccatcacactggggtttctggatgggaaataaaaaaataaaggcagttcatttcccca

SEQ ID NO: 703 - protein, 314 aa, Homo sapiens [sequence omitted]

SEQ ID NO: 704 - DNA, 2865 bp, Homo sapiens
cacacgcacacacacacacacaaacacacgcgcacgcaaacagcagtgaggaagagaaaagcagagataagcaaggctccgcagcagcctcctttctaacttgaccctcgccagaccctggccagcatggttgtcctgaatccaatgactttgggaatttatcttcagcttttcttcctctctatcgtgtctcagccgactttcatcaacagcgttcttccaatctcagcagcccttcccagcctggatcagaagaagcgtggtggccacaaagcatgctgcctgctgacgcctcctccaccaccactgttcccaccaccattcttcagaggtggccgaagtccgcttctctccccagacatgaagaatctcatgctggaactggagacctcgcagtccccgtgcatgcaaggctcgctaggctcccctgggcctcccggcccccagggtccaccggggcttcctggcaagacaggaccaaagggagaaaagggggagcttggccgaccaggaaggaagggtagacctggccccccaggtgttcctggcatgcctgggcccatcggttggccaggccctgaaggacccaggggtgaaaaaggtgacctgggtatgatgggcttgccagggtcaagaggaccaatgggctccaagggctaccctggatccagaggggaaaagggatccagaggtgaaaagggtgacctgggtcccaaaggagaaaagggtttcccaggatttcctggaatgttggggcagaaaggtgaaatgggtccaaaaggtgaacctgggatagcaggacaccgaggacccacaggaagaccaggaaaacgaggcaagcagggacagaaaggggatagtggagttatgggcccaccaggcaagcctgggccttctggtcaacctggccgtccggggcccccaggccccccacctgcagatttttgtggtcaacaaccaggaggagcttgagaggctgaacacccaaaacgccattgccttccgcagagaccagagatctctgtacttcaaggacagccttggctggctccccatccagctgacccctttctaccctgtggattacactgcagaccagcacggcacctgtggggatgggctcctgcagcctggggaggagtgtgacgacggtaacagcgatgtgggtgacgactgcatccgctgtcaccgtgcctactgtggagatggtcaccggcatgagggtgtggaggactgtgacggctctgactttggctacctgacatgcgagacctatctccctgggtcatatggagacctgcaatgcacccagtactgctacatcgactccacgccctgccgctacttcacctgagggccgtgaggagaaggtgggctgcgccccacagaactggcagcagcttctccactgtcatcaaactggccatgtcctggccccgtctccaccaacctttgtgtgacaaaaacaaggacaaattcctgctactaagacatgctgttaactcagtctgactggaagaatttaggaccactgcatcctgtcttaatccaaggtactggaaaaccttccacatgcccaacctgagacctgttccccatcgctaccatttggccaaacaaccggctacaatgctcttcctcttctggaatgttgctgacccaggccgtggacttggctgagcactgttagacacacacagacctgcaggctgttttagaatgttttgatctctttggggaatctggagtacaggcctctccgcccctgaccaccgaaacgtgcaggcattctcactcacactgggcagcccgctgtcgggtctctctaggcctatgaaccacaaagcagggaagtgggcacgttctctcggggtggctcacagctttgaacctgccaaaggacccctcgactggccacagcccagcccagcctgacgtggatgtggctgcccaggaaaagacttaactgtgaaaaagtactgagaacccacctgacccaggcttgccccaagcagaggctagagaagaggctcctcttctcagtgtttcccaaaggggcggctcttgtggtttcaaaatctctggcaccatcttgacctcttggctctctctgcactttgccccctgtctcaaaaatgtccctcatgtccatttcctgtccaggagactcatgaggactgtgtgacctgcacaagcccacacctgggcaggctgttggtgtctccttggtccttaggcagatactcccctgagtccccgatctagggccagctgcagagggctctctctaggcagagcgttcctggccagagctctacctctttgcctcctgctgacccctgacagcgtcccgtggcatttctttcatgtctgcatattgcatagccttgtcctcctgtgtgcctgagctcctcccttttcaataagattattagtcgtgcatgtctgtgagctgcctttcatcaccatttttcctgagtagggcttagttttattctggaaagacatctccaaggtgaggtccacccccacagcagacctcaagtagaaattgcccaatttttaccagctggagggacacccttgggtttttgtacgaagctatttaatgagcctgtgtcttggggactcagcaggctggagcttggggcctggtggaccatcacctggtgtctgtaggtggacccggtctcccacaggtgacatcaacctgagggtggcgtctttagagacaggcacatgggcagccctgttcccttcgcctctactgcgaggcctggggagatgttgttttcatgctgcttccaccatcacactggggtttctggatgggaaataaaaaaataaaggcagttcatttcccca

SEQ ID NO: 705 - protein, 281 aa, Homo sapiens
MVVLNPMTLGIYLQLFFLSIVSQPTFINSVLPISAALPSLDQKKRGGHKACCLLTPPPPPLFPPPFFRGGRSPLLSPDMKNLMLELETSQSPCMQGSLGSPGPPGPQGPPGLPGKTGPKGEKGELGRPGRKGRPGPPGVPGMPGPIGWPGPEGPRGEKGDLGMMGLPGSRGPMGSKGYPGSRGEKGSRGEKGDLGPKGEKGFPGFPGMLGQKGEMGPKGEPGIAGHRGPTGRPGKRGKQGQKGDSGVMGPPGKPGPSGQPGRPGPPGPPPADFCGQQPGGA

SEQ ID NO: 706 - DNA, 2978 bp, Homo sapiens
cacacgcacacacacacacacaaacacacgcgcacgcaaacagcagtgaggaagagaaaagcagagataagcaaggctccgcagcagcctcctttctaacttgaccctcgccagaccctggccagcatggttgtcctgaatccaatgactttgggaatttatcttcagcttttcttcctctctatcgtgtctcagccgactttcatcaacagcgttcttccaatctcagcagcccttcccagcctggatcagaagaagcgtggtggccacaaagcatgctgcctgctgacgcctcctccaccaccactgttcccaccaccattcttcagaggtggccgaagtccgcttctctccccagacatgaagaatctcatgctggaactggagacctcgcagtccccgtgcatgcaaggctcgctaggctcccctgggcctcccggcccccagggtccaccggggcttcctggcaagacaggaccaaagggagaaaagggtagacctggccccccaggtgttcctggcatgcctgggcccatcggttggccaggccctgaaggacccaggggtgaaaaaggtgacctgggtatgatgggcttgccagggtcaagaggaccaatgggctccaagggctaccctggatccagaggggaaaagggatccagaggtgaaaagggtgacctgggtcccaaaggagaaaagggtttcccaggatttcctggaatgttggggcagaaaggtgaaatgggtccaaaaggtgaacctgggatagcaggacaccgaggacccacaggaagaccaggaaaacgaggcaagcagggacagaaaggggatagtggagttatgggcccaccaggcaagcctgggccttctggtcaacctggccgtccggggcccccaggccccccacctgcaggacaacttataatgggacccaaaggggaaagaggatttcccgggcctccaggaagatgtctttgtggacccactatgaatgtgaataacccttcctacggggaatctgtgtatgggcccagttccccgcgagttcctgtgatttttgtggtcaacaaccaggaggagcttgagaggctgaacacccaaaacgccattgccttccgcagagaccagagatctctgtacttcaaggacagccttggctggctccccatccagctgacccctttctaccctgtggattacactgcagaccagcacggcacctgtggggatgggctcctgcagcctggggaggagtgtgacgacggtaacagcgatgtgggtgacgactgcatccgctgtcaccgtgcctactgtggagatggtcaccggcatgagggtgtggaggactgtgacggctctgactttggctacctgacatgcgagacctatctccctgggtcatatggagacctgcaatgcacccagtactgctacatcgactccacgccctgccgctacttcacctgagggccgtgaggagaaggtgggctgcgccccacagaactggcagcagcttctccactgtcatcaaactggccatgtcctggccccgtctccaccaacctttgtgtgacaaaaacaaggacaaattcctgctactaagacatgctgttaactcagtctgactggaagaatttaggaccactgcatcctgtcttaatccaaggtactggaaaaccttccacatgcccaacctgagacctgttccccatcgctaccatttggccaaacaaccggctacaatgctcttcctcttctggaatgttgctgacccaggccgtggacttggctgagcactgttagacacacacagacctgcaggctgttttagaatgttttgatctctttggggaatctggagtacaggcctctccgcccctgaccaccgaaacgtgcaggcattctcactcacactgggcagcccgctgtcgggtctctctaggcctatgaaccacaaagcagggaagtgggcacgttctctcggggtggctcacagctttgaacctgccaaaggacccctcgactggccacagcccagcccagcctgacgtggatgtggctgcccaggaaaagacttaactgtgaaaaagtactgagaacccacctgacccaggcttgccccaagcagaggctagagaagaggctcctcttctcagtgtttcccaaaggggcggctcttgtggtttcaaaatctctggcaccatcttgacctcttggctctctctgcactttgccccctgtctcaaaaatgtccctcatgtccatttcctgtccaggagactcatgaggactgtgtgacctgcacaagcccacacctgggcaggctgttggtgtctccttggtccttaggcagatactcccctgagtccccgatctagggccagctgcagagggctctctctaggcagagcgttcctggccagagctctacctctttgcctcctgctgacccctgacagcgtcccgtggcatttctttcatgtctgcatattgcatagccttgtcctcctgtgtgcctgagctcctcccttttcaataagattattagtcgtgcatgtctgtgagctgcctttcatcaccatttttcctgagtagggcttagttttattctggaaagacatctccaaggtgaggtccacccccacagcagacctcaagtagaaattgcccaatttttaccagctggagggacacccttgggtttttgtacgaagctatttaatgagcctgtgtcttggggactcagcaggctggagcttggggcctggtggaccatcacctggtgtctgtaggtggacccggtctcccacaggtgacatcaacctgagggtggcgtctttagagacaggcacatgggcagccctgttcccttcgcctctactgcgaggcctggggagatgttgttttcatgctgcttccaccatcacactggggtttctggatgggaaataaaaaaataaaggcagttcatttcccca

SEQ ID NO: 707 - protein, 446 aa, Homo sapiens
MVVLNPMTLGIYLQLFFLSIVSQPTFINSVLPISAALPSLDQKKRGGHKACCLLTPPPPPLFPPPFFRGGRSPLLSPDMKNLMLELETSQSPCMQGSLGSPGPPGPQGPPGLPGKTGPKGEKGRPGPPGVPGMPGPIGWPGPEGPRGEKGDLGMMGLPGSRGPMGSKGYPGSRGEKGSRGEKGDLGPKGEKGFPGFPGMLGQKGEMGPKGEPGIAGHRGPTGRPGKRGKQGQKGDSGVMGPPGKPGPSGQPGRPGPPGPPPAGQLIMGPKGERGFPGPPGRCLCGPTMNVNNPSYGESVYGPSSPRVPVIFVVNNQEELERLNTQNAIAFRRDQRSLYFKDSLGWLPIQLTPFYPVDYTADQHGTCGDGLLQPGEECDDGNSDVGDDCIRCHRAYCGDGHRHEGVEDCDGSDFGYLTCETYLPGSYGDLQCTQYCYIDSTPCRYFT

SEQ ID NO: 708 - DNA, 2865 bp, Homo sapiens
cacacgcacacacacacacacaaacacacgcgcacgcaaacagcagtgaggaagagaaaagcagagataagcaaggctccgcagcagcctcctttctaacttgaccctcgccagaccctggccagcatggttgtcctgaatccaatgactttgggaatttatcttcagcttttcttcctctctatcgtgtctcagccgactttcatcaacagcgttcttccaatctcagcagcccttcccagcctggatcagaagaagcgtggtggccacaaagcatgctgcctgctgacgcctcctccaccaccactgttcccaccaccattcttcagaggtggccgaagtccgcttctctccccagacatgaagaatctcatgctggaactggagacctcgcagtccccgtgcatgcaaggctcgctaggctcccctgggcctcccggcccccagggtccaccggggcttcctggcaagacaggaccaaagggagaaaagggggagcttggccgaccaggaaggaaggtatgacctggccccccaggtgttcctggcatgcctgggcccatcggttggccaggccctgaaggacccaggggtgaaaaaggtgacctgggtatgatgggcttgccagggtcaagaggaccaatgggctccaagggctaccctggatccagaggggaaaagggatccagaggtgaaaagggtgacctgggtcccaaaggagaaaagggtttcccaggatttcctggaatgttggggcagaaaggtgaaatgggtccaaaaggtgaacctgggatagcaggacaccgaggacccacaggaagaccaggaaaacgaggcaagcagggacagaaaggggatagtggagttatgggcccaccaggcaagcctgggccttctggtcaacctggccgtccggggcccccaggccccccacctgcagatttttgtggtcaacaaccaggaggagcttgagaggctgaacacccaaaacgccattgccttccgcagagaccagagatctctgtacttcaaggacagccttggctggctccccatccagctgacccctttctaccctgtggattacactgcagaccagcacggcacctgtggggatgggctcctgcagcctggggaggagtgtgacgacggtaacagcgatgtgggtgacgactgcatccgctgtcaccgtgcctactgtggagatggtcaccggcatgagggtgtggaggactgtgacggctctgactttggctacctgacatgcgagacctatctccctgggtcatatggagacctgcaatgcacccagtactgctacatcgactccacgccctgccgctacttcacctgagggccgtgaggagaaggtgggctgcgccccacagaactggcagcagcttctccactgtcatcaaactggccatgtcctggccccgtctccaccaacctttgtgtgacaaaaacaaggacaaattcctgctactaagacatgctgttaactcagtctgactggaagaatttaggaccactgcatcctgtcttaatccaaggtactggaaaaccttccacatgcccaacctgagacctgttccccatcgctaccatttggccaaacaaccggctacaatgctcttcctcttctggaatgttgctgacccaggccgtggacttggctgagcactgttagacacacacagacctgcaggctgttttagaatgttttgatctctttggggaatctggagtacaggcctctccgcccctgaccaccgaaacgtgcaggcattctcactcacactgggcagcccgctgtcgggtctctctaggcctatgaaccacaaagcagggaagtgggcacgttctctcggggtggctcacagctttgaacctgccaaaggacccctcgactggccacagcccagcccagcctgacgtggatgtggctgcccaggaaaagacttaactgtgaaaaagtactgagaacccacctgacccaggcttgccccaagcagaggctagagaagaggctcctcttctcagtgtttcccaaaggggcggctcttgtggtttcaaaatctctggcaccatcttgacctcttggctctctctgcactttgccccctgtctcaaaaatgtccctcatgtccatttcctgtccaggagactcatgaggactgtgtgacctgcacaagcccacacctgggcaggctgttggtgtctccttggtccttaggcagatactcccctgagtccccgatctagggccagctgcagagggctctctctaggcagagcgttcctggccagagctctacctctttgcctcctgctgacccctgacagcgtcccgtggcatttctttcatgtctgcatattgcatagccttgtcctcctgtgtgcctgagctcctcccttttcaataagattattagtcgtgcatgtctgtgagctgcctttcatcaccatttttcctgagtagggcttagttttattctggaaagacatctccaaggtgaggtccacccccacagcagacctcaagtagaaattgcccaatttttaccagctggagggacacccttgggtttttgtacgaagctatttaatgagcctgtgtcttggggactcagcaggctggagcttggggcctggtggaccatcacctggtgtctgtaggtggacccggtctcccacaggtgacatcaacctgagggtggcgtctttagagacaggcacatgggcagccctgttcccttcgcctctactgcgaggcctggggagatgttgttttcatgctgcttccaccatcacactggggtttctggatgggaaataaaaaaataaaggcagttcatttcccca

SEQ ID NO: 709 - protein, 140 aa, Homo sapiens [sequence omitted]

SEQ ID NO: 710 - DNA, 3005 bp, Homo sapiens
cacacgcacacacacacacacaaacacacgcgcacgcaaacagcagtgaggaagagaaaagcagagataagcaaggctccgcagcagcctcctttctaacttgaccctcgccagaccctggccagcatggttgtcctgaatccaatgactttgggaatttatcttcagcttttcttcctctctatcgtgtctcagccgactttcatcaacagcgttcttccaatctcagcagcccttcccagcctggatcagaagaagcgtggtggccacaaagcatgctgcctgctgacgcctcctccaccaccactgttcccaccaccattcttcagaggtggccgaagtccgcttctctccccagacatgaagaatctcatgctggaactggagacctcgcagtccccgtgcatgcaaggctcgctaggctcccctgggcctcccggcccccagggtccaccggggcttcctggcaagacaggaccaaagggagaaaagggggagcttggccgaccaggaaggaagggtagacctggccccccaggtgttcctggcatgcctgggcccatcggttggccaggccctgaaggacccaggggtgaaaaaggtgacctgggtatgatgggcttgccagggtcaagaggaccaatgggctccaagggctaccctggatccagaggggaaaagggatccagaggtgaaaagggtgacctgggtcccaaaggagaaaagggtttcccaggatttcctggaatgttggggcagaaaggtgaaatgggtccaaaaggtgaacctgggatagcaggacaccgaggacccacaggaagaccaggaaaacgaggcaagcagggacagaaaggggatagtggagttatgggcccaccaggcaagcctgggccttctggtcaacctggccgtccggggcccccaggccccccacctgcaggacaacttataatgggacccaaaggggaaagaggatttcccgggcctccaggaagatgtctttgtggacccactatgaatgtgaataacccttcctacggggaatctgtgtatgggcccagttccccgcgagttcctgtgatttttgtggtcaacaaccaggaggagcttgagaggctgaacacccaaaacgccattgccttccgcagagaccagagatctctgtacttcaaggacagccttggctggctccccatccagctgacccctttctaccctgtggattacactgcagaccagcacggcacctgtggggatgggctcctgcagcctggggaggagtgtgacgacggtaacagcgatgtgggtgacgactgcatccgctgtcaccgtgcctactgtggagatggtcaccggcatgagggtgtggaggactgtgacggctctgactttggctacctgacatgcgagacctatctccctgggtcatatggagacctgcaatgcacccagtactgctacatcgactccacgccctgccgctacttcacctgagggccgtgaggagaaggtgggctgcgccccacagaactggcagcagcttctccactgtcatcaaactggccatgtcctggccccgtctccaccaacctttgtgtgacaaaaacaaggacaaattcctgctactaagacatgctgttaactcagtctgactggaagaatttaggaccactgcatcctgtcttaatccaaggtactggaaaaccttccacatgcccaacctgagacctgttccccatcgctaccatttggccaaacaaccggctacaatgctcttcctcttctggaatgttgctgacccaggccgtggacttggctgagcactgttagacacacacagacctgcaggctgttttagaatgttttgatctctttggggaatctggagtacaggcctctccgcccctgaccaccgaaacgtgcaggcattctcactcacactgggcagcccgctgtcgggtctctctaggcctatgaaccacaaagcagggaagtgggcacgttctctcggggtggctcacagctttgaacctgccaaaggacccctcgactggccacagcccagcccagcctgacgtggatgtggctgcccaggaaaagacttaactgtgaaaaagtactgagaacccacctgacccaggcttgccccaagcagaggctagagaagaggctcctcttctcagtgtttcccaaaggggcggctcttgtggtttcaaaatctctggcaccatcttgacctcttggctctctctgcactttgccccctgtctcaaaaatgtccctcatgtccatttcctgtccaggagactcatgaggactgtgtgacctgcacaagcccacacctgggcaggctgttggtgtctccttggtccttaggcagatactcccctgagtccccgatctagggccagctgcagagggctctctctaggcagagcgttcctggccagagctctacctctttgcctcctgctgacccctgacagcgtcccgtggcatttctttcatgtctgcatattgcatagccttgtcctcctgtgtgcctgagctcctcccttttcaataagattattagtcgtgcatgtctgtgagctgcctttcatcaccatttttcctgagtagggcttagttttattctggaaagacatctccaaggtgaggtccacccccacagcagacctcaagtagaaattgcccaatttttaccagctggagggacacccttgggtttttgtacgaagctatttaatgagcctgtgtcttggggactcagcaggctggagcttggggcctggtggaccatcacctggtgtctgtaggtggacccggtctcccacaggtgacatcaacctgagggtggcgtctttagagacaggcacatgggcagccctgttcccttcgcctctactgcgaggcctggggagatgttgttttcatgctgcttccaccatcacactggggtttctggatgggaaataaaaaaataaaggcagttcatttcccca

SEQ ID NO: 711 - protein, 455 aa, Homo sapiens
MVVLNPMTLGIYLQLFFLSIVSQPTFINSVLPISAALPSLDQKKRGGHKACCLLTPPPPPLFPPPFFRGGRSPLLSPDMKNLMLELETSQSPCMQGSLGSPGPPGPQGPPGLPGKTGPKGEKGELGRPGRKGRPGPPGVPGMPGPIGWPGPEGPRGEKGDLGMMGLPGSRGPMGSKGYPGSRGEKGSRGEKGDLGPKGEKGFPGFPGMLGQKGEMGPKGEPGIAGHRGPTGRPGKRGKQGQKGDSGVMGPPGKPGPSGQPGRPGPPGPPPAGQLIMGPKGERGFPGPPGRCLCGPTMNVNNPSYGESVYGPSSPRVPVIFVVNNQEELERLNTQNAIAFRRDQRSLYFKDSLGWLPIQLTPFYPVDYTADQHGTCGDGLLQPGEECDDGNSDVGDDCIRCHRAYCGDGHRHEGVEDCDGSDFGYLTCETYLPGSYGDLQCTQYCYIDSTPCRYFT
